United States Patent Application Publication US 2017/0114356 A1 - sequence listing, part 3

SEQ ID NO: 2588 - DNA, 3107 bp, Zea Mays
tcacttgcatctaggcttctagctgtactcctcggccggtcggtcccacccatggacagtgacaatgattgcggctccgacgccggcgccgagtgggtctgggtacgccgtccgtcggaggttgaggccgctgccgcggcggccggatggctggcggatgaagaggcgcggccgctcaaggtggtcttcggctccccggctaagtacttcaccgacgcagcgccgatcgggaacggccgcctaggcgccatggtctggggctgcgtcgaatctgagaggctccagcttaaccatgacactctatggacaggtggacctggtaattatacaaatcccaatgcacctgctgttctttctaaagtaaggagccttgttgagaacggaaagtaccctgaagccacatctgctgcatatgatctatctggtgaccaaacacaggtctttcaacctcttggggatattgatctggtctttggtgaggacatcaagtacacaaattacagacgagagctagatcttcacactgcaacagtcaccgtcacatatactgttggggatatagtctacacaagggaacatttctcctcaaacccacatcaagtcattgtgactaagatctctgcaaataaaccaggaaatgtctctttcacagtgtctttaactagtccactagaccacaagattcgtgtaacacatgcaaatgaaataatcatggagggtagctgtccaggccaaaggcctgaagagatcaagactgctgctgatcaacctattggaattaaattttctgcgattctttatctgcagataaatggtgccaatagcacagtggaagtattgaatgataacatgctgaaacttgattgtgccgactctgttgttttacttcttgcagccaccacttcatttcaaagtgcattcatcaaaccttcagaatctaaactggatccaacagtgtctgcttttacgacattaagtattgctaggagaacgtcatattcacaactaaaagcctaccacattgatgattaccagactcttttccagcgtgtttccttgcaactatcacaaggctctaattatgatcttcggaggagtaggctagttcagtcagcagagactagttctcagggtgctaatgtatcggattatggttttcaaatatctggctgcaccagattgacatcccttaatagttttgtgaagcctacggtagaaagaattgtaactttcaaagacaatgaagacccttctcttgtggaacttctgtttcagtttggtcgttatctactcatttcgtgctcaaggcctggaacccaaatttccaatctacaagggatatggagcaatgacacttcaccaccatgggatgcagcaccccatccaaatataaatctacaaatgaattattggcctgcgcttccttgtaatcttagcgagtgccaagaaccactgtttgactttattggttccctctcaatcaatggagctaagactgcaaaagtgaattatgaggctagtggttgggtcagtcatcaagtcacagacttatgggcaaaaacatcaccagatgctggtgatcctgtatgggctctatggccaatgggtgggccttggcttgcaactcatctctgggagcattactgttttactttggacaaagtgagccgcactagaacaaaatatagtaatatacattacttatttactttcgtgtatcaaactaaaatgagaaaattgtttttccatagttagatattaaaagagacaaagagtagtttcatggtcatttttattttgcgacctcttgatgacacttccattcttctgggcaatatcttgtgctactattagttgagtctcatctgctgtcatcctgggatggcatgctctctatttggtcaaggtacttgtcttttcaacactaaaagcacaatacaatgaacactagaaagggtgttaggaattgagaatcatctgaactacatgtgttagatgtagcatctagcaccagaaagatgtatgttttcatgtgtgccaacttgttatgtcaatagtgtgctgaagatgctcaatgattcacatgctgcacttcagtgatatcctaaaaactgcactagtgtcatttactaatacacaagctttactgattgtaatatatggatagtttattttgattacatggtgaagtttcggtgttaatgcccttgactaggagggaacgcatgtcgatagctttgaactgactgttttcttttaacaaattgcatgctcacattccctgaatattttaaaatttacataaaattgaacaagatcagatgcgagttattccactttcgttgcagcattttttagagaaaacagcgtatccactattggaaggatcagctaggtttttgttggattggttaattgaaggacacaggggatatttggagaccaatccttctacatctccagaacattattttattgctccagatggtaaggaggcctgtgtgagctactcaacaactatggacatctcaattataagggaagttttctcagctcttatattgtctgctgacattttaggtaaatccgacactaatgtggtgcagagaataaaaaaagcactgccaaatctcccaccaatgaaagttgctagagatggcacaatcatggagtgggcacaagactttcaggatcctgagattcatcacagacatgtgtctcacttgtttggtctttatcctggacatactatgtcacttgaggaaacacctgacctctgcagagctgttgccaatagtctttataaaagaggttcccagctgcgttgtcggaaatgctggtacagagcactgggaccgacttgtaccttctccctgctctgccccgcaacaagtggcctcaaggctacgttaaaggtctgaaggcccgaggtggtgttactgtaaacatcagctggaaggaagggagcctccatgaagctctgctatggtctagcggcgggcagaataccctttcaaggctgcactacggggaccagattgccaccgtcagcctatcatcgggtcaagtttacagtcctgccctttggagaggttgtcaaaaaagtt

SEQ ID NO: 2589 - DNA, 2353 bp, Zea Mays
tcacttgcatctaggcttctagctgtactcctcggccggtcggtcccacccatggacagtgacaatgattgcggctccgacgccggcgccgagtgggtctgggtacgccgtccgtcggaggttgaggccgctgccgcggcggccggatggctggcggatgaagaggcgcggccgctcaaggtggtcttcggctccccggctaagtacttcaccgacgcagcgccgatcgggaacggccgcctaggcgccatggtctggggctgcgtcgaatctgagaggctccagcttaaccatgacactctatggacaggtggacctggtaattatacaaatcccaatgcacctgctgttctttctaaagtaaggagccttgttgagaacggaaagtaccctgaagccacatctgctgcatatgatctatctggtgaccaaacacaggtctttcaacctcttggggatattgatctggtctttggtgaggacatcaagtacacaaattacagacgagagctagatcttcacactgcaacagtcaccgtcacatatactgttggggatatagtctacacaagggaacatttctcctcaaacccacatcaagtcattgtgactaagatctctgcaaataaaccaggaaatgtctctttcacagtgtctttaactagtccactagaccacaagattcgtgtaacacatgcaaatgaaataatcatggagggtagctgtccaggccaaaggcctgaagagatcaagactgctgctgatcaacctattggaattaaattttctgcgattctttatctgcagataaatggtgccaatagcacagtggaagtattgaatgataacatgctgaaacttgattgtgccgactctgttgttttacttcttgcagccaccacttcatttcaaagtgcattcatcaaaccttcagaatctaaactggatccaacagtgtctgcttttacgacattaagtattgctaggagaacgtcatattcacaactaaaagcctaccacattgatgattaccagactcttttccagcgtgtttccttgcaactatcacaaggctctaattatgatcttcggaggagtaggctagttcagtcagcagagactagttctcagggtgctaatgtatcggattatggttttcaaatatctggctgcaccagattgacatcccttaatagttttgtgaagcctacggtagaaagaattgtaactttcaaagacaatgaagacccttctcttgtggaacttctgtttcagtttggtcgttatctactcatttcgtgctcaaggcctggaacccaaatttccaatctacaagggatatggagcaatgacacttcaccaccatgggatgcagcaccccatccaaatataaatctacaaatgaattattggcctgcgcttccttgtaatcttagcgagtgccaagaaccactgtttgactttattggttccctctcaatcaatggagctaagactgcaaaagtgaattatgaggctagtggttgggtcagtcatcaagtcacagacttatgggcaaaaacatcaccagatgctggtgatcctgtatgggctctatggccaatgggtgggccttggcttgcaactcatctctgggagcattactgttttactttggacaaacattttttagagaaaacagcgtatccactattggaaggatcagctaggtttttgttggattggttaattgaaggacacaggggatatttggagaccaatccttctacatctccagaacattattttattgctccagatggtaaggaggcctgtgtgagctactcaacaactatggacatctcaattataagggaagttttctcagctcttatattgtctgctgacattttaggtaaatccgacactaatgtggtgcagagaataaaaaaagcactgccaaatctcccaccaatgaaagttgctagagatggcacaatcatggagtgggcacaagactttcaggatcctgagattcatcacagacatgtgtctcacttgtttggtctttatcctggacatactatgtcacttgaggaaacacctgacctctgcagagctgttgccaatagtctttataaaagaggtgacgaaggcccaggctggtctacttcatggaaaatggtcctatgggctcgccttcacaacagtgaccatgcatacaaaatgatactgcagctaatcactttggtggatccagaacatgaggtttcaagagaaggaggcctatacagcaatctgttcactgcacatccacctttccaaattgatgcaaattttggtcctgccctttggagaggttgtcaaaaaagtt

SEQ ID NO: 2590 - DNA, 1198 bp, Zea Mays
atggccaccgcgccctgtttctctctcccctgcgctcagctcgtcgagctctccctctccctggttccgcgcgactccggcatcgagctcctccccgcgcgtgcagccaccgttctccctcagctcgccggcgatgctccggtttcctgctcccatctccctagccgcatcgctggcccttcggacctgaccatcgtttgccgctgaaccaaagttagattaattttcagtttccctcgcgtggctctttggagataagctcctcgccggctgtcgctcccaattttcagttcgccgacatcgtcgtgttccttgtttttcctcgtcggccgacctcgccacaacttagttcgtccgtcgtgctggtcgctatcccatgctgtgcctattagcttggaccctgcctagctcgccgtcgcgtcgtttgccgtcgatctcgcttggccctatatcgttaggctagtcgaccatagtcgttgctgcgcgcttgtccctgatgcccatcgtacagtatttgggtctcgccgattggctgctcttgcccgcagttaattccgcttcgcagctcacctgctgttgtggtgctgctatcccacgacactcgtaccggtgcatcgtcgcctggctgggagttgtcgcccctagttcgctttcgtccaaatcgccaccgcggatgcttgggtctctggtcgcgcgtctttctatctcgcgctcatctgatctgatgcctcagcaacaccgtggttgtccttcctcgcggtgttgttatttaccctgctattgtaatcgtgcctcatgcgctgctcgtctgaaatacctaagccaagtgaatatcctgcgcgactcatgttcggttcgtccaaattattcagtcgaggaagattccaagagttgtggattgaagagaaaagtggagcttcgttctatactcgtcagctgtttgttcgaagacctcaatcaaagactgtcatcgttctcgcaaataaaatagtgtatcgagtagataatggacaagaactgagtcgaccacaagatgctggaaagcgtatgtttctccacgagatgatgctgacggacaaaactgaagatgggcagacgaaacaagtatcggaacaaaagctgatcgccaagtggtcgtcgtctaacaaatactaacgtagtgtttattccaggcaagccccggtgcatgcaacccctt

SEQ ID NO: 2591 - DNA, 661 bp, Zea Mays
ttttatttgtctttgcgatatatatagaaaacactatatggactctcggagaggattgctgatctgcagaaatctatcgcacaaaagaaggctgaactgggagttgtctaaataggatggataaggtgcactttgttgttgttagtcatgtaagacagtgttgtgttcatatgcttgttgaaaacctggaagtctttcgaggtacctcatgatggaggagaagacatgcaatggtcgtcttttgtttttcagttttcactattgcacttttattgcaagatcgtgttgcagtgatcatgtctttttatttgtattttcgatatatatacaaaaacactatatggactcaaggagaggattggtgatctaccggaatctatcgcacaaaagaagacagaactggaagttgtctaaataagatggagaaggtgcactttgttgttgttagtcagaaaacactatatggactctcggagaggattgctgatctgcatgaatctatcgcacaaaataaggctgaactaggagttgtctaaataggatggagaatgtgcactttgttgttggtagtcaggaaagacagtgttatgttcatatgcttgttgaaaacctggaagtatttcgagttacctcatcatggaggagaagatatgcaatgttc

SEQ ID NO: 2592 - DNA, 1565 bp, Zea Mays
attacatctgcatatacatatagataaaaatgcttataaaaataactagataaactagattatccctcattaaagtatctagcctaacagtagctatctcatcttaaaaggttatatcctacactcatagatccatcttatcttaaaaagatactcatcttatcttgaaaagatcttacgtcgccttagtagatctaactgacctcaaaggattctaccctatccttatggattcatcttgccctagtaagcataattattccacactagtgtaacgaccatgatctaatccaaagtaattagatactatctactcatatccgatctaatctagatcctatctaatctaatacgatctaatctaatgtggtctacttaaacaaattaataatactgatagaagagattagaccctactaaccaggtattaacctaacttcgcatattagaccaactcaaccatgagcataagagctaacccaaccaatagagtcattatggattgcataatctttctatccccacctaacttcaaacaaacttttaacctatatcatgtagtctatctcacccatatctattttaacgagcccgataatatacactaactcctaatcaatgagacaagaccggagaagatgatcaacctcatcaaggaaggataagcatcaactcaagccttcaaagatcaagctaaatcatcaaatgaatcaagatccacaaatcttggatggagtctttccttaccctacactttcttacccaaacctatctatgctttaaagacatcttctatcctacataataaagtagacatacatatatacacccatgctttcctaatcaaccactattgactataaaatactctggatatttgaaacaagtatagactaaaagttgaaattacaagccaatccttttgtattcctttccttacaaatctcgaggacgagatttctgttaggggggtaggatttgtaaagccctaaaatttgtataaggtaaaaaaataataataaaatcaataaatacatggttttacataaaagcgttttgggaattatgtgttttccctttttttgtgcatactcacttaagagaaataaagcagtcaaataacaaataaataaatatagaaaaggcatatcatgctaaggttttcttgtatgttgcatttgtattcaaatgtatgagacaagtttaagtttgaaaagaagaatttgtaacacccaaaatcctattttgggatttataaaagtctctccaaaagggtttaaattaaaattccctttaatcccaggtttcttatctttaaagtcttgcattcatgctggagatttttgattggtgcacttgctttggatttgaaaccttaaacttagatttgaattcgaaatatataaactaaaataaagaaaaaaaataatcacctgttgatgcccacaccgcgtggcccagtctcaaattttccccacgcaagcccacatatatgtgcactacgtgtgttatttttcctattctttaatcccctagccgaagatgacatcatgatgacatcttgg

SEQ ID NO: 2593 - DNA, 902 bp, Zea Mays
aagataacgaagagagggaaaacaagtgtggaagagggaaaactggaaaaggcacagcaaaccgagaaaatggcggctcggcgtgggcgagagtgggacggggacgagcagggcgcggcgctgccaacgccggcgcccctcggcgcgccggtcgtctgccttctcagctccgccggagacctagccgccggcgccttcgtaggctccctcgtcggatacggaaaaggtttgatcacaaaccaaggcacgaaggcttgtcttagcattgctggatcttctgcaaagacatttgctgctcttgctggtgtccaaagtttcatcatgtgcttgctaagaagactgcgtgggaaagatgacagttgttgcacaggcattgctttgagctttccaggtgcgccccaggcaatgttccacagctgtgtcaccttcgcagcattctcatgcataatggacggtctcagcaagcagcaggcagcaatggcactcacacttgatgtgaaatctccaactgtcaagtatgaggagggccgggtcatcccaccattcactcttccgccgcttctggatgcattggatcctctaggttcattctgccagacccttatcaagcctaagcattaggagtgcgctgaggcttgttaccccaaaaaggcagtttcgatctatagtttggcactgtatgctctataaccgttctgaatttgtctccagtcatgctgttcaagtttggtaactgtagtggcgctataggacatatgcccattttttgtcaatggtacattttttatgaaacttgctgaagagattataaccataagattgttcattggtgaagatttgatagttcattgcaacaatggtgttcaactctctgagttgaagatattttttcagaaaacaaa

SEQ ID NO: 2594 - DNA, 531 bp, Zea Mays
aaataagattgggcagacaagtgcgccccaggcaatgttccacagctgtgtcaccttcgcagcattctcatgcataatggacggtctcagcaagcagcaggcagcaatggcactcacacttgatgtgaaatctccaactgtcaagtatgaggagggccgggtcatcccaccattcactcttccgccgcttctggatgcattggatcctctaggttcattctgccagacccttatcaagcctaagcattaggagtgcgctgaggcttgttaccccaaaaaggcagtttcgatctatagtttggcactgtatgctctataaccgttctgaatttgtctccagtcatgctgttcaagtttggtaactgtagtggcgctataggacatatgcccattttttgtcaatggtacattttttatgaaacttgctgaagagattataaccataagattgttcattggtgaagatttgatagttcattgcaacaatggtgttcaactctctgagttgaagatattttttcagaaaacaaa

SEQ ID NO: 2595 - DNA, 5123 bp, Zea Mays
gtcaaaccaaagcagaactatctatatctagcgtcaacacgacagttacaacttctagattttaagtgacacttcaccttgccatgaagatctagttggtaagataaccattgggtaagattattctatcaacatgtaggtatgatgctcatgtttagaattcaaatagtagcatagcaaagaaacaaatttctcaaatataacatttcagcaaggaccataaaaaaactagaatccatgaatatcaatcgatcacattaacaaatattgaggaccacaaatgatgttcacacatgtgtacctgcagaggaaatgtcaacaccatgccgaagatacaaccaatactctgtttttccatccaaggtaaaggacaccatctctctcctcaagcctgtagtagctgttgtaggtatgcaacaatgtgttgatagtgttgttcacaactgaactcagtgggtacggtctaaatccagccattgcaaatcttgacttccattttccaaacagctcgtgcctctcaaccctttcagcaccctcgcatgcgattaaattaacaatatcccttgcaacacagtgttgttctgcgctcatccgcctcctatcatcccttgggagagcaacatctatcgactcaaacatggctgtatagtagttgagagtttccatgtaccttgggaagaatggagctgtgtttgtatttgactcctgttcaacgagagtaacaaccctaggattgatgctcttgatcattcttataatcctatcccgatgattttctgtacttacactttcgtcaggaacatgatgtagctgataggcaaaattcacagcaataatctccccatgtcttatagcaagatgctgaagctcaacctcatggctagcagctggaacggcattgaactcaaaaggaagaccacatgaattagcaacatcacacaacgtcctcccaactatatcaagcccgcctcctctggcataagcagaatttgagtcatctataccagtgattctaatgtatggtggccccccaggtcttgcagcaagggcctgtagcagagtaacccactggctcccctgagcaatttggaaatcaattatgtgaacaaagttctcgcccttaatagcctcggcaatggcaccatttgctgacatgtaaccaaacttgtagaatgggcagatctcgtaaaggagatgcatatatgacatgagctcagagcttgtaggttctttacatttcaaagatttatatagcatactgccggaggaagaaagtctagcaacaattccttcaagcatataggctccaagtcgttgcattggatctccagatacagataccaggtgaccaagctcagatattaacagttctgttgcaaagacatcattctctgcaacagccttaccacatgctatgactacttgcatcaagtctcctccattaattcccagaagttgtctccagttgtctggtctcactggaacatgggcttgcaacaagctccgagagcagtcagaactaatgtccagtccaggtccaacaatggaattctctaattctttttgtttaatcaggagatctgcaacctcagttagacaggaagcacttggaggagaactatatgtgtggtctgagtggctgtcatgctgagacagggggctcccacttaaaggggagatgctatgagaagatgtggagctttgtgcaggataaacaccatttgctgaggatgattccagagtgcagtactgtgcttcaaatacttgagggttggaattgttgatcctttgtgatccaatatcggaggatgagtaatgatgtcctagactgttttctgccatatggatcctaccattttctcctacaggtgctgagttattgtagtacggcatttgagaatcatccgaacatttatatgaatgattagaatccctagctgacattctgccctttgcaatcttgtaggacaaaactcagcaggaagctaatcctgccatcttcatcaggattgtatttagtgtgctcatgtcatccactgaaaatgtaaaagattatatattcaagtaagataggatataagcatatcaaaattatttttcaatacctgaagatgaaaattagctgtcaatgtactccaactcatataaacttttcatggacatatagttgttgagctatattgtattgtcaaaaacataaaccaaaattcaactattgtcacttctagaaccaaagtgtcaatccagaaagttgcctatccaaaatgagctatgtaaaacgatgtatttacacatagttacatttaaaagtaggctgacaccaacaagaagggatagtgcactatagattatctagaagcttaataataagcttaaaagttgaaataaagacaggcccgtaaccataacgaatgattgaccatcactacatagacataactcataatatccagtaaatcattccttgcattgagatataataaagaccctgtttcgtaggccatttcaaacagctccatctctggctcatggtgaagctgtaccaaacaccgaagaaagaaacagctttgatggaggagccacagcttatttactagtggccagccagagttgcaaaacatgggtttgcattcccattcattaatgaaataccatactttttatttcatattgtcaagtttgctgatttattttctcaatattttcaccaagacttcaaaccccatcttagagccacaggccatggattggagttgggtggatctctgctaaaggatgctgcaggtaggctcgtgggttggtggctacacctgctgaggagtgctagcaatggtctagctcaccttgaaatctcatgtgacagcagcgctttgcattcgcgtttggcagcggcgatggcagattctgaagaatagcagtctgctacaacaacagcagaacatgatcgtgttggcgagcaaggatagtgaaaagtctgcttagatggctgcctgcactccggccgtgtcatatgctcttgccagtgcaggtaagagtgaaaatggtatggacatttcctgaccaaccatccaacctaagggttcaagatactaaatatatagtccatatctggatctggacattcaacatatgtacaatatctgtatctagatactcaaagtcgagtatatataatgttgatatccattgatatcttatctgacataccaacactatttgcaccaaaatacgaatccaagaaaaaataactatttgtatccatttcagtaggtatccaatctgtttatgcgcaggcctgccccagtacatggttctatcccgcacatggctgggaagctgcacacagcccattgccttgcccacacccacctcacagcagctgccctagatgcagtgcgcctgctgccaaggccgacagccttgatctggtctgatcctcgcagcagatggcctagaactacttgcattcgtggcgccgacactcacggctcctgccatgtggccaccgccgccgccgctagggcagatatgggattgggtgagaagagtgtgtaagatgatgaagtgtactttggtccttatgtgtttttattttacgtataattcagtctttcaaagtaagggcaaacggcacattcaatttcaaaacatgagggcaaaatcaccaagttgtaaaacaaggtaaaatcaccattagcctctatagtaagggcaacaacactaatctcagtagatatttaagtataaaatcgaagaactatacacttatagggtgtttggtttgaggctccattcaaaatgagatggtgcatcatgggtctattcctcaaatttggtgggatggcttcatttctcatattagtactaactaattaactataaagaatgagatgatgatggatcaactcatttcattccacaaaccaaacaaaaaaactataatgaatgaggtggtgatggatcaactcatttcattgcacaaaccaaacaaaaaaattgagaagtgagaaaatgatggactagctcatttctcaaaccaaacagcctattaatgtttgcaagtctcgaacacaaaagaatgattttattcactttgtataagaatatataaacaatcaaatgtgtatctgctaaaccctcaattagaaaagggtgacaaatgaatttcatgtctaggctattgagctaacgtatctgtaaccaagttcgttgttctagcgaacttgactatgaaatgaatcaacaaaaaatattgacctaaggatttcaagtaaccactttttaccaagaaaaaaacatgtctgcaattctgcatcgaactgtttcaccatggaaatatacataaatgctaagagcctaagagttaaaacaatataatcttagaaacccatcattcatgcaagataatcatttaagttgtattctcccctccaatgcacatttgattattgtgaaaatatactcgatgtgccaggacttgtgaggtatggaagttaactcaagaaatcttcattgtgcttccagacatgaacaacaattgatcaaagtgattaaacatgaaggggttcaattgctttcagacgtcaatttctgttagtttgtcttgtcttaatatatgtacaactcctctctaaactttcttactgattatgtaagctgttaaatcctcatacaagtgttgtgagaggcattcattgaggattaagttgtcaactgtgggctggacattgtttactcatctatacatataactgaaaaatggacaacgtgtcagcaatgaagtcttgtttccaaaataaatgatgcattttcgttctgaactgttcgcaagcccaacaacaaacataatacccagggttccaaaaagtggcactaagcgcacgcttcagcgcgcggaagcgctaagaggacgggtaacgtttcgctttggggcataagcgctcctaaagcggcgagactgccttggtggagcagcggctgctggctcccgctgctctcaggccgcttgcggcgcagccgccggggctgggcgccgttgacgatccaccggaggcgggaagagagagaggggcacgcacgcagggtcaccggccggcgttcggaggaccggaggcgagagcgcg

SEQ ID NO: 2596 - DNA, 2194 bp, Zea Mays
gttgaagaatcagatagctgtctcaaatagctgaaatgtgtaaaaaaatgcggatacagatctggattataactacacaaattaaggagtatcctcgcaaaagaaaaaaaagaaatgaggagaagagacaaccgatcggattccgaatttccgatccgagagaatcggccaggccactcgcaccgcgaccactcgtcattagtcgcgctcctcccgcggcgaaccccacgtggaggccgcgcgcagctatataatggactatccttggatccccgcatatcgttgagcgagttccgagggtgaggcggcgattgctgcgttccgtccgttcgtttttgtgtggggcagaagccaactaagaccgcgaggagatcggaggatgttcgcggagagcttccgggtggagagcccgcgggtgcggtacggcgacggcgagattcagtcggagtaccgctacgacactaccgaggtcgtcccgccggggaatagcggcgcagggtgggtggtgcgcccaaagtccgtcacctacaacttcaagaccagcaccaacgtcccaaagctcggggtgatgctcgtaggatggggcggcaacaacgggacaacgctcacggccggggtgatcgccaacagggaaggaatttcgtgggagacaaaggagaaggttcacagggcgaactacttcggctccctgacccaggcttcaaccatcaggatcggcagccacaacggggaggagatctacgcgcctttcaagagcctcgtgcctatggttaaccccaacactatcgtctttggtgggtgggacatcagtaacctgaacatggccgacgccatggccagggcccaggtcctagacattcaccttcagaagcagctcaggccctacatggaatccatgcagccactcgccggcattttcaacccagacttcgtcgccgcaaaccaaggtgcccgtgctaacaatatcattaagggaaccaagaaagagcaggtggagcagatcaggaaggacatcagggagttcaaggaaaagaccaaggtcgacaaggtagtcgtgctatggacagcaaacaccgagaggtatagcaacgtggttgcagggcttaacgacaccatggacaacctcttggcatcgctggacaagaatgaagcagagatctcaccatccaccttgtacgcaatagcctgtgtctttgagggtgttccattcgtcaatggcagccctcagaacaccttcgtgcctgggctgatggagcttgccataaaaaagaattcggtgataggaggcgacgactttaagagtgggcagaccaagatgaagtctgtgttggtcgatttcctcgtcggtgctggaattaaggaaacaatgatggcatgaatctctctgcgccacaagtcttccggtctaaagagatctccaagagcagcgtggtggacgacatggtcgctagcaatccgatcctctacaagcccgatgaacatcctgatcacgtaatcgtgatcaagtacatcccctatgtgggtgacagcaagagagccatggacgaatatacctccgagatcttcatgggcggcaagaacaccatcgtgctgcacaacacctgtgaggactcgcttctcgcctcgccgatcatccttgacttggtgctcctagctgagctcagcactcggattcagctcaaggctgaagggcaggataagttccactccttccatcctgtcgccactattttgagctatcttagcaaggctcctcttgtaccccctggcacacccgtggtgaatgctctagccaagcagagggccatgctggaaaatatcttgcgggcctgcatcggccttgcccctgagaacaacatgatgcttgagcacaagtgaaagagtttcatatccctaatgaccacagaataggatgaatggaatggtgggatcgagcgagcccaatgaagaaataacaggaggccagaaaaagtgtacggagagaagatcaagtatggatgatgccacatagacccttttttaacgttatcattttttttagatttgactcgttttggggtgattagattgtgtactggctatccattgtatgcagcatgaaacctttatttatttgttgtgtgatagaggttatagaagtatctaacctaatttcttaaactcttagttgattaatatttttaattgatcgctg

SEQ ID NO: 2597 - DNA, 1973 bp, Zea Mays
ccaccggaaggcttccctctttgatttcgcattttggtgctccccggcagctgcgagcgccgccgccatttactccctgcctcggggcggactcatttctctgagggctccttccttccttgttggcgatgaggaggcacgggtggcagctaccctaccatcctctccaggtggtggcgatagcggtcttcctggcgctcggattcgctttctacgtcttctttgttccctttgttggtggagataggctgcagtatttgctcatgggcctctataccccactggtgaacagctgacatcattatcacctgcgttatcctattatatatatggtgtgctggaacagatcctggtgatccaggcattttcttaaattcaaaaaggccacctgaaaagcaaggaagttcaactcacgaatatccagaaggagtgtcattcagcaattgttgcagggttgttcataacaatggttccactcagatgatcaatcttcagaacagaacacaagtgaagaaggcatgtttttctgcagcttgtgtaaagcagaggtcttgcagcacagtaagcattgtagggtttgtaacaagtgtgtcgatggctttgaccaccactgtaggtggctcaacaattgcataggaaaaagaaactacaaaggattcttcatcctattggcttcagcagttctcttgcttataatgaagtggttagtgggtgctcttgtgttgattcttttctttatgaagcggggagaattctctgggcagataacctcaaaacttggaagcagcttctcagttgtggcttttgtaattgtcgtggtgacatgtacattgctagcgatggttgcaacaataccactctcacaacttctatgcttccacattcttcttatcaagaaaggaattagtacatacgattatattgtagctttgagagagcaagagcaacaagaacattcggagcaccagagcccacagatatccatcattagctctatcacaggacttagtaccagtagctcttttggtccacttcatcgtggatcatggtgtactccaccaagactattagttgaagatcaggatgtttttcatccggatatgccacagaattccactggcaagaaggccaggaaagacgaaggaagcaaaaggaaaccaccaggagctgtaaaaatcagcacatggtcactggctcgccttaacgcagaggacgtcacgaaggcagctgttgaggccaagaagagatctaaagtcctccagccgatcacaaggcgggggaatattcttaaacctgacaagagaacagacaaaagcagggtgttcctacctgtacctgaacaatctccggatcccatggcaaggacatccgcaagtggaaccgacggtaatttgagcgacatgatgatggaaacacccgctagcttagccccattgcagcacgaggccaggagtgactaccaacccagtgctgtgacgtctatcatgaacctcaaccttacttcatcaccggagagtagcttggagtcacctgatctccaccccttccgtatctccatgtcaggagcagatgaactccgaagcttcatgtcacttgcagcctcagagtcaactgctcagaagactattgcactttcgaggtcgacaagcggtgggtatgaagcctcgggaggcgacgacagcgaccaaataccctctagaattgtgcacaggtcgtccaattggacaaatgtcattctcaattcaggtaggcaggcaactatgtccgatctgaacttgcctaggctacacctgtagggttcataactaacaccaggctgacatagctcaaaattgtgagttgctgacttcttaattagctatgtgttgttagcctgtgagcatgcattggtcagaaccagtgttgggaacctggtttttgggtttaagagtcgggttatgttttgcgatcaataaatacatgtgcctttccaa

SEQ ID NO: 2598 - DNA, 1945 bp, Zea Mays
ccaccggaaggcttccctctttgatttcgcattttggtgctccccggcagctgcgagcgccgccgccatttactccctgcctcggggcggactcatttctctgagggctccttccttccttgttggcgatgaggaggcacgggtggcagctaccctaccatcctctccaggtggtggcgatagcggtcttcctggcgctcggattcgctttctacgtcttctttgttccctttgttggtggagataggctgcagtatttgctcatgggcctctataccccactgatcacctgcgttatcctattatatatatggtgtgctggaacagatcctggtgatccaggcattttcttaaattcaaaaaggccacctgaaaagcaaggaagttcaactcacgaatatccagaaggagtgtcattcagcaattgttgcagggttgttcataacaatggttccactcagatgatcaatcttcagaacagaacacaagtgaagaaggcatgtttttctgcagcttgtgtaaagcagagcacagtaagcattgtagggtttgtaacaagtgtgtcgatggctttgaccaccactgtaggtggctcaacaattgcataggaaaaagaaactacaaaggattcttcatcctattggcttcagcagttctcttgcttataatgaagtggttagtgggtgctcttgtgttgattcttttctttatgaagcggggagaattctctgggcagataacctcaaaacttggaagcagcttctcagttgtggcttttgtaattgtcgtggtgacatgtacattgctagcgatggttgcaacaataccactctcacaacttctatgcttccacattcttcttatcaagaaaggaattagtacatacgattatattgtagctttgagagagcaagagcaacaagaacattcggagcaccagagcccacagatatccatcattagctctatcacaggacttagtaccagtagctcttttggtccacttcatcgtggatcatggtgtactccaccaagactattagttgaagatcaggatgtttttcatccggatatgccacagaattccactggcaagaaggccaggaaagacgaaggaagcaaaaggaaaccaccaggagctgtaaaaatcagcacatggtcactggctcgccttaacgcagaggacgtcacgaaggcagctgttgaggccaagaagagatctaaagtcctccagccgatcacaaggcgggggaatattcttaaacctgacaagagaacagacaaaagcagggtgttcctacctgtacctgaacaatctccggatcccatggcaaggacatccgcaagtggaaccgacggtaatttgagcgacatgatgatggaaacacccgctagcttagccccattgcagcacgaggccaggagtgactaccaacccagtgctgtgacgtctatcatgaacctcaaccttacttcatcaccggagagtagcttggagtcacctgatctccaccccttccgtatctccatgtcaggagcagatgaactccgaagcttcatgtcacttgcagcctcagagtcaactgctcagaagactattgcactttcgaggtcgacaagcggtgggtatgaagcctcgggaggcgacgacagcgaccaaataccctctagaattgtgcacaggtcgtccaattggacaaatgtcattctcaattcaggtaggcaggcaactatgtccgatctgaacttgcctaggctacacctgtagggttcataactaacaccaggctgacatagctcaaaattgtgagttgctgacttcttaattagctatgtgttgttagcctgtgagcatgcattggtcagaaccagtgttgggaacctggtttttgggtttaagagtcgggttatgttttgcgatcaataaatacatgtgcctttccaa

SEQ ID NO: 2599 - DNA, 1934 bp, Zea Mays
ccaccggaaggcttccctctttgatttcgcattttggtgctccccggcagctgcgagcgccgccgccatttactccctgcctcggggcggactcatttctctgagggctccttccttccttgttggcgatgaggaggcacgggtggcagctaccctaccatcctctccaggtggtggcgatagcggtcttcctggcgctcggattcgctttctacgtcttctttgttccctttgttggtggagataggctgcagtatttgctcatgggcctctataccccactgatcctggtgatccaggcattttcttaaattcaaaaaggccacctgaaaagcaaggaagttcaactcacgaatatccagaaggagtgtcattcagcaattgttgcaggggttctttgcttgatatacttcccgttttcttgcttatgcaaaagatggttccactcagatgatcaatcttcagaacagaacacaagtgaagaaggcatgtttttctgcagcttgtgtaaagcagagcacagtaagcattgtagggtttgtaacaagtgtgtcgatggctttgaccaccactgtaggtggctcaacaattgcataggaaaaagaaactacaaaggattcttcatcctattggcttcagcagttctcttgcttataatgaagtggttagtgggtgctcttgtgttgattcttttctttatgaagcggggagaattctctgggcagataacctcaaaacttggaagcagcttctcagttgtggcttttgtaattgtcgtggtgacatgtacattgctagcgatggttgcaacaataccactctcacaacttctatgcttccacattcttcttatcaagaaaggaattagtacatacgattatattgtagctttgagagagcaagagcaacaagaacattcggagcaccagagcccacagatatccatcattagctctatcacaggacttagtaccagtagctcttttggtccacttcatcgtggatcatggtgtactccaccaagactattagttgaagatcaggatgtttttcatccggatatgccacagaattccactggcaagaaggccaggaaagacgaaggaagcaaaaggaaaccaccaggagctgtaaaaatcagcacatggtcactggctcgccttaacgcagaggacgtcacgaaggcagctgttgaggccaagaagagatctaaagtcctccagccgatcacaaggcgggggaatattcttaaacctgacaagagaacagacaaaagcagggtgttcctacctgtacctgaacaatctccggatcccatggcaaggacatccgcaagtggaaccgacggtaatttgagcgacatgatgatggaaacacccgctagcttagccccattgcagcacgaggccaggagtgactaccaacccagtgctgtgacgtctatcatgaacctcaaccttacttcatcaccggagagtagcttggagtcacctgatctccaccccttccgtatctccatgtcaggagcagatgaactccgaagcttcatgtcacttgcagcctcagagtcaactgctcagaagactattgcactttcgaggtcgacaagcggtgggtatgaagcctcgggaggcgacgacagcgaccaaataccctctagaattgtgcacaggtcgtccaattggacaaatgtcattctcaattcaggtaggcaggcaactatgtccgatctgaacttgcctaggctacacctgtagggttcataactaacaccaggctgacatagctcaaaattgtgagttgctgacttcttaattagctatgtgttgttagcctgtgagcatgcattggtcagaaccagtgttgggaacctggtttttgggtttaagagtcgggttatgttttgcgatcaataaatacatgtgcctttccaa

SEQ ID NO: 2600 - DNA, 1931 bp, Zea Mays
ccaccggaaggcttccctctttgatttcgcattttggtgctccccggcagctgcgagcgccgccgccatttactccctgcctcggggcggactcatttctctgagggctccttccttccttgttggcgatgaggaggcacgggtggcagctaccctaccatcctctccaggtggtggcgatagcggtcttcctggcgctcggattcgctttctacgtcttctttgttccctttgttggtggagataggctgcagtatttgctcatgggcctctataccccactgatcacctgcgttatcctattatatatatggtgtgctggaacagatcctggtgatccaggcattttcttaaattcaaaaaggccacctgaaaagcaaggaagttcaactcacgaatatccagaaggagtgtcattcagcaattgttgcagggttgttcataacagtgagaatataagcaataattttgaagtaaaggattcatcttcatacctgacatttaccagggttctttgcttgatatacttcccgttttcttgcttatgcaaaagatggttccactcagatgatcaatcttcagaacagaacacaagtgaagaaggcatgtttttctgcagcttgtgtaaagcagaggtcttgcagcacagtaagcattgtagggtttgtaacaagtgtgtcgatggctttgaccaccactgtaggtggctcaacaattgcataggaaaaagaaactacaaaggattcttcatcctattggcttcagcagttctcttggtgacatgtacattgctagcgatggttgcaacaataccactctcacaacttctatgcttccacattcttcttatcaagaaaggaattagtacatacgattatattgtagctttgagagagcaagagcaacaagaacattcggagcaccagagcccacagatatccatcattagctctatcacaggacttagtaccagtagctcttttggtccacttcatcgtggatcatggtgtactccaccaagactattagttgaagatcaggatgtttttcatccggatatgccacagaattccactggcaagaaggccaggaaagacgaaggaagcaaaaggaaaccaccaggagctgtaaaaatcagcacatggtcactggctcgccttaacgcagaggacgtcacgaaggcagctgttgaggccaagaagagatctaaagtcctccagccgatcacaaggcgggggaatattcttaaacctgacaagagaacagacaaaagcagggtgttcctacctgtacctgaacaatctccggatcccatggcaaggacatccgcaagtggaaccgacggtaatttgagcgacatgatgatggaaacacccgctagcttagccccattgcagcacgaggccaggagtgactaccaacccagtgctgtgacgtctatcatgaacctcaaccttacttcatcaccggagagtagcttggagtcacctgatctccaccccttccgtatctccatgtcaggagcagatgaactccgaagcttcatgtcacttgcagcctcagagtcaactgctcagaagactattgcactttcgaggtcgacaagcggtgggtatgaagcctcgggaggcgacgacagcgaccaaataccctctagaattgtgcacaggtcgtccaattggacaaatgtcattctcaattcaggtaggcaggcaactatgtccgatctgaacttgcctaggctacacctgtagggttcataactaacaccaggctgacatagctcaaaattgtgagttgctgacttcttaattagctatgtgttgttagcctgtgagcatgcattggtcagaaccagtgttgggaacctggtttttgggtttaagagtcgggttatgttttgcgatcaataaatacatgtgcctttccaa

SEQ ID NO: 2601 - DNA, 1781 bp, Zea Mays
ccaccggaaggcttccctctttgatttcgcattttggtgctccccggcagctgcgagcgccgccgccatttactccctgcctcggggcggactcatttctctgagggctccttccttccttgttggcgatgaggaggcacgggtggcagctaccctaccatcctctccaggtggtggcgatagcggtcttcctggcgctcggattcgctttctacgtcttctttgttccctttgttggtggagataggctgcagtatttgctcatgggcctctataccccactgatcacctgcgttatcctattatatatatggtgtgctggaacagatcctggtgatccaggcattttcttaaattcaaaaaggccacctgaaaagcaaggaagttcaactcacgaatatccagaaggagtgtcattcagcaattgttgcagggttgttcataacaatggttccactcagatgatcaatcttcagaacagaacacaagtgaagaaggcatgtttttctgcagcttgtgtaaagcagaggtcttgcagcacagtaagcattgtagggtttgtaacaagtgtgtcgatggctttgaccaccactgtaggtggctcaacaattgcataggaaaaagaaactacaaaggattcttcatcctattggcttcagcagttctcttgcttataatgaagtggttagtgggtgctcttgtgttgattcttttctttatgaagcggggagaattctctgggcagataacctcaaaacttggaagcagcttctcagttgtggcttttgtaattgtcgtggtgacatgtacattgctagcgatggttgcaacaataccactctcacaacttctatgcttccacattcttcttatcaagaaaggaattagtacatacgattatattgtagctttgagagagcaagagcaacaagaacattcggagcaccagagcccacagatatccatcattagctctatcacaggacttagtaccagtagctcttttggtccacttcatcgtggatcatggtgtactccaccaagactattagttgaagatcaggatgtttttcatccggatatgccacagaattccactggcaagaaggccaggaaagacgaaggaagcaaaaggaaaccaccaggagctgtaaaaatcagcacatggtcactggctcgccttaacgcagaggacgtcacgaaggcagctgttgaggccaagaagagatctaaagtcctccagccgatcacaaggcgggggaatattcttaaacctgacaagagaacagacaaaagcagggtgttcctacctgtacctgaacaatctccggatcccatggcaaggacatccgcaagtggaaccgacggtaatttgagcgacatgatgatggaaacacccgctagcttagccccattgcagcacgaggccaggagtgactaccaacccagtgctgtgacgtctatcatgaacctcaaccttacttcatcaccggagagtagcttggagtcacctgatctccaccccttccgtatctccatgtcaggagcagatgaactccgaagcttcatgtcacttgcagcctcagagtcaactgctcagaagactattgcactttcgaggtcgacaagcggtgggtatgaagcctcgggaggcgacgacagcgaccaaataccctctagaattgtgcacaggtcgtccaattggacaaatgtcattctcaattcagtatatttggaccacttattagggggggtggatgggtctctcctcgattcactcg

SEQ ID NO: 2602 - DNA, 851 bp, Zea Mays
accacgcggactcggggcgaccattattcctcttcacgcttcacacgcaccgcccgcaggccgtcatcccacgcattcgcatccttccccgctctcgctctctcagccgcagagccactcgtgtcggtgacggcggcgaaggcaatgtcatccctccgcccgtccctcctgctcgtggtgtcgctgctcgcggcggctctgcttgcagcggcgccgtcctccgcgtctcgcgacctccgcccgctccaggcgagcttcgtcgtgcgcggccgcgtctggtgcgacaactgccgcgcgggcttcgagacccccgcatccacctacattgccggagctaaggtgagagtcgactgcaaatcgaagaccaccggggcaaatacatgcagcttcgaggggcatactgaccgcaccggcacctacaacatccttgtcattgatgagcatgagcatgagctctgcgagtccgtccttgtgagcagcccggacaaggggtgtgccaatgttgtggctggtcgtgagagggcccccgtcttccttaccagcaacaacggtgttgcatccaacgttcgtttggcaaatgctctggggttccagaaggacgttgcccttcctagatgcgcgcagatcctcaagatgtaccaggatgaggatgaccgtgtctaattacgcctgagtttagatgtacttggcgagttacaatatatttatgtggtgtctgaaatgttctagaacctctaaatctattactaagagcaacgatattgtcgcttcttaaaccttagtactacggatgttatgagctaataaatatatttcgctaatgtgatgcagttaaaaaataaaaaaataaa

SEQ ID NO: 2603 - DNA, 385 bp, Zea Mays
accacgcggactcggggcgaccattattcctcttcacgcttcacacgcaccgcccgcaggccgtcatcccacgcattcgcatccttccccgctctcgctctctcagccgcagagccactcgtgtcggtgacggcggcgaaggcaatgtcatccctccgcccgtccctcctgctcgtggtgtcgctgctcgcggcggctctgcttgcagcggcgccgtcctccgcgtctcgcgacctccgcccgctccaggcgagcttcgtcgtgcgcggccgcgtctggtgcgacaactgccgcgcgggcttcgagacccccgcatccacctacattgccgacaacagtccgtttgcgaagtccgaaggagttgcaggaaaagaccatgtgcaac

SEQ ID NO: 2604 - DNA, 735 bp, Zea Mays
cctcgtccatgacaacattgcacgtgagctaaggtgagagtcgactgcaaatcgaagaccaccggggcaaatacatgcagcttcgaggggcatactgaccgcaccggcacctacaacatccttgtcattgatgagcatgagcatgagctctgcgagtccgtccttgtgagcagcccggacaaggggtgtgccaatgttgtggctggtcgtgagagggcccccgtcttccttaccagcaacaacggtgttgcatccaacgttcgtttggcaaatgctctggggttccagaaggacgttgcccttcctagatgcgcgcagatcctcaagatgtaccaggatgaggatgaccgtgtctaattacgcctgagtttagatgtacttggcgagttacaatatatttatgtggtgtctgaaatgttctagaacctctaaatctattactaagagcaacgatattgtcgcttcttaaaccttagtactacggatgttatgagctaataaatatatttcgctaatgtgatgcagttaaaaaatagtctggtattgctggggttatgactgtctagttttgatgatccttgagaaagcatgatactattgcaggtgcttttagctatacaattgtttttcatttgtaatatgataaatacaacatatagttgaatcagtacaagttatattataggatgtataattcatacaaaagacagtcaaaattgcaacagaaaaaataaa

SEQ ID NO: 2605 - DNA, 2948 bp, Zea Mays
cgaccccgacgcaccacacgatgcggacgccgacagcttcttcatcaacaccggcgaagggcccgtagagccagtttttggcgatacggccgtaggcgcgcttggtgacgtgggcgctgtcccagatctagtggaggaggaggaggtacctgtcgacacgcccgccaagtgtttgatgagagtcctcaaccgcagcgactactacgtttccaaccgtggcgactactacggtccatacacttcctccaccgtcgacgcggcggcggtgctgctcgccgacgcggccgaggctcgactcgactggcgcttcgccaagctgccgcagccgcaagctgaggaggtggacgagccgttccgcgacgtggcgaaccctccgtcgcatccttccatcgtctacgagtcgtaccgcgacgcggccgaggctcgactcgactggcgcttcgccaagctgctgcagccgcaagctgaggaggtggacgagccgttccgcgacgtggcgaaccctccgtcgcatccttccatcgtctacgaatcgtaccgcgacgaggccatggcgggagccggtgctagagcgcttgctggccgttgcaacgagcggcccgcaaggggacgcaattcctcctccgacgacagatccgagcaatcctacctcacgcccacctgtgaggccaccaacagggcccctgcacccgacaataggttgatggcgtccgtcgaccaccgccgacgccaaactctggacgaagaaggaggtgtcgagcaggaatcgggcggtgccattgccgacaaggtggaggctgtggcgacgcacgaacttcctagagatgagaccggagcagaggtcgcaacccagcagccatggcgcctatgtcgatccacttcgtccctggtgatgatgggttcagatggagcatgcatggggtttgcagctactcaccgtggcgagcttgtcgctggcggacacgctggaggagcactctgctccggagttgtcgcagtttccgttggacacgtgcgagttcacgttcaaccgtgcgtccgttccgcggatggagctgctcaccctgggcatcctcgaggggtgggtggtcgccgacatccctttcccctacatctgctacttcgtggcgcagttctggcaggacgagcgccaggcgatctgcgagcgcgccgtgcagcaccaactacctcaagcattgaggaggatgtacccttcgacacgctcaccaagtgttcgatgagggtcctcaaccgcggcaccaactacggccacaacacggccgcttcactgaagaccagtggaaagagggccgaattcatcgtctccatcgtcaagggccgcggcggctcgctgttccgcgagaagatgatcgtgggcgttggcgctcacttcatcgtcatcgtcgacgcgtccaagctcgtgtcgcgcctcggctgcatgggcgccaaccccatcgaggtcatccccttcgacgcgctccacgcgctgggactcatctgcggcctcttcgacggcttgcctggatcccacaccaggcggaggtctgttcccgccgccgccgccaacgggaaagaagactcgaaacagtacatcatcaccgacaacgacaactacatcgtcgaggacggcatccgcggcgacctgcgcggcatcagtgatcgtctgcttcagatcaccggcgtcatagaacacgacatgttcctgggctacttttcccacgctgaagaaggtggagatgcgaggacgaaggtgcagctgacagaggccgcggagcgttgcttcgacgagctggtcggaagaggcctgctccgtctcacggtcggaagcaatggagccgcgggagccaggatgcccatcatgatctgctccttcgcgaaggacgtgtatgaccatgagaacttctgcactgagtcagcagcgaataatctttccgaagtgcgacggttgtccatcgttgagaacgaggctgacgatcgcattggtgaggggatgacaatggcagcatggacgacgagcatggaaacagtggttaagctagaacaggccggcgagcgcctgtgggtcaagatgggcggccacaaggtgctcaacgtcgacaagtacgacaacatcttcgccaagccaggcggctcattccgcggccccgatgtgcacgtcgagacggccaggagaaatactgtcacctatagcattttggagcagagagacgcacagaaggttcagctcttcaaatccattaatagtggtgctgtttttggctttcccgagaatcttgaggaagctgcaagagctagtctcatgagtggaattaagcaaccatggcctccacctatggagttgagcgattggatttgtgcagggcctccggcaacttgacgataagggtcagcggcttgggggcaagccgcattttaagcgttggggaatgtcagtacactgtcatgtgggcccttgaaaggaggcaagtgggggtattctgtgctataaaatggagaagctgcacaggcgatggatatcaaggaatcaacagagaacctctttactgttcatcttcctctgttctctagtctgttcatcttcctccattctctagtctgttcatcttccccagctttatctctcttgtacccagattctcttccattctagtaccttgctgttattagttgagttcaagaggctagtgctgttaacatgcagacgcagagaagagcaagaggatggctcctagagccgaagggagtccatggcgtcgaaagtcattcaaaccccagctagctaggcgagcggcgtggttctggccgaggcgatggtggtagtagatgatgagcacggccacagcctttgatcggttcagaaagccacgacgggtcaaattcctaacttctggactgcacgccacacatgcaaccgttaagtcatctggtcatgctccactgctccagca

SEQ ID NO: 2606 - DNA, 2871 bp, Zea Mays
cccgtcttctccacgatgggccacgccacaccactgagcacccttcctccctgttcttgcctctgtcctatactactactactacccatctttagccgccgcgtgcatgcaagaagagaaatagccgccgatcgatcagcgctcgaccgacccgtcatccttgacgaacgaccagctaggaaacaggaggcaccttctttgcacgtgtcagtgccagccagacgaacccaaggtgaggcctcgctgttcagaaccctttaatgcccccctcctttgtttggcgtgcctctgcttcgtcttcgtggtatataaatgctttcccctcttctgtgatcgcctttgtgcctgcgccattggggcctgtttggagaggggggttgccgtccaaatcgaaccaggctctgaacatccgtaaagcaacccccctctccattccaaacaggccctcctgcctccgttcctggtaaatccttgaattctcgtgctcatccgggccttcttgtttgctgtgtgtgtatgtagacgttagcgcttcttcttacatggttctgaattctcatgtcgaatcgttgtttgctagtctgtatttttttttctgtgtggttgtgaatcggacgagaatggggaaaaaacgaaggtggtcaattttgtttccatcgcgaatctgatgatctttttccccacccacacggcttgttgttgtttgcgtcagtaatggaataactttggctctgtcattgcatatcattttcagccgtctggcagttgaaggggagtcccggtctgctcattctttcgcagtctgatgatatatatgtatattcttttgcgtttgaaggactcctgtgtgttgttaaattaaactggtttccgcgtccgttaggacttaggagacctcatcgcgtaacagccttccaaaaaaataaagagagcccccttctcaaccagctgctgattaattggtgcagggctagctgtcaggacggctcagctccagctttgcggccctccagctctccccagttcaagttcaatattggcgagcatgcgagtttgccctcttccgtcgtcgtcatcatcatcgtcctcgcgatcccggcgtccctgtttcggcctacgcctcccgtagacaacagttgcgccctgctctccggcaagctatggccaagctgagctgcttccccgctctgctccccggcaagaggaagaagaagacacgcaagatcaccgatgctatcaaggccagcggcaacgagtgccccaaggtgaagccggtcgaagtcgaactcatcgacccgacgcttggtgcaggcgtcgtccaggacgtcgtccccgccgagctctcggtccccgtggaggaccgcaacaataaggaagcggctgatcaactggtgttggtgaaggagagcgatctgtcagatttcgacttcagcttccacgcggccatgaagcccgtccggtccgacagtgacgtggcactggacacctcggccgacgctgcggtggcggacacatcgccgaagctgaagcggtcttgctccaacatcgagactaagcgaccaggctcgcgttccgcgcccgagatgccggcccggtcgcgctcctacggcgatctgggcaacctggtcgccggcctcgccctggacgcgacggcgaccccgcacggcgcgccggaggccagtccggcgtccgtgaagacgtcgcgcactgccgaccgcgtgatgctgaagaagcggtcgtccagccaggtgctgccctcgcgcagccggaagctctggtggcggctcttcctctggagccaccgcaacctgcacatgccgcggtcggcgcgcacggcccaccgatcgttctcgcctggccgccacgacgggtacacctcggacacgttcgaggagggcccggccgccgaccgcaagaacaagacggtcatggtcgacgagtcgccgccagcagcgtctgtgcccaaccagtgggtcgccttctgcgccgagagctccatccacgaccgcgtcagcgcgtgggtcagcagcatcgaaagcgagcctccgttcgatatcgccgaggaggatgacgacaactacgacggagaggacgatgaggagaatggcgagtgtgcggcgtcgcagccgcgccatctcgagctcggggagccatcgtccgggaagggcggaaacagcaaatccaagcgctgcgcaacgacggccgacgaggtcgtccaggccaacaccgtggtgcagtccctgaacgccttctcgtcggtggcgcacatctcagggatgggcctcaaggtggtgccgatgatcgcgcccttctcaaccctccgggccgtcaacctctccagcaacctcatcgttcatatctcccctggatcgctgcccaagggcctccactctcttgatctgtccaggaacaagattgccagcgtcgagggcctccgggagctcacaaagctacgcgtgctcaacctcagctacaacaggatttcgcggattgggcatggtctgtcgaactgcacggccatccgggagctgtacctggcgggcaacaagatcagcgacgtggagggtctgcaccggctgctgaagctggcgaagaaccaactgcgtgattcgcgttgctctttggagacgggagacggtggcgtgactgcgtgcaggcagactcagacgacaccatgattcggcacggcgccagcatgatatgagacaaaccaagtatataaagcaagtatgatgtgagagaattgcgatgcaacacataatgtacatacttgttagggagatattgcttagattaatactacgaccgatgcatctttgtacctgaaaatatcaatttgagcctggttgaagatgaacatccatccaacat

SEQ ID NO: 2607 - DNA, 2518 bp, Zea Mays
ccgtcttctccacgatgggccacgccacaccactgagcacccttcctccctgttcttgcctctgtcctatactactactactacccatctttagccgccgcgtgcatgcaagaagagaaatagccgccgatcgatcagcgctcgaccgacccgtcatccttgacgaacgaccagctaggaaacaggaggcaccttctttgcacgtgtcagtgccagccagacgaacccaaggtgaggcctcgctgttcagaaccctttaatgcccccctcctttgtttggcgtgcctctgcttcgtcttcgtggtatataaatgctttcccctcttctgtgatcgcctttgtgcctgcgccattggggcctgtttggagaggggggttgccgtccaaatcgaaccaggctctgaacatccgtaaagcaacccccctctccattccaaacaggccctcctgcctccgttcctggtaaatccttgaattctcgtgctcatccgggccttcttgtttgctgtgtgtgtatgtagacgttagcgcttcttcttacatggttctgaattctcatgtcgaatcgttgtttgctagtctgtatttttttttctgtgtggttgtgaatcggacgagaatggggaaaaaacgaaggtggtcaattttgtttccatcgcgaatctgatgatctttttccccacccacacggcttgttgttgtttgcgtcagtaatggaataactttggctctgtcattgcatatcattttcagccgtctggcagttgaaggggagtcccggtctgctcattctttcgcagtctgatgatatatatgtatattcttttgcgtttgaaggactcctgtgtgttgttaaattaaactggtttccgcgtccgttaggacttaggagacctcatcgcgtaacagccttccaaaaaaataaagagagcccccttctcaaccagctgctgattaattggtgcagggctagctgtcaggacggctcagctccagctttgcggccctccagctctccccagttcaagttcaatattggcgagcatgcgagtttgccctcttccgtcgtcgtcatcatcatcgtcctcgcgatcccggcgtccctgtttcggcctacgcctcccgtagacaacagttgcgccctgctctccggcaagctatggccaagctgagctgcttccccgctctgctccccggcaagaggaagaagaagacacgcaagatcaccgatgctatcaaggccagcggcaacgagtgccccaaggtgaagccggtcgaagtcgaactcatcgacccgacgcttggtgcaggcgtcgtccaggacgtcgtccccgccgagctctcggtccccgtggaggaccgcaacaataaggaagcggctgatcaactggtgttggtgaaggagagcgatctgtcagatttcgacttcagcttccacgcggccatgaagcccgtccggtccgacagtgacgtggcactggacacctcggccgacgctgcggtggcggacacatcgccgaagctgaagcggtcttgctccaacatcgagactaagcgaccaggctcgcgttccgcgcccgagatgccggcccggtcgcgctcctacggcgatctgggcaacctggtcgccggcctcgccctggacgcgacggcgaccccgcacggcgcgccggaggccagtccggcgtccgtgaagacgtcgcgcactgccgaccgcgtgatgctgaagaagcggtcgtccagccaggtgctgccctcgcgcagccggaagctctggtggcggctcttcctctggagccaccgcaacctgcacatgccgcggtcggcgcgcacggcccaccgatcgttctcgcctggccgccacgacgggtacacctcggacacgttcgaggagggcccggccgccgaccgcaagaacaagacggtcatggtcgacgagtcgccgccagcagcgtctgtgcccaaccagtgggtcgccttctgcgccgagagctccatccacgaccgcgtcagcgcgtgggtcagcagcatcgaaagcgagcctccgttcgatatcgccgaggaggatgacgacaactacgacggagaggacgatgaggagaatggcgagtgtgcggcgtcgcagccgcgccatctcgagctcggggagccatcgtccgggaagggcggaaacagcaaatccaagcgctgcgcaacgacggccgacgaggtcgtccaggccaacaccgtggtgcagtccctgaacgccttctcgtcggtggcgcacatctcagggatgggcctcaaggtggtgccgatgatcgcgcccttctcaaccctccgggccgtcaacctctccagcaacctcatcgttcatatctcccctggatcgctgcccaagggcctccactctcttgatctgtccaggaacaagattgccagcgtcgagggcctccgggagctcacaaagctacgcgtgctcaacctcagctacaacaggatttcgcggattgggcatgtctgtcggtgtggatcagag

SEQ ID NO: 2608 - DNA, 2161 bp, Zea Mays
tctccacgatgggccacgccacaccactgagcacccttcctccctgttcttgcctctgtcctatactactactactacccatctttagccgccgcgtgcatgcaagaagagaaatagccgccgatcgatcagcgctcgaccgacccgtcatccttgacgaacgaccagctaggaaacaggaggcaccttctttgcacgtgtcagtgccagccagacgaacccaagggctagctgtcaggacggctcagctccagctttgcggccctccagctctccccagttcaagttcaatattggcgagcatgcgagtttgccctcttccgtcgtcgtcatcatcatcgtcctcgcgatcccggcgtccctgtttcggcctacgcctcccgtagacaacagttgcgccctgctctccggcaagctatggccaagctgagctgcttccccgctctgctccccggcaagaggaagaagaagacacgcaagatcaccgatgctatcaaggccagcggcaacgagtgccccaaggtgaagccggtcgaagtcgaactcatcgacccgacgcttggtgcaggcgtcgtccaggacgtcgtccccgccgagctctcggtccccgtggaggaccgcaacaataaggaagcggctgatcaactggtgttggtgaaggagagcgatctctctggtggcggctcttcctctggagccaccgcaacctgcacatgccgcggtcggcgcgcacggcccaccgatcgttctcgcctggccgccacgacgggtacacctcggacacgttcgaggagggcccggccgccgaccgcaagaacaagacggtcatggtcgacgagtcgccgccagcagcgtctgtgcccaaccagtgggtcgccttctgcgccgagagctccatccacgaccgcgtcagcgcgtgggtcagcagcatcgaaagcgagcctccgttcgatatcgccgaggaggatgacgacaactacgacggagaggacgatgaggagaatggcgagtgtgcggcgtcgcagccgcgccatctcgagctcggggagccatcgtccgggaagggcggaaacagcaaatccaagcgctgcgcaacgacggccgacgaggtcgtccaggccaacaccgtggtgcagtccctgaacgccttctcgtcggtggcgcacatctcagggatgggcctcaaggtggtgccgatgatcgcgcccttctcaaccctccgggccgtcaacctctccagcaacctcatcgttcatatctcccctggatcgctgcccaagggcctccactctcttgatctgtccaggaacaagattgccagcgtcgagggcctccgggagctcacaaagctacgcgtgctcaacctcagctacaacaggatttcgcggattgggcatggtctgtcgaactgcacggccatccgggagctgtacctggcgggcaacaagatcagcgacgtggagggtctgcaccggctgctgaagctggcggtgctggacctgagcttcaacaagattacgacggccaaggcgctggggcagctggtggccaactaccactccctcctggcgctcaacctcgtaggcaacccggtgcaggccaacatcggcgacgacgccctgcgccgggcggtcacgggcctcctcccgagccttgcctacctcaacaagcagcccgtgaagccgcagcgcatcgcgcgggaggtggccacggacagcatcgcgcgcgccgcgctcagcggctcggacagccggagcatccggaagaggacgtcgcggcggctcacgcagagcccccgctcgtcgtcgttgaccagggcccgtggcggcggcggcggcggttcacccacaccaagaaacacctctcgtcgtcgttgaccagaagaaccaactgcgtgattcgcgttgctctttggagacgggagacggtggcgtgactgcgtgcaggcagactcagacgacaccatgattcggcacggcgccagcatgatatgagacaaaccaagtatataaagcaagtatgatgtgagagaattgcgatgcaacacataatgtacatacttgttagggagatattgcttagattaatactacgaccgatgcatctttgtacctgaaaatatcaatttgagcctggttgaagatgaacatccatccaacat

SEQ ID NO: 2609 - DNA, 2308 bp, Zea Mays
gaaggggagtcccgggctagctgtcaggacggctcagctccagctttgcggccctccagctctccccagttcaagttcaatattggcgagcatgcgagtttgccctcttccgtcgtcgtcatcatcatcgtcctcgcgatcccggcgtccctgtttcggcctacgcctcccgtagacaacagttgcgccctgctctccggcaagctatggccaagctgagctgcttccccgctctgctccccggcaagaggaagaagaagacacgcaagatcaccgatgctatcaaggccagcggcaacgagtgccccaaggtgaagccggtcgaagtcgaactcatcgacccgacgcttggtgcaggcgtcgtccaggacgtcgtccccgccgagctctcggtccccgtggaggaccgcaacaataaggaagcggctgatcaactggtgttggtgaaggagagcgatctgtcagatttcgacttcagcttccacgcggccatgaagcccgtccggtccgacagtgacgtggcactggacacctcggccgacgctgcggtggcggacacatcgccgaagctgaagcggtcttgctccaacatcgagactaagcgaccaggctcgcgttccgcgcccgagatgccggcccggtcgcgctcctacggcgatctgggcaacctggtcgccggcctcgccctggacgcgacggcgaccccgcacggcgcgccggaggccagtccggcgtccgtgaagacgtcgcgcactgccgaccgcgtgatgctgaagaagcggtcgtccagccaggtgctgccctcgcgcagccggaagctctggtggcggctcttcctctggagccaccgcaacctgcacatgccgcggtcggcgcgcacggcccaccgatcgttctcgcctggccgccacgacgggtacacctcggacacgttcgaggagggcccggccgccgaccgcaagaacaagacggtcatggtcgacgagtcgccgccagcagcgtctgtgcccaaccagtgggtcgccttctgcgccgagagctccatccacgaccgcgtcagcgcgtgggtcagcagcatcgaaagcgagcctccgttcgatatcgccgaggaggatgacgacaactacgacggagaggacgatgaggagaatggcgagtgtgcggcgtcgcagccgcgccatctcgagctcggggagccatcgtccgggaagggcggaaacagcaaatccaagcgctgcgcaacgacggccgacgaggtcgtccaggccaacaccgtggtgcagtccctgaacgccttctcgtcggtggcgcacatctcagggatgggcctcaaggtggtgccgatgatcgcgcccttctcaaccctccgggccgtcaacctctccagcaacctcatcgttcatatctcccctggatcgctgcccaagggcctccactctcttgatctgtccaggaacaagattgccagcgtcgagggcctccgggagctcacaaagctacgcgtgctcaacctcagctacaacaggatttcgcggattgggcatggtctgtcgaactgcacggccatccgggagctgtacctggcgggcaacaagatcagcgacgtggagggtctgcaccggctgctgaagctggcggtgctggacctgagcttcaacaagattacgacggccaaggcgctggggcagctggtggccaactaccactccctcctggcgctcaacctcgtaggcaacccggtgcaggccaacatcggcgacgacgccctgcgccgggcggtcacgggcctcctcccgagccttgcctacctcaacaagcagcccgtgaagccgcagcgcatcgcgcgggaggtggccacggacagcatcgcgcgcgccgcgctcagcggctcggacagccggagcatccggaagaggacgtcgcggcggctcacgcagagcccccgctcgtcgtcgttgaccagggcccgtggcggcggcggcggcggttcacccacaccaagaaacacctctcgtcgtcgttgaccagaagaaccaactgcgtgattcgcgttgctctttggagacgggagacggtggcgtgactgcgtgcaggcagactcagacgacaccatgattcggcacggcgccagcatgatatgagacaaaccaagtatataaagcaagtatgatgtgagagaattgcgatgcaacacataatgtacatacttgttagggagatattgcttagattaatactacgaccgatgcatctttgtacctgaaaatatcaatttgagcctggttgaagatgaacatccatccaacat

SEQ ID NO: 2610 - DNA, 2323 bp, Zea Mays
tcattctttcgcagtctgatgatatatatggctagctgtcaggacggctcagctccagctttgcggccctccagctctccccagttcaagttcaatattggcgagcatgcgagtttgccctcttccgtcgtcgtcatcatcatcgtcctcgcgatcccggcgtccctgtttcggcctacgcctcccgtagacaacagttgcgccctgctctccggcaagctatggccaagctgagctgcttccccgctctgctccccggcaagaggaagaagaagacacgcaagatcaccgatgctatcaaggccagcggcaacgagtgccccaaggtgaagccggtcgaagtcgaactcatcgacccgacgcttggtgcaggcgtcgtccaggacgtcgtccccgccgagctctcggtccccgtggaggaccgcaacaataaggaagcggctgatcaactggtgttggtgaaggagagcgatctgtcagatttcgacttcagcttccacgcggccatgaagcccgtccggtccgacagtgacgtggcactggacacctcggccgacgctgcggtggcggacacatcgccgaagctgaagcggtcttgctccaacatcgagactaagcgaccaggctcgcgttccgcgcccgagatgccggcccggtcgcgctcctacggcgatctgggcaacctggtcgccggcctcgccctggacgcgacggcgaccccgcacggcgcgccggaggccagtccggcgtccgtgaagacgtcgcgcactgccgaccgcgtgatgctgaagaagcggtcgtccagccaggtgctgccctcgcgcagccggaagctctggtggcggctcttcctctggagccaccgcaacctgcacatgccgcggtcggcgcgcacggcccaccgatcgttctcgcctggccgccacgacgggtacacctcggacacgttcgaggagggcccggccgccgaccgcaagaacaagacggtcatggtcgacgagtcgccgccagcagcgtctgtgcccaaccagtgggtcgccttctgcgccgagagctccatccacgaccgcgtcagcgcgtgggtcagcagcatcgaaagcgagcctccgttcgatatcgccgaggaggatgacgacaactacgacggagaggacgatgaggagaatggcgagtgtgcggcgtcgcagccgcgccatctcgagctcggggagccatcgtccgggaagggcggaaacagcaaatccaagcgctgcgcaacgacggccgacgaggtcgtccaggccaacaccgtggtgcagtccctgaacgccttctcgtcggtggcgcacatctcagggatgggcctcaaggtggtgccgatgatcgcgcccttctcaaccctccgggccgtcaacctctccagcaacctcatcgttcatatctcccctggatcgctgcccaagggcctccactctcttgatctgtccaggaacaagattgccagcgtcgagggcctccgggagctcacaaagctacgcgtgctcaacctcagctacaacaggatttcgcggattgggcatggtctgtcgaactgcacggccatccgggagctgtacctggcgggcaacaagatcagcgacgtggagggtctgcaccggctgctgaagctggcggtgctggacctgagcttcaacaagattacgacggccaaggcgctggggcagctggtggccaactaccactccctcctggcgctcaacctcgtaggcaacccggtgcaggccaacatcggcgacgacgccctgcgccgggcggtcacgggcctcctcccgagccttgcctacctcaacaagcagcccgtgaagccgcagcgcatcgcgcgggaggtggccacggacagcatcgcgcgcgccgcgctcagcggctcggacagccggagcatccggaagaggacgtcgcggcggctcacgcagagcccccgctcgtcgtcgttgaccagggcccgtggcggcggcggcggcggttcacccacaccaagaaacacctctcgtcgtcgttgaccagaagaaccaactgcgtgattcgcgttgctctttggagacgggagacggtggcgtgactgcgtgcaggcagactcagacgacaccatgattcggcacggcgccagcatgatatgagacaaaccaagtatataaagcaagtatgatgtgagagaattgcgatgcaacacataatgtacatacttgttagggagatattgcttagattaatactacgaccgatgcatctttgtacctgaaaatatcaatttgagcctggttgaagatgaacatccatccaacat

SEQ ID NO: 2611 - DNA, 2819 bp, Zea Mays
cagacgtagttaatgatgaagttggcgattctttgcatcgaagcatccagccgaggaaatcaacggttacaattggatggttggtccgaccacaatcaatcttagtcgcacaacgcgcctccctgctccagttttccattccttgcgcccccttcagatccgatctgatccacgccggcgagacaccggaggaccgccatgacgctcagcctccgtcgcaagcagctcgatgttatcgtgcggatgctgcacctgaaccagcagcagttgccgaacggcggcgagggacagggagaggacgatgcgtacaagatcctggttatggatccgccctgtatctccatcctctcgcctgtgctcaagctcggcgacctccgccaccaaggtgtcaccctcaccctcgccatcgatcgtccgcggcaggcggtgcccgatgcgccggccgtctacttcgtccggcccacccccgggaacgtggaccgagtagcggccgacgccgccgcggggctctacgggtctttccacgtcaacttctccacctccgtcccgcgacccctgctggagcgcctcgcaaccgcctgcgccgccgctccgcccgcgtgtgcgggccgcgtggcgcgcgttgctgaccagtacatcgacttcgtctgcatcgaggatgacctcttttcgctagcgcagccccgggcctacgtcgcactcaacgaccccgccgctgccgacgccgacatcactgccctcgtcgacgccgtcgcgctgggcctcttctgcgtagtcgccacgctcggtgttgtgcctgtcatcagttgtgcgcgcggcgggccagcggagatggtggccggcgccctcgacgcccggctccgcgatcacctactcgccaagcccaacctcttcacggaggctgcatctgccgctgtcacgtcattccagcgccctgtgctgtgcctcttcgacaggaatttcgagctgtctgtaggggtgcagcacgactggagctaccgcccattggtgcacgacgtgcttggcttgaagcagaacaagctgaagttgccggcagagaagtacgaattggatgactctgataaattctgggtggcaaacagctggtctccattccccaaagttgctgaggaaatcgaagcgcagcttgccaagtacaagcaggatgtggatgaggtgaaccagcatactggtggtggcaaggttggggttgagtttgatggtactgatctaattggcaacactaagcatctcatgaatgcggtgaactcactgccagaactgacagagcggaagaatatgattgataagcacaccaatattgcaacatctttgcttgggcatatcaaggagaggtctctggatggatactgcagctgtgaaaatgatatgcttgtgagtggcactgtcgaccggaatacactgctgagtctcatcagagggaagggtaccaaggaagataagcttcggctagctgtgacctacctgctgtcctttgcgacaccaccatcatctgagctggagcaggttgaggccgctctgcgggaatcggaagttgacatgtctgcatttcagtatgtgaagaggataaaggcattattgaatacccaatttgcagctgcctcaggcacagcaactaagagcaacatcgtcgattgggcagagaagctgtatgggcagtccattggcgctgtgaagaatctcttgtcagatagtaggcagctggccttgacaagaacagttgaagctcttatggaagggaaaccaaacccagaggtggatgactaccttttgtttgatccacgggctcctaggtcaggaactagtgggcagtttaaaggacccttcagagaagccgttgttttcatgatcggtggtggaaattacattgagtacaagagcttgatagagctaaagcaacgctcacagccttccaaacatgttatatatggtgcaacagaaattcttagtggggccgagtttattcaccaactggcagaattggggcagaaagcagggttgggtggtggcagcagcaacataccaccaggttcagcacaataggtaggatgctcttacaagaccttttaatgttaaggagtgattcgagcttcagggactacggtaaatacgctcataccccacattttattttaaggagcgttccaggctgcatagattagtgatatcaaatttcatgaaaagtttatgccccttcgattgattagttgtcaatacatagctttgttgtttcaatttgggttttgatattgcccatgtatgactatttttacttttctgtactctatttccttgcccccctccctttattttactaagaaatttttcttggaattctgtttgcacactcaaagaaatccgttcatgaatatttgtaacagaaacctagttctgatgtttggataatttgattttggttgaaatcttcatagttccaggctgttacatcttttacttgtagtgcaaggccatatgtgggttcttgaaaccccatatatatgactaaccatctcaataatatgtatgcagggtggcgtaatatataaattcattttgtgtgttggggatataagtttattacttgttttatctacaatagttggatacttggattgggaaaatgcattgtagcaatggcaagctgaagaagcgaggagacgaggaatttgaagcaacttttggggcagcatatgggcaacaaggttatcgcaagtataaggcacgttgtgtccttgatcacattctttgacctaataatgttctattaatcattgtggcacagttaggttaagttgatg

SEQ ID NO: 2612 - DNA, 2393 bp, Zea Mays
cagacgtagttaatgatgaagttggcgattctttgcatcgaagcatccagccgaggaaatcaacggttacaattggatggttggtccgaccacaatcaatcttagtcgcacaacgcgcctccctgctccagttttccattccttgcgcccccttcagatccgatctgatccacgccggcgagacaccggaggaccgccatgacgctcagcctccgtcgcaagcagctcgatgttatcgtgcggatgctgcacctgaaccagcagcagttgccgaacggcggcgagggacagggagaggacgatgcgtacaagatcctggttatggatccgccctgtatctccatcctctcgcctgtgctcaagctcggcgacctccgccaccaaggtgtcaccctcaccctcgccatcgatcgtccgcggcaggcggtgcccgatgcgccggccgtctacttcgtccggcccacccccgggaacgtggaccgagtagcggccgacgccgccgcggggctctacgggtctttccacgtcaacttctccacctccgtcccgcgacccctgctggagcgcctcgcaaccgcctgcgccgccgctccgcccgcgtgtgcgggccgcgtggcgcgcgttgctgaccagtacatcgacttcgtctgcatcgaggatgacctcttttcgctagcgcagccccgggcctacgtcgcactcaacgaccccgccgctgccgacgccgacatcactgccctcgtcgacgccgtcgcgctgggcctcttctgcgtagtcgccacgctcggtgttgtgcctgtcatcagttgtgcgcgcggcgggccagcggagatggtggccggcgccctcgacgcccggctccgcgatcacctactcgccaagcccaacctcttcacggaggctgcatctgccgctgtcacgtcattccagcgccctgtgctgtgcctcttcgacaggaatttcgagctgtctgtaggggtgcagcacgactggagctaccgcccattggtgcacgacgtgcttggcttgaagcagaacaagctgaagttgccggcagagaagtacgaattggatgactctgataaattctgggtggcaaacagctggtctccattccccaaagttgctgaggaaatcgaagcgcagcttgccaagtacaagcaggatgtggatgaggtgaaccagcatactggtggtggcaaggttggggttgagtttgatggtactgatctaattggcaacactaagcatctcatgaatgcggtgaactcactgccagaactgacagagcggaagaatatgattgataagcacaccaatattgcaacatctttgcttgggcatatcaaggagaggtctctggatggatactgcagctgtgaaaatgatatgcttgtgagtggcactgtcgaccggaatacactgctgagtctcatcagagggaagggtaccaaggaagataagcttcggctagctgtgacctacctgctgtcctttgcgacaccaccatcatctgagctggagcaggttgaggccgctctgcgggaatcggaagttgacatgtctgcatttcagtatgtgaagaggataaaggcattattgaatacccaatttgcagctgcctcaggcacagcaactaagagcaacatcgtcgattgggcagagaagctgtatgggcagtccattggcgctgtgaagaatctcttgtcagatagtaggcagctggccttgacaagaacagttgaagctcttatggaagggaaaccaaacccagaggtggatgactaccttttgtttgatccacgggctcctaggtcaggaactagtgggcagtttaaaggacccttcagagaagccgttgttttcatgatcggtggtggaaattacattgagtacaagagcttgatagagctaaagcaacgctcacagccttccaaacatgttatatatggtgcaacagaaattcttagtggggccgagtttattcaccaactggcagaattggggcagaaagcagggttgggtggtggcagcagcaacataccaccaggttcagcacaataggtaggatgctcttacaagaccttttaatgttaaggagtgattcgagcttcagggactacgggtggcgtaatatataaattcattttgtgtgttggggatataagtttattacttgttttatctacaatagttggatacttggattgggaaaatgcattgtagcaatggcaagctgaagaagcgaggagacgaggaatttgaagcaacttttggggcagcatatgggcaacaaggttatcgcaagtataaggcacgttgtgtccttgatcacattctttgacctaataatgttctattaatcattgtggcacagttaggttaagttgatg

SEQ ID NO: 2613 - DNA, 588 bp, Zea Mays
gtgcataaggacccagcgatcaggagctgactgttttgtcctccagcaatcggccatgtcgtccctggtcaggtcgttcgggtctctctactcccagaagctccgctccaccacccgtctcggatccgcgacggcggcgccaccgcgtttccaggcgttggtccgatcgggattctcgggctccagccacgggggagacgtgagacgtccgccggctcggccgagccagcatcagtctcaggacaaggagcggacgcctttcttcatcttggcaaggctggccgtcggttctattcttgctgctgcagcgccaatgctgcattccagatgggcgtcgttcctgctgattcagagtgaggtggatatggtgaaagacacggcggaggtagtggcggaggccgtcgaggacgcggccaccgtcgcagagaaggtgtcgtcggaagtggccgagcagctgcccgagaacgggaggctgaggacagcggtcgtgctcctggagcacgcgtccaaggaagtcgccgaggaggcacaccttgcacagaacatcatccacaagagcaaacagagggcatctatcaacaacagcag

SEQ ID NO: 2614 - DNA, 1054 bp, Zea Mays
gtgcataaggacccagcgatcaggagctgactgttttgtcctccagcaatcggccatgtcgtccctggtcaggtcgttcgggtctctctactcccagaagctccgctccaccacccgtctcggatccgcgacggcggcgccaccgcgtttccaggcgttggtccgatcgggattctcgggctccagccacgggggagacgtgagacgtccgccggctcggccgagccagcatcagtctcaggacaaggagcggacgcctttcttcatcttggcaaggctggccgtcggttctattcttgctgctgcagcgccaatgctgcattccagatgggcgtcgttcctgctgattcagaccatcaggtgaggtggatatggtgaaagacacggcggaggtagtggcggaggccgtcgaggacgcggccaccgtcgcagagaaggtgtcgtcggaagtggccgagcagctgcccgagaacgggaggctgaggacagcggtcgtgctcctggagcacgcgtccaaggaagtcgccgaggaggcacaccttgcacagaacatcatccacaagtggtcacctacactgcgggatgaagtatctagccccgagccagctacggagaaacgagtttatttttttatctcgggaaccaggctcaggctagcctgtttggagcggccagactccactatgaaacaaccaaatgtgcctagattgtctccagcagtaaatgtagaatatgggacgtggaattgtagatacgctgtttgaaaatgtttgcagagtgaagtttaaaatatgggatgagataggaaatgtgatagaggatctaccggagattgtcttaaatcgtatgtttggttcctggttcaaaccttgatgtaggccaagcctagtctgaacaaatggatgcaagtaataattagctcggttgtttggttgtctgcattaaatgagccaggattcgctagacgtgtttggttgatcggacatgactatatctactgctgggtgtgtgttactatcaagtttgacatgaaaagagatagtaaaagctaaac

SEQ ID NO: 2615 - DNA, 1857 bp, Zea Mays
acatggagtaagaaatattctacccaattttagatatttggccaaaatcgttagtcttgaaattgaacaatgatggtttcttcaaggtaattaaaataaaaaaaaatagtcatatcataattgtagcattgtatgctaaggttgtttaagttgtgaatctaatttttgaaacgaaaatatgaagtaggaaaggcttacctgccaaagataacatgttaggtatcaaatatctgtggcacaagccatcagcagggcaccacccacatgcccaacccaaccgctgcttttatttatacacctcctttggcctcttgcatcatcagctagtttacttgcgctgggcaagtctctagtgccagcttgtttacttgtagatccaggctctctcctctccaagcctttagcacagcaaagtcccagtgccatccctgttctgccgttgtatgtgaaccctcctatgcaatagcaagatctccatctctctcagctctctccagcttcatttccactcaagagttgagcacggatgaagaggccgaccagcagaggttcttcaatggtcagcgggcaagcaaccacagatctacaagaagatagctgcaggtccatggagccgcacggagtggacggcgatgctacggccgcggctgagcgcgacgacgtggacgccggggcgtacgacgaggaggtggacgaagaagaggagctcgcagggtcccgcggcggcctcggggagaagaagcggcggctggcggcggatcaggtgcgcgccctggagcggagcttcgaggtagacaacaagctggacccagagcgcaaggcccggatcgcgcgcgacctcagcctccacccgcgccaggtcgccgtctggtttcagaaccgccgcgcgcgctggaagaccaagcagatcgagcgcgacttcgccgcgctccgcgtgcgccacgacgcactccgcgtcgagtgcgacgcgctccgccgcgacaaagacgccctcgccgccgagaaaggagctgaggggcatggtggaaaagcagatggaggtgaagctggagtccgcggcggaggagctgctgccggtggcgacgaggtcagcagcagcagccgctgtgtataacaaggacgggtcgacggacagcgactcgagcgccgtgttcaacgaggaggcgtcgccctacccttactccggcgcggccttagaccatcagcagcagcaagaaaccagccacccgctgggcttcacgggtttcacctccttcttgacgtcctctttcccttccgtataccatggggattcgcatttggaccaggaagcggacggcttcttcagcgccgccgccgccggcgacggattcttcgccgaggagcagagcgcaggcatcggcagctggtacggcggtgagggttggtagaacagcaacagctaagctgttggctgcctggaggctggagatcactcttggtatcgtatctaccattcttgtaaaatatggcgctgtacattatattatgcatgcatgggtccgggacgcggtaactatatactactatgtagagttaatttatatggagtagttaatttctgtatttttcactggcgggctgaaagcctgaaacacgggctacgagaggagataggccgggtaatacggttattgttctataaatcttggttgacatgcagttaatttttagacatctctctcgctgtatctaatctagaacaatcatataatgtggacagtatataagatactcgtactttgtgggcatggttatcagagagatcgacacatgaccacatgtagaaacacagcaggacagacaggattagggagacaggggatggagaaaatgcat

SEQ ID NO: 2616 - DNA, 840 bp, Zea Mays
atgcgtcccgctgcccatgtgcggtgccaggacgacgttgtcgagcgccatgagcgcctgcggcacgtccggctcggcctggaacacgtccagccccgcgccgccgaggcggccatcggcgagcgccgcgacgagctcgggctcgtcgacgtgcgcgccgcgcccaacgttgacgagcacgcccgtggggccgagcgcctcgatcacctcgcggctcacgatgccgcggctctgctcgttcagcgagcaggccaccacgaggacatcgctgtttgctgcgagctggagcaccgtcgggagatagatgtagttggggtacgcatcctgccttgttctctggtagtagcagaccgggcaaccgaagccttccactcgcttggcaatggaaagccctatcctgcccagcccaatgatgccgacccttttgccactgaaccgagtggtgagaccgtagtggccatcattggccttccacagcccggcgcggacgtagctgtcggcgtgcgggatcctgcggagagcggcgatggcgagtcccacggcaaggtccgcgacgtcgtcggtgagcacgtcgggggtgttggtgacccggaccccgcgctcgcggcatctggtaaggtccacgcagtcgtagccgacggcgtagcacgcgatgatctcgagccgcgggaggtcgtcgatgagagccgggttgccgccgaagcccgagccgccgccaatgaccacggcgcggatcgatgatgcgtgggcacggaggaattctccacggcggtcatgcggcacctcccagaggcgcaggaggcggcagcacgcaggagtagtttagggaggttggacttg

SEQ ID NO: 2617 - DNA, 1504 bp, Zea Mays
cttccagaccttcattagcagtcctacatgtggtgtcccgttggaattgcttgttatcctaatgtgatttttcttctctatgaaactggggataatgactgcgttgacaaactggagataacctcaactgcaagtatcaggaccctggtagactataagtacgaccgaagatcgagccccctacatccaattgaggaagagaagaggcgataagcacactaatggctgacgagtcatggagggtgccaaccccagtgcaagaactggccgcaggcgtggtggagccaccgacccagttcgtgctgcaggagcaggatcgtcctggatctgggaccctgctcttcgccactgacatgccggagcccattcccgtcgttgacctcagcaggctggcggctgccgacgaggcttccaagctccggtcagcactggagacctgggggctcttcctggttactaagcatgggatagaagcatctctcatggacgatgtgatggccgcgtcacgcgattttttctaccagccgctcgaagcgaagcaggaatacagtaacctgataggcggcaagcggttccagatggagggttatggtaatgacatggtgaaatccaaagatcagatactggactggcaagatcggctgcagctcagggtggaaccccaagatgagaggaacctcgcttattggcccaaacaccctgattctttcagggatcttctggagaagtatgcatcaaaaaccaagatagttaggaacaaagtcttacgggcgatgggcaaaacattggagcttggcgaagactatttcatcagccagattggtgacagggcctcagcaattgctaggttcaactactaccctccctgtccaaggcctgatcttgtctttggcattaagcctcactctgacggtggcgcggtgacgatacttctcgtcgacaaggatgttgggggcctgcaagttcagaaagatggcgtttggtacactgttccgtccatgcctcacacgctgcttgtcaacttgggtgactccatggagataatgaacaatgggatcttcaaaagtccggtgcacagggttgtgacgaatgcagagaaagagagactctcactcgccatgttctacggcgtggaaggccagagagtgcttgagccagcgcttggtttgctgggtgaggagcgaccagcacggtacaggaaaattatggcctcagactacattattgggctccgtcaaggaattgcggaaggacagagatttatcgagactttgaagatatagtcaatcgtgaatgctcaagaataataaagagttgcttcgcccattgctaaatcagatcagagtccaatgtccattctgtaatgcattaccacattgttatacatgctcggaagacttcagagaagatgtaatcctgctcgttttactaaatttggggcattaataaatgattaaataaaaacacatgcatggtcaggtaacatggttgagatgcacccttg

SEQ ID NO: 2618 - DNA, 1073 bp, Zea Mays
caggcttccaggtccgcctctccaccaccgcacgtttggaactggaatggagccgtgctttttcgtggcatatctattatgctgtcttgttcttgcttcatctccttctggcggggttattgcacatccaatctgtttgtttctgttccagttcgtgattgttaggattctgcatgccgtaattcgtctcccggccgatctgcagctgcagcacgatatgtttggagcatggtgatatgcacttccaaagcgtccatctgaggcactcgttaaattcaaatatctgtttgaagcctggattcccaatttgcagttttaccttcaagcctttttgctttcggtctcatatttactactttgccttcaagctgccgagactttggggtagcctttgttataactttgcggttgcctttctttctttttttttttccttgtctcctgtgaggaggaagacgggatccaatgtcatgacaatcccaaagtaactatgaactcatttcggctggaactctcatttccttttgtacttggaagatgagatactcggacatcttatcctcaaacattttactgctctgattagtttactactttaagctgaatgtttgaattcacgcattcaattcaaaaaatagagaaaaactcgtccatgcaatgaggcacaccgcaacgtgtcactttgttttaatccagggatttccttgacgtattatcgtgcacaattgtatacatacgtgaatttcattctgaaacagattttcatcctatcgccaaagtccaaaagttactgatgtaaagtccagcaaatgcataaacccgaacggccgtcacgaactatgcaacgtccagatacgcacaagacagtagctacttgtttgacccccccccccccccccctccgggatcaaaacaaatttcataggaccgatattatcgaacattacttgttaccatcatcatgtgcatccgagctcaggagtggctgctgctatgctagctcgccacagtttcgcttgaacacggaacaacctggttgtagttgtcatttgaacatatcaggtacacataat

SEQ ID NO: 2619 - DNA, 1236 bp, Zea Mays
gaaattcatatctactggaggcgttgcaagatatcgacgcatgccaggaagcagtccatcattggtgtatttttaacggccatgcatatcacaccatcaagaaagacaaacagatttagagctaattgtcatagtgcaagtgtgggttgcaagtggctattttttgcttctatgagcaagaggaaaaggaaaggacgaataggttcagggaggatggctcagtggtttggagcttaatgatatagctatagctttacatgtatgatggtgcttttgttggacttgtatggtacaatgttggtgatgtgtggttgagctctctaggacttgtatggtactatgttactgatgtatggttgagctttcttaaatttgtatgttactatgttgagtatgtactattttagtgatgtgtggttgagctttcttgaacttctatggtaacatgttgggaatagtgtgatgaatgtatgcaatattgtcaaattccttctgttgcatcatgtgatgggtgtattgtcaagattgtgtcaaatcaaatcaattactgtcaaattgtatttaaattgctctcaaagtgtagtcaaattgtattatttcataatgttgttgaaatgatgtcagattgttttttaaaaatatccttaaaagattgtcaaaatttattcaaatttaaatattggtaaattcaaatcagtttcatcagtgtaatagaggcaatggtgaaagtgcatatttgtctttttgcggaccgacttaacaccgtaaagtagagataacggaataggggctgcctgtgatttcatttcaaaaaaggaggggcaaccatgcaaacttcaaaaaggtggggtaaactcatagttggagttacaagttagggcaaccatgcaatccccttaacatttttatctagccacttttaagatcagcattagcctgcctgatgaatataggtatggtggtcacgcccgaagcatagtcgacttgtttgcttatgcccatccaaataatcctccacacaggaatcgcatagacaaaaatgatagttcatctactggccacccatgcaggatgtgttccagttcagcagcacagcttttaagattttatcaggatttagcatttaaggaaaacatttttttcttaaatagacaatcaacaggtgtattagctggtaggatactaggatccaaatccaaacatcccctctactctctagtgatcagatgagttttg

SEQ ID NO: 2620 - DNA, 2160 bp, Zea Mays
ccgagacatcgggatcagcccgtgctcagtgctgacgtcgtcactcaaatgctgtttcgtccccgtccgcccatgtccatctagaattcgatccagtccaaactacctttcccggcttggtcaatcctgtcgccttcggtccatctcacacagactccggccggcggctccactccactgccccgccgctcggtgccgtacgtcgtcgtgctccaccgcctcgatcctcggtttattgctttcctgcatagcttccttagctagctaggtctcgtttcatcagtctcgatctgctgctcgttggccgccggcggctacgagcatggaaacgtacactacggacgacgcgctgacggccatggggtttggcaagttccaggcgcttgttcttgtgtacgcagggacgggctggctggcggactccatggagctcatgctgctctccttcgtcggaccgctggttcggcagcagtggaacgtctctgcccagcacgagagcctgctctccagcgtcgtcttcactggcatgctcctgggagcctgttcctggggctatatttccgacaaatacggaaggaggaccgctctattgttctccgttactcttaccgctggagcagggttgacaagtgctctatctcctaactacatatccctgctggcacttcggtttcttgtgggtgtaggagttggtggcacgcatgtattttcgtcttggtttctggaatttgtccctaccaagaaccgtggtgcctggatgcttgtgttctctgctttctggaccatcggaaccatcttcgaggcttcgcttgcgtgggtcgtgttgtcaagactgagctggcggtggctgctggcgttcacctccctcccatgcttcgccttgctcgtgtttttcgtcgtcgcaccggagtcgccacggtacctctgcgcgcagaacagaatatccgacgcgacccttgttcttgagaggatgtccaggacgaacaaggccgctcttcctcccggagctctggcataccaccacacggaaacgcagctgggactgggagagagtacaacagacgacgcctccaaatccggttccggtggcatggctgccctgcgcaggctgttctcgcgcaaactgctgagatccacgcttctcatctggttcgtttggtttgcaaactcctttgcctattacggcctagtgttgctgacgtcgcagctgagtgacgcgaaccggagagtttccggggctggttatttctgccattatcgttgattggcttggccggaaagctacaatgtggatcttgctgtttggatgctgtggcttcctcggacctctggctgttcatcagaaggagtcggtgacaaccgctcttctgttcggtgctcgcgcctgtggcatggggagctctacggtcttgtgcttatacgcaccagaggtgtacccaacatcagcgcgctccacaggtgttggcattgccaccgccatcggaaaaattggcggcatcgtttgccccctcatcgctgtcggcatgctgcggagctgccaccaaatgcaagccgtcctggtctttgagcttgtcctaggcctcgcgggagtagcctgcatcctcttccctgtggagaccaagggccgcgagatgaaatgacagacccttcacagcacccaaagcgaccactactttcagcggcgtacgttcgaacataaagtatttttgttgaagacgcgtactcagaaaattgctcaagctatatctttaatgaaatattctgagtatcctttttatcaattagttttttctaccctatgtctttttagttttcactattttgattagattttgttttctaattaaaatcttaatacaacctgcgtggagttagtttgctaacgcatgtgccatgatatggttacaggataatgaaaaacagttttgagctcttttaggctcaaaccacgagttcaaatcatgtgtgtgagtggggacgtgtggtgggggaggaattagttcgtttgggattaatttactcggtggatttggattctttgtatttttaggcactgtttgggatagctccagctctattaaatttggtagagttagaggagcaggccattaaacgctctaaaaaattgtagagttagagcaataagcctttagaagatat

SEQ ID NO: 2621 - DNA, 1757 bp, Zea Mays
gacatttccgatggcataattatttctgacggtttgaagatcaggcgtcgaagtttaattaatgtccgacagcctaatcagatcctcagatgttgtttaatgtctgatgcagtcgtcagacattggatttatctttgccagctgccagaaaagccgtcagatatagacaatttttaggtaacgccgtaccggccgccgtttcaattctggctctccttctcttctccctctctctctcacgagcacgcgcaattcagcctccgtcaccgcctcagcttctgtgcccactcgccgcttccgctcccacgcacccaccactgcctgcggcgccaccgctcggccgccctcgcctgacgcagcaccaccttgccagtggccgcgcgtgcacgctgcgcctgccctcatccgcgcccgcacgacgacatcgacggacctcgcgtgccctccttggctatcgccacgcccacgctccataggtttgctcgcgtgtcgctgcctcgcaacgccctaggccgcacatgacgcccacgccgtcacgccactcgtgctcacctagtcaccttcgccctcgtaggtctcctgcgtcccaaacacctccttgttcggttgtagcacctggagatgcatctggccaagacgacgctgtgacttcataggtgaacaaccttttcaacacccaaggtctagccggaggaagtggccacaactctaaccaacaaggtgacgaatggtaggcatagttagttaggattcgattcctatgcaattttggaacttagtagttttattatgacattttaatgaatttggaactatatgaatgtggatcaactaagttctatgtgtgtacctttgtgatatgtgaatgaggatgtgtgatatgtgtgtgtggttgtgaatgtgtattgtcgataaaatgtgtgttatgcatgttaaaaaatatccgtatttgtttgtggttgtggatgtatgtatttgtggatgtatgtatttgtgaatatgtattggttgtgaaatctagatattttaggatgtgataatgtatattgtgcgaatgaacaaaaaccgggagaatattgacctatgtgaaattcattatatccgacggctacagacaagccgtcggacataagacaaattaatatatgatggtctacatgcaagccatcgaagataagcttattatatctgacttgcatgtagaccatcggacataacatgtgtgggacccattgtacgccgtcacagccgttaaccaagcatactgtcgatgatgtctgtgagttagtcggacattggctatattcaacggctgacataagatcatttccgaccttttaggatcaacggacacatcgtgtcggacataagctgttgaaaataatttatgtttgacggtatagagcttatgtctgactacttaggccatcaaaaattttatgttttagtggcaaaacaatgtttctagattttagtctacaatcgataggctaaactttaatgtggtgatccaaagaatatctatggctgctctagtggaactcatagcttgaggcttggctggattttgccatgtttttcaagaaggcatcgtcgaaaatcatcgctttcagaatcgaaattattaggaatatgtggcgtgtagcaattcctttcatattttctctgtgcagactaaagagagctagcctcaccctcacacgtggagtatccacggtacactggatggcaccccctacaaaaaaaaccggtgcatg

SEQ ID NO: 2622 - DNA, 1859 bp, Zea Mays
tttttcgacaacgccaaacatctggtttcgctgccccgattcgccacgaagccgcactgtgagagagggacgcggcccgttgtcctcggcttgtacgcaatccttccgtcgctgcgaagctgatccctcgtgttcgccatggcccccagcgtcgccgtggaaaacctcaaccccaaggtcttgaaatgtgagtatgcagtccgtggcgagattgtcatccatgctcagcgcttgcagcaacaactacaaacacaaccagggtctcttccttttgatgagatcctgttctgcaacattgggaatcctcaatcccttggtcagcaacctgtgacgttcttcagggaggttcttgctctttgtgatcatccatgcctcttggaaaaagaggaaaccaaatcattgttcagtgctgatgctatttctcgagcaaagcagattcttgcaactattcctggacgggcaacaggtgcatatagtcacagtcagggtatcaaaggattgcgtgatgcaattgctgctgggatcacctcacgtgacggattccctgcaaatgcagatgacattttcattacagacggagcaagtcctggggtcccctattaccttgatgaaaaaactgggtggggtttggagatctctgatcttaagaaacaactcgaagatgctcggtcaaaaggcattgatgttagggccttggtggttatcaatccaggaaatccgactgggcaggttcttgctgaagacaaccaatatgatatagtgaaattctgtaaaaatgagggccttgttcttctagctgatgaggtatatcaagagaacatctatgttgacaacaagaaatttaactctttcaagaagattgcaagatccatgggatacggcgaggatgatctccctctagtatcatttcagtctgtctccaaaggatactatggagagtgtggtaaaagaggaggttacatggagattactggcttcagtgctccggtaagagagcagatctacaaggtagcttcagtgaacctgtgctccaatatcactggtcaaatccttgcgagcctcgtcatgaatccaccaaaggttggggacgaatcatatgcttcctacaaggcagagaaagatggaatccttcagtctttagctcgccgtgcaaaggcactggaagatgcattcaacacgcttgagggattttcatgtaacaaggctgaaggagcaatgtaccttttccctcagatccatctgccacataaggcaattgaggctgctaaagctgccaagaaagcacctgatgcattctatgcgctccgtctccttgaatcaactggaattgttgtggttcctggatctggatttggccaagttcctggaacatggcacgtcagatgcacgatcctgccgcaggaagataaaatccccgcggtgatcacccgcttcaaggctttccatgaggcgttcatggctgagtaccgtgactgaactgttacagtggctgagtaccaccgtgtagaccgaaacaaaataaagctcccccctctctctgtgtctgtgcgtgtgtgtgaactgatctctgaatggacgaacaatgtactctgttggcgcctttaatggcaattgaggaaaattttgatcaaatttctgttgtctgctgttgtgaaagatgcgggattgtttcctagtgcagcgcaaaatgttgtttccatgtactgaggatattggcagggttgcaagagctgggaaggcatggaaccactggtgttcatgcaggattgctgaagccgataatactgctaaactttcagtgcctcttttgcgggtataattaattagtagaatgtttgtaatgcgagaggaaatccagg

SEQ ID NO: 2623 - DNA, 2190 bp, Zea Mays
tttttcgacaacgccaaacatctggtttcgctgccccgattcgccacgaagccgcactgtgagagagggacgcggcccgttgtcctcggcttgtacgcaatccttccgtcgctgcgaagctgatccctcgttgaaatgtgagtatgcagtccgtggcgagattgtcatccatgctcagcgcttgcagcaacaactacaaacacaaccagggtctcttccttttgatgagatcctgttctgcaacattgggaatcctcaatcccttggtcagcaacctgtgacgttcttcagggagattcttgcaactattcctggacgggcaacaggtgcatatagtcacagtcagggtatcaaaggattgcgtgatgcaattgctgctgggatcacctcacgtgacggattccctgcaaatgcagatgacattttcattacagacggagcaagtcctggggtgtgcattttttacttctctttcagttgtcctggacgttttatgaataaacatgataccactgtagtctcatcatgaccctattcttccttaaggtccacatgatgatgcaattactgattaggaatgagaaagatggcattctgtgcccaattcctcagtaccccttgtactcggcctccatagctcttcatggtggagctcttgtcccctattaccttgatgaaaaaactgggtggggtttggagatctctgatcttaagaaacaactcgaagatgctcggtcaaaaggcattgatgttagggccttggtggttatcaatccaggaaatccgactgggcaggtttatactgatcatttctcctcttgttaaagaacatctctgcttatccacaccatactctttataattgatgtaataacatgagatgtgtatttattgtactcctattttaagtcagtgaatactttgtatacttgtattgtctagggaaaggttttggttgaaaaaaataagtgtttttttgtcgttctgcaatgcgaatgaatgtttttcaatgctggtgaccaaaacacaaattttattgaagtggttcatttatttgtaggttcttgctgaagacaaccaatatgatatagtgaaattctgtaaaaatgagggccttgttcttctagctgatgaggtatatcaagagaacatctatgttgacaacaagaaatttaactctttcaagaagattgcaagatccatgggatacggcgaggatgatctccctctagtatcatttcagtctgtctccaaaggatactatggagagtgtggtaaaagaggaggttacatggagattactggcttcagtgctccggtaagagagcagatctacaaggtagcttcagtgaacctgtgctccaatatcactggtcaaatccttgcgagcctcgtcatgaatccaccaaaggttggggacgaatcatatgcttcctacaaggcagagaaagatggaatccttcagtctttagctcgccgtgcaaaggcactggaagatgcattcaacacgcttgagggattttcatgtaacaaggctgaaggagcaatgtaccttttccctcagatccatctgccacataaggcaattgaggctgctaaagctgccaagaaagcacctgatgcattctatgcgctccgtctccttgaatcaactggaattgttgtggttcctggatctggatttggccaagttcctggaacatggcacgtcagatgcacgatcctgccgcaggaagataaaatccccgcggtgatcacccgcttcaaggctttccatgaggcgttcatggctgagtaccgtgactgaactgttacagtggctgagtaccaccgtgtagaccgaaacaaaataaagctcccccctctctctgtgtctgtgcgtgtgtgtgaactgatctctgaatggacgaacaatgtactctgttggcgcctttaatggcaattgaggaaaattttgatcaaatttctgttgtctgctgttgtgaaagatgcgggattgtttcctagtgcagcgcaaaatgttgtttccatgtactgaggatattggcagggttgcaagagctgggaaggcatggaaccactggtgttcatgcaggattgctgaagccgataatactgctaaactttcagtgcctcttttgcgggtataattaattagtagaatgtttgtaatgcgagaggaaatccagg

SEQ ID NO: 2624 - DNA, 1920 bp, Zea Mays
tttttcgacaacgccaaacatctggtttcgctgccccgattcgccacgaagccgcactgtgagagagggacgcggcccgttgtcctcggcttgtacgcaatccttccgtcgctgcgaagctgatccctcgttgaaatgtgagtatgcagtccgtggcgagattgtcatccatgctcagcgcttgcagcaacaactacaaacacaaccagggtctcttccttttgatgagatcctgttctgcaacattgggaatcctcaatcccttggtcagcaacctgtgacgttcttcagggaggttcttgctctttgtgatcatccatgcctcttggaaaaagaggaaaccaaatcattgttcagtgctgatgctatttctcgagcaaagcagattcttgcaactattcctggacgggcaacaggtgcatatagtcacagtcagggtatcaaaggattgcgtgatgcaattgctgctgggatcacctcacgtgacggattccctgcaaatgcagatgacattttcattacagacggagcaagtcctggggtccacatgatgatgcaattactgattaggaatgagaaagatggcattctgtgcccaattcctcagtaccccttgtactcggcctccatagctcttcatggtggagctcttgtcccctattaccttgatgaaaaaactgggtggggtttggagatctctgatcttaagaaacaactcgaagatgctcggtcaaaaggcattgatgttagggccttggtggttatcaatccaggaaatccgactgggcaggttcttgctgaagacaaccaatatgatatagtgaaattctgtaaaaatgagggccttgttcttctagctgatgaggtatatcaagagaacatctatgttgacaacaagaaatttaactctttcaagaagattgcaagatccatgggatacggcgaggatgatctccctctagtatcatttcagtctgtctccaaaggatactatggagagtgtggtaaaagaggaggttacatggagattactggcttcagtgctccggtaagagagcagatctacaaggtagcttcagtgaacctgtgctccaatatcactggtcaaatccttgcgagcctcgtcatgaatccaccaaaggttggggacgaatcatatgcttcctacaaggcagagaaagatggaatccttcagtctttagctcgccgtgcaaaggcactggaagatgcattcaacacgcttgagggattttcatgtaacaaggctgaaggagcaatgtaccttttccctcagatccatctgccacataaggcaattgaggctgctaaagctgccaagaaagcacctgatgcattctatgcgctccgtctccttgaatcaactggaattgttgtggttcctggatctggatttggccaagttcctggaacatggcacgtcagatgcacgatcctgccgcaggaagataaaatccccgcggtgatcacccgcttcaaggctttccatgaggcgttcatggctgagtaccgtgactgaactgttacagtggctgagtaccaccgtgtagaccgaaacaaaataaagctcccccctctctctgtgtctgtgcgtgtgtgtgaactgatctctgaatggacgaacaatgtactctgttggcgcctttaatggcaattgaggaaaattttgatcaaatttctgttgtctgctgttgtgaaagatgcgggattgtttcctagtgcagcgcaaaatgttgtttccatgtactgaggatattggcagggttgcaagagctgggaaggcatggaaccactggtgttcatgcaggattgctgaagccgataatactgctaaactttcagtgcctcttttgcgggtataattaattagtagaatgtttgtaatgcgagaggaaatccagg

SEQ ID NO: 2625 - DNA, 2211 bp, Zea Mays
tttttcgacaacgccaaacatctggtttcgctgccccgattcgccacgaagccgcactgtgagagagggacgcggcccgttgtcctcggcttgtacgcaatccttccgtcgctgcgaagctgatccctcgtgttcgccatggcccccagcgtcgccgtggaaaacctcaaccccaaggtcttgaaatgtgagtatgcagtccgtggcgagattgtcatccatgctcagcgcttgcagcaacaactacaaacacaaccagggtctcttccttttgatgagatcctgttctgcaacattgggaatcctcaatcccttggtcagcaacctgtgacgttcttcagggaggttcttgctctttgtgatcatccatgcctcttggaaaaagaggaaaccaaatcattgttcagtgctgatgctatttctcgagcaaagcagattcttgcaactattcctggacgggcaacaggtgcatatagtcacagtcagggtatcaaaggattgcgtgatgcaattgctgctgggatcacctcacgtgacggattccctgcaaatgcagatgacattttcattacagacggagcaagtcctggggtcccctattaccttgatgaaaaaactgggtggggtttggagatctctgatcttaagaaacaactcgaagatgctcggtcaaaaggcattgatgttagggccttggtggttatcaatccaggaaatccgactgggcaggtttatactgatcatttctcctcttgttaaagaacatctctgcttatccacaccatactctttataattgatgtaataacatgagatgtgtatttattgtactcctattttaagtcagtgaatactttgtatacttgtattgtctagggaaaggttttggttgaaaaaaataagtgtttttttgtcgttctgcaatgcgaatgaatgtttttcaatgctggtgaccaaaacacaaattttattgaagtggttcatttatttgtaggttcttgctgaagacaaccaatatgatatagtgaaattctgtaaaaatgagggccttgttcttctagctgatgaggtgagtgagaggctgatagctgatgtcagacgaacaacccaaaaaattgtgccacagctgtaactggaatgccattttcattggtaggtatatcaagagaacatctatgttgacaacaagaaatttaactctttcaagaagattgcaagatccatgggatacggcgaggatgatctccctctagtatcatttcagtctgtctccaaaggatactatggagagtgtggtaaaagaggaggttacatggagattactggcttcagtgctccggtaagagagcagatctacaaggtagcttcagtgaacctgtgctccaatatcactggtcaaatccttgcgagcctcgtcatgaatccaccaaaggttggggacgaatcatatgcttcctacaaggcagagaaagatggaatccttcagtctttagctcgccgtgcaaaggcactggaagatgcattcaacacgcttgagggattttcatgtaacaaggctgaaggagcaatgtaccttttccctcagatccatctgccacataaggcaattgaggctgctaaagctgccaagaaagcacctgatgcattctatgcgctccgtctccttgaatcaactggaattgttgtggttcctggatctggatttggccaagttcctggaacatggcacgtcagatgcacgatcctgccgcaggaagataaaatccccgcggtgatcacccgcttcaaggctttccatgaggcgttcatggctgagtaccgtgactgaactgttacagtggctgagtaccaccgtgtagaccgaaacaaaataaagctcccccctctctctgtgtctgtgcgtgtgtgtgaactgatctctgaatggacgaacaatgtactctgttggcgcctttaatggcaattgaggaaaattttgatcaaatttctgttgtctgctgttgtgaaagatgcgggattgtttcctagtgcagcgcaaaatgttgtttccatgtactgaggatattggcagggttgcaagagctgggaaggcatggaaccactggtgttcatgcaggattgctgaagccgataatactgctaaactttcagtgcctcttttgcgggtataattaattagtagaatgtttgtaatgcgagaggaaatccagg

SEQ ID NO: 2626 - DNA, 1855 bp, Zea Mays
tttttcgacaacgccaaacatctggtttcgctgccccgattcgccacgaagccgcactgtgagagagggacgcggcccgttgtcctcggcttgtacgcaatccttccgtcgctgcgaagctgatccctcgtgttcgccatggcccccagcgtcgccgtggaaaacctcaaccccaaggtcttgaaatgtgagtatgcagtccgtggcgagattgtcatccatgctcagcgcttgcagcaacaactacaaacacaaccagggtctcttccttttgatgagatcctgttctgcaacattgggaatcctcaatcccttggtcagcaacctgtgacgttcttcagggaggttcttgctctttgtgatcatccatgcctcttggaaaaagaggaaaccaaatcattgttcagtgctgatgctatttctcgagcaaagcagattcttgcaactattcctggacgggcaacaggtgcatatagtcacagtcagggtatcaaaggattgcgtgatgcaattgctgctgggatcacctcacgtgacggattccctgcaaatgcagatgacattttcattacagacggagcaagtcctggggtcccctattaccttgatgaaaaaactgggtggggtttggagatctctgatcttaagaaacaactcgaagatgctcggtcaaaaggcattgatgttagggccttggtggttatcaatccaggaaatccgactgggttcttgctgaagacaaccaatatgatatagtgaaattctgtaaaaatgagggccttgttcttctagctgatgaggtatatcaagagaacatctatgttgacaacaagaaatttaactctttcaagaagattgcaagatccatgggatacggcgaggatgatctccctctagtatcatttcagtctgtctccaaaggatactatggagagtgtggtaaaagaggaggttacatggagattactggcttcagtgctccggtaagagagcagatctacaaggtagcttcagtgaacctgtgctccaatatcactggtcaaatccttgcgagcctcgtcatgaatccaccaaaggttggggacgaatcatatgcttcctacaaggcagagaaagatggaatccttcagtctttagctcgccgtgcaaaggcactggaagatgcattcaacacgcttgagggattttcatgtaacaaggctgaaggagcaatgtaccttttccctcagatccatctgccacataaggcaattgaggctgctaaagctgccaagaaagcacctgatgcattctatgcgctccgtctccttgaatcaactggaattgttgtggttcctggatctggatttggccaagttcctggaacatggcacgtcagatgcacgatcctgccgcaggaagataaaatccccgcggtgatcacccgcttcaaggctttccatgaggcgttcatggctgagtaccgtgactgaactgttacagtggctgagtaccaccgtgtagaccgaaacaaaataaagctcccccctctctctgtgtctgtgcgtgtgtgtgaactgatctctgaatggacgaacaatgtactctgttggcgcctttaatggcaattgaggaaaattttgatcaaatttctgttgtctgctgttgtgaaagatgcgggattgtttcctagtgcagcgcaaaatgttgtttccatgtactgaggatattggcagggttgcaagagctgggaaggcatggaaccactggtgttcatgcaggattgctgaagccgataatactgctaaactttcagtgcctcttttgcgggtataattaattagtagaatgtttgtaatgcgagaggaaatccagg

SEQ ID NO: 2627 - DNA, 2207 bp, Zea Mays
tttttcgacaacgccaaacatctggtttcgctgccccgattcgccacgaagccgcactgtgagagagggacgcggcccgttgtcctcggcttgtacgcaatccttccgtcgctgcgaagctgatccctcgtgttcgccatggcccccagcgtcgccgtggaaaacctcaaccccaaggtcttgaaatgtgagtatgcagtccgtggcgagattgtcatccatgctcagcgcttgcagcaacaactacaaacacaaccagggtctcttccttttgatgagatcctgttctgcaacattgggaatcctcaatcccttggtcagcaacctgtgacgttcttcagggaggttcttgctctttgtgatcatccatgcctcttggaaaaagaggaaaccaaatcattgttcagattcttgcaactattcctggacgggcaacaggtgcatatagtcacagtcagggtatcaaaggattgcgtgatgcaattgctgctgggatcacctcacgtgacggattccctgcaaatgcagatgacattttcattacagacggagcaagtcctggggtccacatgatgatgcaattactgattaggaatgagaaagatggcattctgtgcccaattcctcagtaccccttgtactcggcctccatagctcttcatggtggagctcttgtcccctattaccttgatgaaaaaactgggtggggtttggagatctctgatcttaagaaacaactcgaagatgctcggtcaaaaggcattgatgttagggccttggtggttatcaatccaggaaatccgactgggcaggtttatactgatcatttctcctcttgttaaagaacatctctgcttatccacaccatactctttataattgatgtaataacatgagatgtgtatttattgtactcctattttaagtcagtgaatactttgtatacttgtattgtctagggaaaggttttggttgaaaaaaataagtgtttttttgtcgttctgcaatgcgaatgaatgtttttcaatgctggtgaccaaaacacaaattttattgaagtggttcatttatttgtaggttcttgctgaagacaaccaatatgatatagtgaaattctgtaaaaatgagggccttgttcttctagctgatgaggtatatcaagagaacatctatgttgacaacaagaaatttaactctttcaagaagattgcaagatccatgggatacggcgaggatgatctccctctagtatcatttcagtctgtctccaaaggatactatggagagtgtggtaaaagaggaggttacatggagattactggcttcagtgctccggtaagagagcagatctacaaggtagcttcagtgaacctgtgctccaatatcactggtcaaatccttgcgagcctcgtcatgaatccaccaaaggttggggacgaatcatatgcttcctacaaggcagagaaagatggaatccttcagtctttagctcgccgtgcaaaggcactggaagatgcattcaacacgcttgagggattttcatgtaacaaggctgaaggagcaatgtaccttttccctcagatccatctgccacataaggcaattgaggctgctaaagctgccaagaaagcacctgatgcattctatgcgctccgtctccttgaatcaactggaattgttgtggttcctggatctggatttggccaagttcctggaacatggcacgtcagatgcacgatcctgccgcaggaagataaaatccccgcggtgatcacccgcttcaaggctttccatgaggcgttcatggctgagtaccgtgactgaactgttacagtggctgagtaccaccgtgtagaccgaaacaaaataaagctcccccctctctctgtgtctgtgcgtgtgtgtgaactgatctctgaatggacgaacaatgtactctgttggcgcctttaatggcaattgaggaaaattttgatcaaatttctgttgtctgctgttgtgaaagatgcgggattgtttcctagtgcagcgcaaaatgttgtttccatgtactgaggatattggcagggttgcaagagctgggaaggcatggaaccactggtgttcatgcaggattgctgaagccgataatactgctaaactttcagtgcctcttttgcgggtataattaattagtagaatgtttgtaatgcgagaggaaatccagg

SEQ ID NO: 2628 - DNA, 1970 bp, Zea Mays
tttttcgacaacgccaaacatctggtttcgctgccccgattcgccacgaagccgcactgtgagagagggacgcggcccgttgtcctcggcttgtacgcaatccttccgtcgctgcgaagctgatccctcgtgttcgccatggcccccagcgtcgccgtggaaaacctcaaccccaaggtcttgaaatgtgagtatgcagtccgtggcgagattgtcatccatgctcagcgcttgcagcaacaactacaaacacaaccagggtctcttccttttgatgagatcctgttctgcaacattgggaatcctcaatcccttggtcagcaacctgtgacgttcttcagggaggttcttgctctttgtgatcatccatgcctcttggaaaaagaggaaaccaaatcattgttcagtgctgatgctatttctcgagcaaagcagattcttgcaactattcctggacgggcaacaggtgcatatagtcacagtcagggtatcaaaggattgcgtgatgcaattgctgctgggatcacctcacgtgacggattccctgcaaatgcagatgacattttcattacagacggagcaagtcctggggtccacatgatgatgcaattactgattaggaatgagaaagatggcattctgtgcccaattcctcagtaccccttgtactcggcctccatagctcttcatggtggagctcttgtcccctattaccttgatgaaaaaactgggtggggtttggagatctctgatcttaagaaacaactcgaagatgctcggtcaaaaggcattgatgttagggccttggtggttatcaatccaggaaatccgactgggcaggttcttgctgaagacaaccaatatgatatagtgaaattctgtaaaaatgagggccttgttcttctagctgatgaggtatatcaagagaacatctatgttgacaacaagaaatttaactctttcaagaagattgcaagatccatgggatacggcgaggatgatctccctctagtatcatttcagtctgtctccaaaggatactatggagagtgtggtaaaagaggaggttacatggagattactggcttcagtgctccggtaagagagcagatctacaaggtagcttcagtgaacctgtgctccaatatcactggtcaaatccttgcgagcctcgtcatgaatccaccaaaggttggggacgaatcatatgcttcctacaaggcagagaaagatggaatccttcagtctttagctcgccgtgcaaaggcactggaagatgcattcaacacgcttgagggattttcatgtaacaaggctgaaggagcaatgtaccttttccctcagatccatctgccacataaggcaattgaggctgctaaagctgccaagaaagcacctgatgcattctatgcgctccgtctccttgaatcaactggaattgttgtggttcctggatctggatttggccaagttcctggaacatggcacgtcagatgcacgatcctgccgcaggaagataaaatccccgcggtgatcacccgcttcaaggctttccatgaggcgttcatggctgagtaccgtgactgaactgttacagtggctgagtaccaccgtgtagaccgaaacaaaataaagctcccccctctctctgtgtctgtgcgtgtgtgtgaactgatctctgaatggacgaacaatgtactctgttggcgcctttaatggcaattgaggaaaattttgatcaaatttctgttgtctgctgttgtgaaagatgcgggattgtttcctagtgcagcgcaaaatgttgtttccatgtactgaggatattggcagggttgcaagagctgggaaggcatggaaccactggtgttcatgcaggattgctgaagccgataatactgctaaactttcagtgcctcttttgcgggtataattaattagtagaatgtttgtaatgcgagaggaaatccagg

SEQ ID NO: 2629 - DNA, 781 bp, Zea Mays
agccgccatccaggctccagccgttcgccaggaaggcagaaaaccgcagctgcccaccaggcgccagcgcccagcagccgcaagctccgccgccgttcgcccaggcgcccagccagccggcggttctcttccaccgttcgaccagccgccagcgtccagcggcttgcgggctgcggccccgccgttcgcccagcggccccgccgtcgaggccaggactcaggagcccaggacccagccaccgagcggcctttaaacctcacagaaatattgggtgaagcaaatgagaaggttttttcacccactttcaagaggctctggcactaatgctaataataatgtgaataacacaccaattgttggagggacgttcaatccggatgacatagttgcagatcccgctttaaggaggcaaatttatgaatatgataaagatgtccaagaccaagtgagaagggcatatgttctaaatggtccatgccaaccaaagggtttagatttccctcgtagacagtatggacaaagtttaaggccttttaaagaggaatggtatgacaagtatgattggttggagtatagtgaatcaaaagatgcagtgtattgcttttattgctttctttttaagcaagcagtgaagggtgataaatatgaagctttcactaaagttgggtataataattggaaagatgcagttgaaaggttgaaatcacatgttggtggtgttaacaagaacatcctaggagaaataggagatagaaacttctctattcttattgatgaatc

SEQ ID NO: 2630 - DNA, 1493 bp, Zea Mays
accactaacagaaatagatgtggagttatcaatagctgccacacctcgtatgcgctgcgctcccaaaggagcacggcctcggaggcacactccggtcgcccttgcagagcgcggacaccagctccaacttccgctccgaccagctctgctatccacgctgctaaagactccagttgacgtgagagctcgcggagattggcatacctgctctgatcggacaacgcgagacgagaagtggaagatgaccttgagcgtttgcagcgccggcttgaccaggccctcgcccgcccacttcgggaagcaccatccttccacaggctcgtcagttatggccgggacaggtattgctcgtgcacctcagtcacaaaacacatcctagtcacaaaacacatcctgcaccctcagaacggtcgacgaggaggatggcgtgcacgattcgtcgtctcgccgaacctgtgtgactagggatagcttgggcattgccattcatgctctagttgaagtctcataggtgtatgttgtcttttcaaattcatcctacatcctacgagactgaaattgatttatcaggttcgtgttttgagttttgccacgtctcctctctaaatggttcaatcggttttgttttggcccattaggacttaatagaaacctaaacattgattaagcccttaagagtatccatgaggagcgaggtatatagcaatgtgcccttgccatgggtggacttacgttggccatgagggtggttgaaagtcgccttgaggggggcgatgaattggcaaaacctgaaatttacaaactttaaacacacactaaggccgggtttagcgttagaattaaatcggagtacataagatagttctccttgcttggagttgctcaatcaatgtgggcaagggaacttttagagagaggaaagaagggaaacaaatcaagtgaagatcaacaagtgaacacggtgatttgtttaccgaggttcggttccaaagaacctagtccccgttgaggaggccacaaaggccaggtctattccaaccctttctctctctcagtcggtcacacagaccggtcgatgtttctccttaatcacttgggtcactaagactccgcaaggatcaccacacacttaggtgtctcttgctagctttacaaagcacttaaagaataagaatgagaaggagaaagcaatccaagcaacaagagcaacaaaagaacacaaatgatcatctctcaagtttctaagcaattgagttgttttttggagcttgaagtgaattgaatgctttgattgtgtctttgtagtgtttgcctttgctcttgtattgaatgagaagtgtaggaggcttggatagcttgaatgaaggtggttggggggtatttatagcaccaaccactattccagccgttgctgtcgatggccacaccggacagtccggtggtgcaccggacaggtcactgttcagtgtccgatgtgcgccacgtcagctgcc

SEQ ID NO: 2631 - DNA, 1946 bp, Zea Mays
atttgagacagttatcataaactagatatggaggctagcgatgacggtcgcctcgtcggaggcgtttgactgggcatctagggttgaggaagacaactgttaggtggcgacaaccttctgttctaggttggcagcgttggcctgcttctcttcaaggagctagcgggcgacctacacaggtttgcgtgcgccgacaatcttctttgtagtgttgtcggtgatgattaggtcattgagccactacctaaaagcagtgacgtcgaagtccggcaacatgacgaggaggcggtggcctggaggggctacaactaggggacgacgtctgttggtgcggtggctagagaggcgatgacctaagtagggccgatggagcgaaagcgagtgaaaaacggatcgaggctttgattaccatgttagacaaatatatatgcggcaacggaagattatgtcttgcattgagcccttaggtggtttatatagacgtacatgacacaggagataggcaacccaccattacatttgacagtctatgaaacacaatatctaccaaatatactctaacacatgccaatttactacacactatatcaaggctaccaaatatggtattgtgggaacccaggaacagctatcccgcttactcgtcttctgctccttggcgcctccgccaacaccctcagccccacgccggcggccactccggtgtcggcggcaacccccaaggtcgcccccccccccgtcctaggaggcgccatactccatcctggttccgtcccctctgccgctgggaaggtccaaggcacaaaggtggaaggactctagccctgttctccttggcgatcggaggcccaagcccccctcctatcaagccatgattcatgctccttcggtggcgcatctccttcccacgatgaggccttgaacaccgcgagtcctacgacgccttctgatgtgctagacgaggggactggctccaattggcaagtggttgtgaggcgcaaggatcgttgtcagtgctctcatccttctcggctccgttggtcagtcctggtggatttgcatgggaggtgtttcaactgtttttcaacctcccatagggccgccctctactgtcgttgtccacgttgtttctgctgtctgggtcatcgcgtggggagcgaccgcaaggggtccatgacttgcgatgaaggggagaacaacggtggcgtccatataaaagtggaggagaacacacggcgtagcgcacgagagacagggaggtgagcgccccggaaagctgagcgcgtgcacaggagccggagtggggtgaggaacagggagaagcttgccgagctagaatagcgagggcagtgcaggtccaacacgagagcatgtgcgagatgacgacagcacaggaaggccgcacgggggggggggatcagcaccgagggtggaggtcgcatgccgggaggggccaggcaggccgcgccgtgcagatgtggcggcagaggtctggtgggccgtgccgcgcgggcaacggcggtggtccacacgtggaagcctgtgttttctcccgacaattctggttccagcttcttcagaaggtcggtctccagaagctgtgccacgaacctggaattgcttcctttggtgattggtggtggcatgctagtgaggcagtatctaggctctcaaggcatggtctgaattctatgattattttgggagcttggtccctctggaaacatcacaatagatgttatgcaaccgaaacatacaaattggcagatttgaacgcggaggctcaagaatctggagatgatgaagatgataatgtgtgggaagagggttaatgctgaaaagataactggcgacccctgctccctctcgaattttgaactgtctgcaggctgccatcgaaacctcgcatcgttgtcagattgcttccttttgtcatgagaccgtct

SEQ ID NO: 2632 - DNA, 1467 bp, Zea Mays
gttccaccactatgatttgcattgatctttttttttctctccgtctctcagaaaactcaccgcatctccatctataaatgagcccctcttccaagcctcaattcccttttcccctcctccctcgctaaggttcctgtgcagcagccctgttgcatgccatcttcctagcttagctagcaagaatctcttgccctccttgcttcctgatcctgcgcccttggatcaccttccatgtgttcttggccttgttctctcgtgcatctgaccatcagttcttaagagtatatttccattggaagcaaattttagggtttcctggaagagactctgccaacttttttttttttttgccctggtgcatctgcatcaacttgttcgtttctctctcgtaaaaaaaactcactgtcgtaaacgttttcgtcaattgatccatgatagactaacgtggtgtagatgtcacaaatcctctccgaggtgagtcaccgctgcagatttatgatcaactcaacgctccggcgaggcacccatcttgttctctctttctccgttgtgttcctctattggttctatgtgttctcagtaagatcctaaccaccaatacaacatactagtatcatatccttggaaattataagcctctacatacaacaacttaattagtcagaggaaagctttcaagtctagatataaccccaagtatcttttgaggatgaccctgtccggtggggcctcgtctgggtctagtcatgggacccgtagcttggggtcagagggtgacatggtgcaccggatggagctcatgcgcaagagaaggatggagtcaaaccgggagtccgcgaagcgatcgaggcagcggaagcagcaacatctcgacgacctcaactcgcaggtggacaagttgaggacgacgaaacagcaactcatggtagcactgaacatgaccagccagaactacgcggcagcagcagctcagaactcggtgctgcgcacccagatgatggagctgcagagcaggctctgcgcactgcgtgagatcatatgccatatgtacgcaacaacaacgaatgtccatccagcaactgtcatgggcggtgctgctacctaccatacttttggcgaaactgcgtggaactctggcagctgcagcatgcaaatggtcgaccacttgttgcaccagtgcttctaggctctagctacgtacaaggaggtagaggccaagacaaacaaaggcatgcatatatatgtattccatgttttgtaagtagtgtgtacgtcatttgatttaatgtataaaagggtttgtgaaattaattgtgcacatggatgtgggttaaagccaacattattgttgttgcctttaatttgctcatgcgtgaaaaaacacatggcaactggcaacttgtgttttgttcacaactattgctaactacaatattaatgatgatgatcaagtatcctatataaaaa

SEQ ID NO: 2633 - DNA, 729 bp, Zea Mays
atccactacgttgcacggcggtagaggaacatgtggatatcacacgcacgcgcctacgcttattagccctcattcgaagtcgacggcacccgtcttctctccgcactcgaaaccccatccttgactagctccgatctggtacgagatggccggcaagatgaaggagttagacggcgccagccctgccaagatcttcattggcgggctctccaaggatacaagcatgagtacattcaaagaacattttgggaagtatggggatataattgatgctgtcataatgaaggaccgctacacacaaaagcccagaggctttggctttattacttttgctgatcccactgttgttgacagagtgattgaggatgaacatgttatcaatggaaaaccggttgaaattaagagaacgatccctaagggagctgctcctttgaaagatttcaagacgaagaagatttttgttggtggattaccctcagctctaaaagaagatgaattcaaggaattcttttccaagtttgggaaggttgtggagcatgaaatcatccgtgaccatgcaaccaaccggtcacgtggatttggttttatagtctttgatgcagaaaaagcagtagatgatttattacataagaagggcaatatgattgatctaaatggttctcagttgctttaattttgctcttatatggcatgttattctcactccaatcatgggagtacaaatctgaa

SEQ ID NO: 2634 - DNA, 1623 bp, Zea Mays
gcacgcgcctacgcttattagccctcattcgaagtcgacggcacccgtcttctctccgcactcgaaaccccatccttgactagctccgatctggtacgagatggccggcaagatgaaggagttagacggcgccagccctgccaagatcttcattggcgggctctccaaggatacaagcatgagtacattcaaagaacattttgggaaagtgattgaggatgaacatgttatcaatggaaaaccggttgaaattaagagaacgatccctaagggagctgctcctttgaaagatttcaagacgaagaagatttttgttggtggattaccctcagctctaaaagaagatgaattcaaggaattcttttccaagtttgggaaggttgtggagcatgaaatcatccgtgaccatgcaaccaaccggtcacgtggatttggttttatagtctttgatgcagaaaaagcagtagatgatttattacataagaagggcaatatgattgatctaaatggttctcaggtggagatcaagaaggcagaaccaaagaaaccctctaaccaaccacctcgttcacttgatagtgagcctaggggccgtccatatgcagacagttatgatggatttggcagctcttacaattatggtggtagttttggtccctatagatcacctcgaagttttggcgctaggcctagcagctacagtagtgcttatggtcctggtgattatggtagtggctatgctacttatggtggagcattagtaggataccgtgaaccttccctttattctagtcgctatggtagcacttatggaggcagccttggtggtgggtatggtggtgttagttatgatggtggattagctggtgcatatgagcgtgatgctgggggctatggtggttctagctatggtcgtagttatgactcttcctgggctaatactggtgatgggtttggcaccggtggactctatggtgctaggacaggctatggtggcagtggcggcagtggtgctgctggtcgttaccatccatatggaagatagaaaatctccagtgctgctgtttgctagagaagcttgcagaagatgaattctagatgtgtgctcaagagatcatctgcatctaaaagatgcactgaagttcaatatgctcagttttctgtattaggaagtactgttagatcaacttgtagaaatttaaacctttgttttggtatttggaattggaatttaagcatatttgataagcgtatgcacttttatagatagaaaatctagtgacccgtcaaaactagctgctagtacaagcatgagttattctttgttagtatagtttgctttgtctttacgaatattatggagtggtcaaagttaacctaagggccgaacgcagtttctttacatgtagttacagaagtgttatcttgtttctttatcttgttccgcgtaggttttgtttggagttcgatggattaagttgtacttagaactagattggtctttttatagtggttcgcatgctttcaccgtttaacatgccgatgttgttttccccattcattatgtaatcggtgatcttgatatcatcacgctggtaattacatcttaattacatttgggta

SEQ ID NO: 2635 - DNA, 1448 bp, Zea Mays
ggtggagttgatcctttcattaaatttgtgagagtgattgaggatgaacatgttatcaatggaaaaccggttgaaattaagagaacgatccctaagggagctgctcctttgaaagatttcaagacgaagaagatttttgttggtggattaccctcagctctaaaagaagatgaattcaaggaattcttttccaagtttgggaaggttgtggagcatgaaatcatccgtgaccatgcaaccaaccggtcacgtggatttggttttatagtctttgatgcagaaaaagcagtagatgatttattacataagaagggcaatatgattgatctaaatggttctcaggtggagatcaagaaggcagaaccaaagaaaccctctaaccaaccacctcgttcacttgatagtgagcctaggggccgtccatatgcagacagttatgatggatttggcagctcttacaattatggtggtagttttggtccctatagatcacctcgaagttttggcgctaggcctagcagctacagtagtgcttatggtcctggtgattatggtagtggctatgctacttatggtggagcattagtaggataccgtgaaccttccctttattctagtcgctatggtagcacttatggaggcagccttggtggtgggtatggtggtgttagttatgatggtggattagctggtgcatatgagcgtgatgctgggggctatggtggttctagctatggtcgtagttatgactcttcctgggctaatactggtgatgggtttggcaccggtggactctatggtgctaggacaggctatggtggcagtggcggcagtggtgctgctggtcgttaccatccatatggaagatagaaaatctccagtgctgctgtttgctagagaagcttgcagaagatgaattctagatgtgtgctcaagagatcatctgcatctaaaagatgcactgaagttcaatatgctcagttttctgtattaggaagtactgttagatcaacttgtagaaatttaaacctttgttttggtatttggaattggaatttaagcatatttgataagcgtatgcacttttatagatagaaaatctagtgacccgtcaaaactagctgctagtacaagcatgagttattctttgttagtatagtttgctttgtctttacgaatattatggagtggtcaaagttaacctaagggccgaacgcagtttctttacatgtagttacagaagtgttatcttgtttctttatcttgttccgcgtaggttttgtttggagttcgatggattaagttgtacttagaactagattggtctttttatagtggttcgcatgctttcaccgtttaacatgccgatgttgttttccccattcattatgtaatcggtgatcttgatatcatcacgctggtaattacatcttaattacatttgggta

SEQ ID NO: 2636 - DNA, 1554 bp, Zea Mays
aaatttgtgaggtacattcaaagaacattttgggaagtatggggatataattgatgctgtcataatgaaggaccgctacacacaaaagcccagaggctttggctttattacttttgctgatcccactgttgttgacagagtgattgaggatgaacatgttatcaatggaaaaccggttgaaattaagagaacgatccctaagggagctgctcctttgaaagatttcaagacgaagaagatttttgttggtggattaccctcagctctaaaagaagatgaattcaaggaattcttttccaagtttgggaaggttgtggagcatgaaatcatccgtgaccatgcaaccaaccggtcacgtggatttggttttatagtctttgatgcagaaaaagcagtagatgatttattacataagaagggcaatatgattgatctaaatggttctcaggtggagatcaagaaggcagaaccaaagaaaccctctaaccaaccacctcgttcacttgatagtgagcctaggggccgtccatatgcagacagttatgatggatttggcagctcttacaattatggtggtagttttggtccctatagatcacctcgaagttttggcgctaggcctagcagctacagtagtgcttatggtcctggtgattatggtagtggctatgctacttatggtggagcattagtaggataccgtgaaccttccctttattctagtcgctatggtagcacttatggaggcagccttggtggtgggtatggtggtgttagttatgatggtggattagctggtgcatatgagcgtgatgctgggggctatggtggttctagctatggtcgtagttatgactcttcctgggctaatactggtgatgggtttggcaccggtggactctatggtgctaggacaggctatggtggcagtggcggcagtggtgctgctggtcgttaccatccatatggaagatagaaaatctccagtgctgctgtttgctagagaagcttgcagaagatgaattctagatgtgtgctcaagagatcatctgcatctaaaagatgcactgaagttcaatatgctcagttttctgtattaggaagtactgttagatcaacttgtagaaatttaaacctttgttttggtatttggaattggaatttaagcatatttgataagcgtatgcacttttatagatagaaaatctagtgacccgtcaaaactagctgctagtacaagcatgagttattctttgttagtatagtttgctttgtctttacgaatattatggagtggtcaaagttaacctaagggccgaacgcagtttctttacatgtagttacagaagtgttatcttgtttctttatcttgttccgcgtaggttttgtttggagttcgatggattaagttgtacttagaactagattggtctttttatagtggttcgcatgctttcaccgtttaacatgccgatgttgttttccccattcattatgtaatcggtgatcttgatatcatcacgctggtaattacatcttaattacatttgggta

SEQ ID NO: 2637 - DNA, 2620 bp, Zea Mays
atggaagcctctccgatgcgtggccacgtgcagtccaagacactagcttctccacgtcgcctggagcagcaggcgcccagctccttgcatcaagcaagcccggcggctagttccctctcccagccgagctcctccccttccagtagatgagcacgacgccctccttcatctccatcccccagctgctcagctcctagctaggtgccgctcctccctactcctacttcattcggtcgaccaccgccacgtcctggtggccgggcatccttcctcactgttggccgtgtgcagctccttccctgcctgctcgagctcgccctcagctctcggctatggagttcgcccctgctcctctgcacgcctcgtccacgcatgcctcctggccgcgatcggctctggcccaggccgccgtcgcgcccggagttttggcacgtcttcctgctcagaccaatttcgcacctcaccatccatggagctgctcgccgaccaccgcccacagtcgtgcctaggtccgcccgttcttgccaaattctccctcagtcatgctgttggtcgccttcctgctccccacgccaacgtcctgtgcatcgccgccggagttcgacttgctgcttgtgcgagctgtatcgagctcgtccgaccatggcgctcactccccagccgttctcttgctcctcgcaccgtgattgccatgttcactagcaaccgcagtttcgtcgtgtcgcaaaccgtgagctgggactccaccgtcttcggccgtcgactagctcgccaaggcgtttttcacattgaagcatagttgtcgtgccctgcgtcctcgccgtgtccgtaaagccgttgtggagttgttgtcgttcgcctccacgccatgtgaggcagcgtcgttgatctcttcatggtgctcgtcgtcgtctcctcatcgccatgccgaacgtctcagaccccgccaacctgtcgccggagaagcacagtgcagtacgatgccccattaggtgttcggtgttatgtgtgaaccagaagttattgccaatatcgcggtgttcaagttgagtttattttatcggtgagttgatcccctacttctattattttgttttaatgattggatgtgttgcattaaattactggtcgtattgatagtcattatatgctatttttatttaaaaatgggctattaatgtttatgtaatttctggtaataattattaattagacgtttttatatgtatatggtaaagtttaggtggcaatgtaatttagacgaggagtgctttggtggtggatacaaattattagggtaatttaattgatttaatatttgcgatacgcttgtgatcgcaattgtggagtagacacatcgtgtaaagctcgggtttaatacgagttaggcgaaggaggttttggtagacaagtatatgatgttggtgaatcgatgatgttaaagataggtttaatattaaatcagctagctgacatgttttgttaggttagttgtgttagattcgactaatcttgacaagcatgattgttgtacttagtcatctgtcgttggccagtgtacataagtactctagatatttaagtcactgagaaattagttttaccgaacactatgtcatctattaatgttgtatccgttagagtaaatattgtgatgtttgatttagttaagagtgtaattcaaattaattaagacacacagtttaaagagttaattagattgttgctatacttattttaagtcgttggtattaaataatgatgagtccaagttttattagacttccgatgaaatattttactaaggatgatagtgcgggttaaataatttattcttgctagatttcggaattagatccaatcagaaaggaggaacatgagtgttgttcttggtgtgtatagtttgctgtttcgtgatgtttgtgttagatttggttagtcttgaaaaacatgatcattgtacttggtcatatgtcgatagctagcgtttgcttattaaatgccatgatgccttaccagtaagtgtttgattctttactatgtaacatcgtaatattatcttgcgatattcgtcttgatgttcatacatgtgcatcgtgcatctcatgaggtacgctagttgatcacgtgatgtgaagaacaagaactggattaatctcaaggtgatgcggatgatgatcctggagatggataatctgaacgagtgccaagaaaaagaatggtcgccaagtggacgtcatctaacaaacactaacctagtgttatcccaggcaagccccggtgcatttgccacctccttgctgttttaaaatctttatcaccttgtttgatgtattaggtgataggagttgtgtgctaaaccgttgatgcatttccttccttgattaaacaaccctaatacccgttttatgaaaatttagtgatgcttagccctgcttattaatttaggattgtttttaaaagatgatgtgtaacacgggatatgggagtttgtgaaatacaatgacttgtgatgatgaagccattgtggccgtgatgatttcatcattcaagtacgatacctctctcaggtatcaagttttgggaaataatatgtaatgtagaccagacgttgagcagg

SEQ ID NO: 2638 - DNA, 2020 bp, Zea Mays
ccaccgcctcgcatccaaacaactttacccaaccgccgccctcaatctgcactcatccactacattcttctcttcctccacacgaccccacccaaccaagccgcctcgaacagtttccagaatactacatcccaccaacatggcgtcgccgccgccgggtgccgggcttactgagtatgagcgccgccgcgaggagaacatccgccgcaacgagactatcctcgccgcgctccgtcgcaaggccgccgagctctctgcctccttcatccccacggcttcctctcccaagcgccccaagaagcagcatcccctcgcgagaacgaccagccccgtcgtcctccgccgctccttgcgcacccgcggcatccccgccggcgaatcctccgcttgtgacggcgctaacacctcgctaaatacgccgccgtccccgacgaagccccgcagcacacggttctcatcctccctcgcctcggccctgcgagacgccaccgccgcagagccgtcgccatcggtcaaaagctggatcggtgcgcctgacgggttcgacccctgtagggagctggtgctacggcccgtggacgtgaggaaggtggtgccgggccggatattgtccttgcgaatcctgccgctgtccgaccggactgtggtggttgccgggaacgtgcacgggcatattgggttctgggatgtggatcgtctcgtggaggatgaggatggtgatggtgtagacggggtattcgagtattttcctcacagggggtctgtagggggcattgtgatgcaccccgctatgttgcataagatttacagctctagttatcatggtgaaatttgtctcatggatgttgagaaagagaactttaatacagtctacttgtgtgactatcccattttctcgctttgtcaagcaccaaatagtccaagctctctatattttgccgagggaaatgaattaaaactttttgatgaaaggatgggcaaggtaccaactacatggagtttacatgatcatagaatcaactcgatagattttcgtccagagaacccatatatatttgccacaagctcgacagatcgaacagtttgcatatgggacataagaaggatgaaaaagaagggttctgagagcttaaaagttttggaatacaacaaatccattcagtcagcttatttctcacccagtggaaatatgcttgcaacaaccagccttgatgacactgtccgaatttttgacatcgataacttcgatgattcatgtactcttaagcatgataacaggacaggcagatggctgtccacattcaaggcaatctggagctggaatgacagcaatctatttgttgggagcatgaaaagagcaatagatgttatctcagttgatcgcagacagaagagcatctcagcttcgtacatggcatttcttgagagtgaacacatgacagccatcccatgccgctttacgctgcacccgtgcaaagttggccatctggctggtgcaagctctagtggtaaggtgtttctctggaccagagcttgaagcaggctgatcatcgactgactgggatgtcctcggcctgttgctggccctgtcctgcccaagttcctgaccacggagatcctcatctcgcggttctgtactaatgatcgttagcattatcctgcttttaatgtataagggctagtttgagaactctattttttcaagggatttctgtttttttaatagaaaatgaactaatttctattggaaaaataaaaaaaatcccttaaaaaaatgaggtggctaaactagccctaatagtttgcactgcataaccatttggtatcgtgatgcatgtggttgttcggtccagtagaattagaaattagttttctaaaccaatgttagatcaggattgttatgaaaaatgtttgataaggttgttaatttgctatgtttgaggttatatattaggttgtttggataacacgagcaaaaacgagtacatcgtctctaaacaacaatgcgttttaattcgat

SEQ ID NO: 2639 - DNA, 1867 bp, Zea Mays
atccactacattcttctcttcctccacacgaccccacccaaccaagccgcctcgaacagtttccagaatactacatcccaccaacatggcgtcgccgccgccgggtgccgggcttactgagtatgagcgccgccgcgaggagaacatccgccgcaacgagactatcctcgccgcgctccgtcgcaaggccgccgagctctctgcctccttcatccccacggcttcctctcccaagcgccccaagaagcagcatcccctcgcgagaacgaccagccccgtcgtcctccgccgctccttgcgcacccgcggcatccccgccggcgaatcctccgcttgtgacggcgctaacacctcgctaaatacgccgccgtccccgacgaagccccgcagcacacggttctcatcctccctcgcctcggccctgcgagacgccaccgccgcagagccgtcgccatcggtcaaaagctggatcggtgcgcctgacgggttcgacccctgtagggagctggtgctacggcccgtggacgtgaggaaggtggtgccgggccggatattgtccttgcgaatcctgccgctgtccgaccggactgtggtggttgccgggaacgtgcacgggcatattgggttctgggatgtggatcgtctcgtggaggatgaggatggtgatggtgtagacggggtattcgagtattttcctcacagggggtctgtagggggcattgtgatgcaccccgctatgttgcataagatttacagctctagttatcatggtgaaatttgtctcatggatgttgagaaagagaactttaatacagtctacttgtgtgactatcccattttctcgctttgtcaagcaccaaatagtccaagctctctatattttgccgagggaaatgaattaaaactttttgatgaaaggatgggcaaggtaccaactacatggagtttacatgatcatagaatcaactcgatagattttcgtccagagaacccatatatatttgccacaagctcgacagatcgaacagtttgcatatgggacataagaaggatgaaaaagaagggttctgagagcttaaaagttttggaatacaacaaatccattcagtcagcttatttctcacccagtggaaatatgcttgcaacaaccagggcaatctggagctggaatgacagcaatctatttgttgggagcatgaaaagagcaatagatgttatctcagttgatcgcagacagaagagcatctcagcttcgtacatggcatttcttgagagtgaacacatgacagccatcccatgccgctttacgctgcacccgtgcaaagttggccatctggctggtgcaagctctagtggtaaggtgtttctctggaccagagcttgaagcaggctgatcatcgactgactgggatgtcctcggcctgttgctggccctgtcctgcccaagttcctgaccacggagatcctcatctcgcggttctgtactaatgatcgttagcattatcctgcttttaatgtataagggctagtttgagaactctattttttcaagggatttctgtttttttaatagaaaatgaactaatttctattggaaaaataaaaaaaatcccttaaaaaaatgaggtggctaaactagccctaatagtttgcactgcataaccatttggtatcgtgatgcatgtggttgttcggtccagtagaattagaaattagttttctaaaccaatgttagatcaggattgttatgaaaaatgtttgataaggttgttaatttgctatgtttgaggttatatattaggttgtttggataacacgagcaaaaacgagtacatcgtctctaaacaacaatgcgttttaattcgat

SEQ ID NO: 2640 - DNA, 942 bp, Zea Mays
taattgtcttgctgaagttgctaaagaatgaggggatgcatatgttttcttatgcgtgtctattaatgtggtccaccgtagtttctgtgcccttagcacctcaacttgtctcatgcaagcactcacagccttgatgacactgtccgaatttttgacatcgataacttcgatgattcatgtactcttaagcatgataacaggacaggcagatggctgtccacattcaaggcaatctggagctggaatgacagcaatctatttgttgggagcatgaaaagagcaatagatgttatctcagttgatcgcagacagaagagcatctcagcttcgtacatggcatttcttgagagtgaacacatgacagccatcccatgccgctttacgctgcacccgtgcaaagttggccatctggctggtgcaagctctagtggtaaggtgtttctctggaccagagcttgaagcaggctgatcatcgactgactgggatgtcctcggcctgttgctggccctgtcctgcccaagttcctgaccacggagatcctcatctcgcggttctgtactaatgatcgttagcattatcctgcttttaatgtataagggctagtttgagaactctattttttcaagggatttctgtttttttaatagaaaatgaactaatttctattggaaaaataaaaaaaatcccttaaaaaaatgaggtggctaaactagccctaatagtttgcactgcataaccatttggtatcgtgatgcatgtggttgttcggtccagtagaattagaaattagttttctaaaccaatgttagatcaggattgttatgaaaaatgtttgataaggttgttaatttgctatgtttgaggttatatattaggttgtttggataacacgagcaaaaacgagtacatcgtctctaaacaacaatgcgttttaattcgat

SEQ ID NO: 2641 - DNA, 2595 bp, Zea Mays
caggctaccaaaccgccgctcgcgtcggtcacgccaggcctgacgcgagcacatcgcaatcctagccaccaaaacaatgcccggcggcaagcgccgccgcgcacgcaaccccaccgccggcgggcctcagcgtagcgccggcgcaggtcgtcgtcgtcccgtccccgagctcccgtcttttgtctcccccgcttctgtcgccgccgccttctcccccgcctcgggcggccgcagccgcgggcggtgcgcccggcgttgcggcgcctactccgatggcgagtcctcccacgccgtcccctttagctatccttccctccgctcctgctccgcttatccggagcgtgatcaggcgcaggcactggaggtgaccatcgacaccgcaccctgcgccgacccagccgcttccgtcccgatgtactcgtacggccccgccgtgctcggtgagaccgggcttgtgctgagtgcggacgaggaggaggcctgtgatagagggctgcatctcgggttaggattccgggatggaggacacgatgagatggagctcaaattgaaagagctgacagaggaagatgtctccttcaagacgcccaagcggaagcaggagcagagggcgaaggccaacccaggatttttgttgattgggggagtcaggatttacacggaggacatctcatcatcagaatcggatcggatgagcagctctgatgtggatttagagcccaactcaggtgatggggagagatttgagaatgatgatggtgacagtgacgaggaagataggcaaggcgaggagagagattcaatatctgatagcgagtcattaggatcggaatcagatgaagatttgagcaccggggattcttcttcagttgacaatgaggttgttgctgattacatggagggtattggtgggagtgacgagctgttgagcagtaagtggatcactagtatgaatttgggtgatgcagatactatagagcagatgtatacaaatgacaatgatgggtttgtgaagaaggggaaggaaaagcttgagggttatgcactaatgactgcatccgagcagtatgggatgaagaggcggaactcccttgagcagcggaagggaaaaggaatggtttgtgacagggatttgtcaagcatgcaagtgatggaccaggaagatatgttcatggtgaacaatgtctggatgccaaacaggtcaagaaaggggatgaagacaggatcatcatcctctcagctctcacagtcgtggcctaaagatgataggaaaagcaaaaactatcagagcaggccaggtgaaaagaagcagcataggaaggaactcattgcaaagaagcgtcaacaacgagctctaagcagaggagttgacttagggcaaattaatagtaaattgaggaaaatggttgtggatcaggttgacatgttatgttttcatccaatgcactctcgagactgttctcaggttcaaggctgtgcttggtacgacaagagtaacaacaacacgagctgatgtacaacgccttgcatctatttatcaattgaagagcgggtgtcaaggttctggcaagaagagatttgtaactgtgacattgactgggcactcttccttgccatctgcagatggccaagttcgacttgaaaagcttttggggactgaatctgagaactctgtctcgagctctaaaggcccagcacgactgaagggccattctgctccaggaaagtgtgtaaaacactgggaatccagtggaaataaatctaccaagaaacaggtctccttcgcagagcgtccagtatcttttgtcaagtgtggaaccattgtggactcccttactgaggcaatagctggcccaagtggtggtgatacctcgtgtgttaaacctgttgaaagtaactccacccatctaggctcctttgaggtgcacaccaagggctttggttcaaagatgatggccaaaatgggattcatcgagggcactggccttggtaaagatggccaaggtatagtgcagccgatacaagccgtgcatcgtcccaaatctcttggactaggtgtagaatttgacagtgtggctgaggcgatcaaagcaagggcagaacccatcaaattaatttcagagctgaggcggaatgtgtgggcaccagagacgagtggcgttggctcctttgagaaacacaccaagggttttggctccaaaatgatggtgaatatggggtttgtcccagggtccggactggggaaggatggccagggcattgccacccccttgaccggagtaaggcgaccgaaatcacggggactgggagccgaggacaaatattagcttacaccattttcgcatttgatgtatctttcttgtcgtgttccttgttacatgcggattacatagtttgctgggagggcgaacctttgagcaccctgaatggtgaaacaatgggttttcacttgtttctttcaacttctcaatgaagttttatatatttgttctatcaatgttatatttgtttcatttttctatggcccttgcttgtgcaactgaatgattgtgaataggctcatcactaagtgagaagaggtcaactttatccgct

SEQ ID NO: 2642 - DNA, 1551 bp, Zea Mays
accaaaccgccgctcgcgtcggtcacgccaggcctgacgcgagcacatcgcaatcctagccaccaaaacaatgcccggcggcaagcgccgccgcgcacgcaaccccaccgccggcgggcctcagcgtagcgccggcgcaggtcgtcgtcgtcccgtccccgagctcccgtcttttgtctcccccgcttctgtcgccgccgccttctcccccgcctcgggcggccgcagccgcgggcggtgcgcccggcgttgcggcgcctactccgatggcgagtcctcccacgccgtcccctttagctatccttccctccgctcctgctccgcttatccggagcgtgatcaggcgcaggcactggaggtgaccatcgacaccgcaccctgcgccgacccagccgcttccgtcccgatgtactcgtacggccccgccgtgctcggtgagaccgggcttgtgctgagtgcggacgaggaggaggcctgtgatagagggctgcatctcgggttaggattccgggatggaggacacgatgagatggagctcaaattgaaagagctgacagaggaagatgtctccttcaagacgcccaagcggaagcaggagcagagggcgaaggccaacccaggatttttgttgattgggggagtcaggatttacacggaggacatctcatcatcagaatcggatcggatgagcagctctgatgtggatttagagcccaactcaggtgatggggagagatttgagaatgatgatggtgacagtgacgaggaagataggcaaggcgaggagagagattcaatatctgatagcgagtcattaggatcggaatcagatgaagatttgagcaccggggattcttcttcagttgacaatgaggttgttgctgattacatggagggtattggtgggagtgacgagctgttgagcagtaagtggatcactagtatgaatttgggtgatgcagatactatagagcagatgtatacaaatgacaatgatgggtttgtgaagaaggggaaggaaaagcttgagggttatgcactaatgactgcatccgagcagtatgggatgaagaggcggaactcccttgagcagcggaagggaaaaggaatggtttgtgacagggatttgtcaagcatgcaagtgatggaccaggaagatatgttcatggtgaacaatgtctggatgccaaacaggtcaagaaaggggatgaagacaggatcatcatcctctcagctctcacagtcgtggcctaaagatgataggaaaagcaaaaactatcagagcaggccaggtgaaaagaagcagcataggaaggaactcattgcaaagaagcgtcaacaacgagctctaagcagaggagttgacttagggcaaattaatagtaaattgaggaaaatggttgtggatcaggttgacatgttatgttttcatccaatgcactctcgagactgttctcaggtacaacgccttgcatctatttatcaattgaagagcgggtgtcaaggttctggcaagaagagagcccaggcgatttactgcaaggcagcaag

SEQ ID NO: 2643 - DNA, 1190 bp, Zea Mays
gggtctgtccctttttgtgttgcgaagaaattacaaattgaggaaaatggttgtggatcaggttgacatgttatgttttcatccaatgcactctcgagactgttctcaggtacaacgccttgcatctatttatcaattgaagagcgggtgtcaaggttctggcaagaagagatttgtaactgtgacattgactgggcactcttccttgccatctgcagatggccaagttcgacttgaaaagcttttggggactgaatctgagaactctgtctcgagctctaaaggcccagcacgactgaagggccattctgctccaggaaagtgtgtaaaacactgggaatccagtggaaataaatctaccaagaaacaggtctccttcgcagagcgtccagtatcttttgtcaagtgtggaaccattgtggactcccttactgaggcaatagctggcccaagtggtggtgatacctcgtgtgttaaacctgttgaaagtaactccacccatctaggctcctttgaggtgcacaccaagggctttggttcaaagatgatggccaaaatgggattcatcgagggcactggccttggtaaagatggccaaggtatagtgcagccgatacaagccgtgcatcgtcccaaatctcttggactaggtgtagaatttgacagtgtggctgaggcgatcaaagcaagggcagaacccatcaaattaatttcagagctgaggcggaatgtgtgggcaccagagacgagtggcgttggctcctttgagaaacacaccaagggttttggctccaaaatgatggtgaatatggggtttgtcccagggtccggactggggaaggatggccagggcattgccacccccttgaccggagtaaggcgaccgaaatcacggggactgggagccgaggacaaatattagcttacaccattttcgcatttgatgtatctttcttgtcgtgttccttgttacatgcggattacatagtttgctgggagggcgaacctttgagcaccctgaatggtgaaacaatgggttttcacttgtttctttcaacttctcaatgaagttttatatatttgttctatcaatgttatatttgtttcatttttctatggcccttgcttgtgcaactgaatgattgtgaataggctcatcactaagtgagaagaggtcaactttatccgct

SEQ ID NO: 2644 - DNA, 1030 bp, Zea Mays
ctgatttgcagatttgtaactgtgacattgactgggcactcttccttgccatctgcagatggccaagttcgacttgaaaagcttttggggactgaatctgagaactctgtctcgagctctaaaggcccagcacgactgaagggccattctgctccaggaaagtgtgtaaaacactgggaatccagtggaaataaatctaccaagaaacaggtctccttcgcagagcgtccagtatcttttgtcaagtgtggaaccattgtggactcccttactgaggcaatagctggcccaagtggtggtgatacctcgtgtgttaaacctgttgaaagtaactccacccatctaggctcctttgaggtgcacaccaagggctttggttcaaagatgatggccaaaatgggattcatcgagggcactggccttggtaaagatggccaaggtatagtgcagccgatacaagccgtgcatcgtcccaaatctcttggactaggtgtagaatttgacagtgtggctgaggcgatcaaagcaagggcagaacccatcaaattaatttcagagctgaggcggaatgtgtgggcaccagagacgagtggcgttggctcctttgagaaacacaccaagggttttggctccaaaatgatggtgaatatggggtttgtcccagggtccggactggggaaggatggccagggcattgccacccccttgaccggagtaaggcgaccgaaatcacggggactgggagccgaggacaaatattagcttacaccattttcgcatttgatgtatctttcttgtcgtgttccttgttacatgcggattacatagtttgctgggagggcgaacctttgagcaccctgaatggtgaaacaatgggttttcacttgtttctttcaacttctcaatgaagttttatatatttgttctatcaatgttatatttgtttcatttttctatggcccttgcttgtgcaactgaatgattgtgaataggctcatcactaagtgagaagaggtcaactttatccgct

SEQ ID NO: 2645 - DNA, 1071 bp, Zea Mays
atgaaccattatgacatcatttttcgctacacattcttagtcaactcttgagatttgtaactgtgacattgactgggcactcttccttgccatctgcagatggccaagttcgacttgaaaagcttttggggactgaatctgagaactctgtctcgagctctaaaggcccagcacgactgaagggccattctgctccaggaaagtgtgtaaaacactgggaatccagtggaaataaatctaccaagaaacaggtctccttcgcagagcgtccagtatcttttgtcaagtgtggaaccattgtggactcccttactgaggcaatagctggcccaagtggtggtgatacctcgtgtgttaaacctgttgaaagtaactccacccatctaggctcctttgaggtgcacaccaagggctttggttcaaagatgatggccaaaatgggattcatcgagggcactggccttggtaaagatggccaaggtatagtgcagccgatacaagccgtgcatcgtcccaaatctcttggactaggtgtagaatttgacagtgtggctgaggcgatcaaagcaagggcagaacccatcaaattaatttcagagctgaggcggaatgtgtgggcaccagagacgagtggcgttggctcctttgagaaacacaccaagggttttggctccaaaatgatggtgaatatggggtttgtcccagggtccggactggggaaggatggccagggcattgccacccccttgaccggagtaaggcgaccgaaatcacggggactgggagccgaggacaaatattagcttacaccattttcgcatttgatgtatctttcttgtcgtgttccttgttacatgcggattacatagtttgctgggagggcgaacctttgagcaccctgaatggtgaaacaatgggttttcacttgtttctttcaacttctcaatgaagttttatatatttgttctatcaatgttatatttgtttcatttttctatggcccttgcttgtgcaactgaatgattgtgaataggctcatcactaagtgagaagaggtcaactttatccgct

SEQ ID NO: 2646 - DNA, 2820 bp, Zea Mays
tatctcctcaagtggtacgcgtctctccctgtcagccttatctctcgcttcctgtccacaacaagccgcgccccagcccgtggccatcggcctcttcttcgccgcatgctctccttgctcgagctcgcccacttcctggtgcatcttcctcctcgcctcccatctcaggatcaggctgctcggccacgcccagcagctccttgaacgcgcgcccctccgagcatctcgtccctttgttggtcgccatctttcctatctccccagcgtaggtggctggctgtgcctccccttgccggtgtcctcgttctccctgctcgttgacccctagggaaaaaacatctccctcacggctgctcccatggctgcctgcagccctagccgagctcgctctccccgcccagcagcaagcagctcctttcccctcgccatgaacgtcgtcgatctcctactgcagttcctccacgtggtctggtcgtcgaccgcgcgcatcacctactcgtggttatggaaaaccagcaagcctctcctcacggtgtagtttcctcacgtcatcgttcagcccgatgaggacctactgtctccttgtgtttattcctcgtacgctagatgattacgcgatatgaagggcatggaccagactggaccacaagatgatattgacggaccaaccacaagatggatgatctgacccagtgccaggatgggaggtgctcgccaagcgagtatcatctaacaacactgacgtagtgttatcctaggcaagccccggtgcatttgccaccttccttgtgtttacaaaattttatcacttatatgctgcattaggtgatagaagttgattgattaaacacttgatgcattatcattcttgaaacattgattaccataccttgtcacctgttttataaaagctagagatgcttagtcatgctgatagactaaggaaaatgtttttgatctatgactcatgttttttacaaaaaagaaaatgggcttgggataatgaaggcatcaagacgttgataaattcattatccaggcatggcccctctgtcaggccccaaatttttgaaatagtttaaaatgggaccagacgctgagcaggaaaagtcgcacgtctgtgtcgattaaggaccgtaccgattgttggcctgctgatctaggaccttttatctggccacatacctcgtcatgggtaagcttgaacccggctattccatacatgaaaagacaattgcacactgggagtggagagatggcgagagtggcacgtaccctcctggcaaaggaccgcccaaaaggggtggtgtgctctcgggtggcgcggacctgttcatgtgatggaggatccatggaaatggtagacatatgcaaaagagttaagggaagcatatgtcgtgtggttggagatccctagctgggtattaatcgattcggatcgctgttacttctcggttatgaagactagatcttcgacctgcagcatagttaacaagtataacaatgttttgattaaaagcaacctagtgttggtcaagtgaatgatctagattaggcaaacgctagattcaggctagaagattcaggtaataaactaacttgtgaaataaaacttggcttaaggacccacttctagtaagcttttctgcaaaaagagtctttgaaacttgatgagctttaccttgaatccctttaagtcagcatatccttgagagtcttttctttagtcgggtaagtcttgctgagtaattgcatactcagggttttattccctattgtttttcaggttatagttttgttctttcatggatggtgctaagtgccggtgggctcgaccttctatataagtatatcccgtctttatcttctggatgaggattatcactcaagctagcatgtatttcaaacttatgaaaattttacatcattcaaaatgtaatccttctaattcacttttgtaaccactccgatcatgtacaatgtaaacttgttgtaaactgataaaattttgtaataaaaaaattccgctgtaaattatggtgtgtgttttgtgtttacttaatcctgcgatcttggcggtaagtggtttatccggggtccttgggacactcggacatatcctgttaagttgtttggtgcacatgcatagccgtttgaggtccttgggacaaagataggtgcgtgtgggcctaataacttgggaggttctgccacagttttagttttcactaacacttatcattaaacaagtttgtcttgtttagagctgatttttgcaggatcacctattcacctcccctctaagtggtatcggagtcgttctcttcatcaagggactaaccacccaaagagatggatcctaaaggcaaaggggttgtgatcaacgacaagaagaaggagaccctcaacattgaagagccaaaaggtgataaggccaccgacttaggctcaaacaacaagaggaaggaagggaagaagaaaaggtgcatcaagaagatcatctactacgacagtaacgcctcctcttcttcaccaaaggacggtgacggtgatgattcctctacaaagaaaaggacgttgaaccaaaattattcttttgattattctcaaattccgtacaattccaatgctcatttactatctatatctcttggcaagcctcctcattttgatggggaaacttactctttttagagtcataagatgcatatgcatttattttctctttatcctaacatttgggaagtagtagaaaatggaatgcattttgatagtagtgatgatgccatatttattaatgagcaaattcataaaaatgac

SEQ ID NO: 2647 - DNA, 1616 bp, Zea Mays
gccccagcccgtggccatcggcctcttcttcgccgcatgctctccttgctcgagctcgcccacttcctggtgcatcttcctcctcgcctcccatctcaggatcaggctgctcggccacgcccagcagctccttgaacgcgcgcccctccgagcatctcgtccctttgttggtcgccatctttcctatctccccagcccctagccgagctcgctctccccgcccagcagcaagcagctcctttcccctcgccatgaacgtcgtcgatctcctactgcagttcctccacgtggtctggtcgtcgaccgcgcgcatcacctactcgtggttatggaaaaccagcaagcctctcctcacggtgtagtttcctcacgtcatcgttcagcccgatgaggacctactgtctccttgtgtttattcctcgtacgctagatgattacgcgatatgaagggcatggaccagactggaccacaagatgatattgacggaccaaccacaagatggatgatctgacccagtgccaggatgggaggtgctcgccaagcgagtatcatctaacaacactgacgtagtgttatcctaggttatagttttgttctttcatggatggtgctaagtgccggtgggctcgaccttctatataagtatatcccgtctttatcttctggatgaggattatcactcaagctagcatgtatttcaaacttatgaaaattttacatcattcaaaatgtaatccttctaattcacttttgtaaccactccgatcatgtacaatgtaaacttgttgtaaactgataaaattttgtaataaaaaaattccgctgtaaattatggtgtgtgttttgtgtttacttaatcctgcgatcttggcggtaagtggtttatccggggtccttgggacactcggacatatcctgttaagttgtttggtgcacatgcatagccgtttgaggtccttgggacaaagataggtgcgtgtgggcctaataacttgggaggttctgccacagttttagttttcactaacacttatcattaaacaagtttgtcttgtttagagctgatttttgcaggatcacctattcacctcccctctaagtggtatcggagtcgttctcttcatcaagggactaaccacccaaagagatggatcctaaaggcaaaggggttgtgatcaacgacaagaagaaggagaccctcaacattgaagagccaaaaggtgataaggccaccgacttaggctcaaacaacaagaggaaggaagggaagaagaaaaggtgcatcaagaagatcatctactacgacagtaacgcctcctcttcttcaccaaaggacggtgacggtgatgattcctctacaaagaaaaggacgttgaaccaaaattattcttttgattattctcaaattccgtacaattccaatgctcatttactatctatatctcttggcaagcctcctcattttgatggggaaacttactctttttagagtcataagatgcatatgcatttattttctctttatcctaacatttgggaagtagtagaaaatggaatgcattttgatagtagtgatgatgccatatttattaatgagcaaattcataaaaatgac

SEQ ID NO: 2648 - DNA, 2942 bp, Zea Mays
gccccagcccgtggccatcggcctcttcttcgccgcatgctctccttgctcgagctcgcccacttcctggtgcatcttcctcctcgcctcccatctcaggatcaggctgctcggccacgcccagcagctccttgaacgcgcgcccctccgagcatctcgtccctttgttggtcgccatctttcctatctccccagcgtaggtggctggctgtgcctccccttgccggtgtcctcgttctccctgctcgttgacccctagggaaaaaacatctccctcacggctgctcccatggctgcctgcagccctagccgagctcgctctccccgcccagcagcaagcagctcctttcccctcgccatgaacgtcgtcgatctcctactgcagttcctccacgtggtctggtcgtcgaccgcgcgcatcacctactcgtggttatggaaaaccagcaagcctctcctcacggtgtagtttcctcacgtcatcgttcagcccgatgaggacctactgtctccttgtgtttattcctcgttagtacctgtacccgacgtcgatttattagatgataattatgtgtatgtttgtgtgtttgtggtggatctaaatcctgtgagatttagatgagaagaaagctttagcgaggcgcttgccaagtgtttggtgaatcgcctcaaccaaatgtggttgtcgatctcgcggagtcgagtcgagtttagttgtggtacgctagatgattacgcgatatgaagggcatggaccagactggaccacaagatgatattgacggaccaaccacaagatggatgatctgacccagtgccaggatgggaggtgctcgccaagcgagtatcatctaacaacactgacgtagtgttatcctaggcaagccccggtgcatttgccaccttccttgtgtttacaaaattttatcacttatatgctgcattaggtgatagaagttgattgattaaacacttgatgcattatcattcttgaaacattgattaccataccttgtcacctgttttataaaagctagagatgcttagtcatgctgatagactaaggaaaatgtttttgatctatgactcatgttttttacaaaaaagaaaatgggcttgggataatgaaggcatcaagacgttgataaattcattatccaggcatggcccctctgtcaggccccaaatttttgaaatagtttaaaatgggaccagacgctgagcaggaaaagtcgcacgtctgtgtcgattaaggaccgtaccgattgttggcctgctgatctaggaccttttatctggccacatacctcgtcatgggtaagcttgaacccggctattccatacatgaaaagacaattgcacactgggagtggagagatggcgagagtggcacgtaccctcctggcaaaggaccgcccaaaaggggtggtgtgctctcgggtggcgcggacctgttcatgtgatggaggatccatggaaatggtagacatatgcaaaagagttaagggaagcatatgtcgtgtggttggagatccctagctgggtattaatcgattcggatcgctgttacttctcggttatgaagactagatcttcgacctgcagcatagttaacaagtataacaatgttttgattaaaagcaacctagtgttggtcaagtgaatgatctagattaggcaaacgctagattcaggctagaagattcaggtaataaactaacttgtgaaataaaacttggcttaaggacccacttctagtaagcttttctgcaaaaagagtctttgaaacttgatgagctttaccttgaatccctttaagtcagcatatccttgagagtcttttctttagtcgggtaagtcttgctgagtaattgcatactcagggttttattccctattgtttttcaggttatagttttgttctttcatggatggtgctaagtgccggtgggctcgaccttctatataagtatatcccgtctttatcttctggatgaggattatcactcaagctagcatgtatttcaaacttatgaaaattttacatcattcaaaatgtaatccttctaattcacttttgtaaccactccgatcatgtacaatgtaaacttgttgtaaactgataaaattttgtaataaaaaaattccgctgtaaattatggtgtgtgttttgtgtttacttaatcctgcgatcttggcggtaagtggtttatccggggtccttgggacactcggacatatcctgttaagttgtttggtgcacatgcatagccgtttgaggtccttgggacaaagataggtgcgtgtgggcctaataacttgggaggttctgccacagttttagttttcactaacacttatcattaaacaagtttgtcttgtttagagctgatttttgcaggatcacctattcacctcccctctaagtggtatcggagtcgttctcttcatcaagggactaaccacccaaagagatggatcctaaaggcaaaggggttgtgatcaacgacaagaagaaggagaccctcaacattgaagagccaaaaggtgataaggccaccgacttaggctcaaacaacaagaggaaggaagggaagaagaaaaggtgcatcaagaagatcatctactacgacagtaacgcctcctcttcttcaccaaaggacggtgacggtgatgattcctctacaaagaaaaggacgttgaaccaaaattattcttttgattattctcaaattccgtacaattccaatgctcatttactatctatatctcttggcaagcctcctcattttgatggggaaacttactctttttagagtcataagatgcatatgcatttattttctctttatcctaacatttgggaagtagtagaaaatggaatgcattttgatagtagtgatgatgccatatttattaatgagcaaattcataaaaatgac

SEQ ID NO: 2649 - DNA, 2686 bp, Zea Mays
gccccagcccgtggccatcggcctcttcttcgccgcatgctctccttgctcgagctcgcccacttcctggtgcatcttcctcctcgcctcccatctcaggatcaggctgctcggccacgcccagcagctccttgaacgcgcgcccctccgagcatctcgtccctttgttggtcgccatctttcctatctccccagcgtaggtggctggctgtgcctccccttgccggtgtcctcgttctccctgctcgttgacccctagggaaaaaacatctccctcacggctgctcccatggctgcctgcagccctagccgagctcgctctccccgcccagcagcaagcagctcctttcccctcgccatgaacgtcgtcgatctcctactgcagttcctccacgtggtctggtcgtcgaccgcgcgcatcacctactcgtggttatggaaaaccagcaagcctctcctcacggtacgctagatgattacgcgatatgaagggcatggaccagactggaccacaagatgatattgacggaccaaccacaagatggatgatctgacccagtgccaggatgggaggtgctcgccaagcgagtatcatctaacaacactgacgtagtgttatcctaggcaagccccggtgcatttgccaccttccttgtgtttacaaaattttatcacttatatgctgcattaggtgatagaagttgattgattaaacacttgatgcattatcattcttgaaacattgattaccataccttgtcacctgttttataaaagctagagatgcttagtcatgctgatagactaaggaaaatgtttttgatctatgactcatgttttttacaaaaaagaaaatgggcttgggataatgaaggcatcaagacgttgataaattcattatccaggcatggcccctctgtcaggccccaaatttttgaaatagtttaaaatgggaccagacgctgagcaggaaaagtcgcacgtctgtgtcgattaaggaccgtaccgattgttggcctgctgatctaggaccttttatctggccacatacctcgtcatgggtaagcttgaacccggctattccatacatgaaaagacaattgcacactgggagtggagagatggcgagagtggcacgtaccctcctggcaaaggaccgcccaaaaggggtggtgtgctctcgggtggcgcggacctgttcatgtgatggaggatccatggaaatggtagacatatgcaaaagagttaagggaagcatatgtcgtgtggttggagatccctagctgggtattaatcgattcggatcgctgttacttctcggttatgaagactagatcttcgacctgcagcatagttaacaagtataacaatgttttgattaaaagcaacctagtgttggtcaagtgaatgatctagattaggcaaacgctagattcaggctagaagattcaggtaataaactaacttgtgaaataaaacttggcttaaggacccacttctagtaagcttttctgcaaaaagagtctttgaaacttgatgagctttaccttgaatccctttaagtcagcatatccttgagagtcttttctttagtcgggtaagtcttgctgagtaattgcatactcagggttttattccctattgtttttcaggttatagttttgttctttcatggatggtgctaagtgccggtgggctcgaccttctatataagtatatcccgtctttatcttctggatgaggattatcactcaagctagcatgtatttcaaacttatgaaaattttacatcattcaaaatgtaatccttctaattcacttttgtaaccactccgatcatgtacaatgtaaacttgttgtaaactgataaaattttgtaataaaaaaattccgctgtaaattatggtgtgtgttttgtgtttacttaatcctgcgatcttggcggtaagtggtttatccggggtccttgggacactcggacatatcctgttaagttgtttggtgcacatgcatagccgtttgaggtccttgggacaaagataggtgcgtgtgggcctaataacttgggaggttctgccacagttttagttttcactaacacttatcattaaacaagtttgtcttgtttagagctgatttttgcaggatcacctattcacctcccctctaagtggtatcggagtcgttctcttcatcaagggactaaccacccaaagagatggatcctaaaggcaaaggggttgtgatcaacgacaagaagaaggagaccctcaacattgaagagccaaaaggtgataaggccaccgacttaggctcaaacaacaagaggaaggaagggaagaagaaaaggtgcatcaagaagatcatctactacgacagtaacgcctcctcttcttcaccaaaggacggtgacggtgatgattcctctacaaagaaaaggacgttgaaccaaaattattcttttgattattctcaaattccgtacaattccaatgctcatttactatctatatctcttggcaagcctcctcattttgatggggaaacttactctttttagagtcataagatgcatatgcatttattttctctttatcctaacatttgggaagtagtagaaaatggaatgcattttgatagtagtgatgatgccatatttattaatgagcaaattcataaaaatgac

SEQ ID NO: 2650 - DNA, 1920 bp, Zea Mays
ctaaactttcccccctacataatcggcaatagtgcgggctgcggcaccgcagcagcgccatgaacgccgtcgaaccctccgccgccgccatcgccgaagaccccattactccggccgcctccgcagccccgtaccctggccgcctccgcgaagcacttaccgccctttccgaggcttgcgagtccggcaacttcaatgcttccgaaaccgcctccttcaccatctccgacattcttgacaccgcagccggcgtaagtggcgagctcgatgacgggagcgacgacagccaagacgcgtcgaggtcaggggcctccgaagtgctgcttcgcgaggtgctcgagttcctctctcgcccgtcatcgatctcgaaccagatggcccttgacgcgctctcgcttgtgcttcccaaacccgtggcgaagctaggggctcgaatggggagatgccgggatgttgccgcagctatcctaaagttcttcgtgacgaattgcaatccgagggacatgctctccatcctctgtgaggcattagatgcaccaatggagctaccaaatggcttatccagttttgttcttctactcgatgcacttgctaaagtgtttactttaattcagaggcgacatatcgagcaagtaaaggtggcactgcccgttgtacttaaagttatgcatgctactgtatcagaatgtgttgaggaacatggaagtgctgctgttgatcttttcaatgcagcacatggtgttggcaaggccattcaagaaatgtgcatatcaatggtttgttaatctaagtaactatgtgagctgtttaatgttgaaacttattttaccattttgtttatcatttctatgttctgattgattttgcattattgttctgtctactgaaagttcaacaaaaacaaagatctctgtgcaattcttggtttatactcccttcagaatatagctcttgtatcacgaagcagacagcaggatattctctctgcttgtggttcagttgtttttcagagtttcagatttcttaaaactagtggattcacctatcgtggcctactaactggcagtgatgtcacagctgcaacggttgaactttccaaagaggaagatgctgattttatggagcatttttcctttgctatggatggtgcagcactttcagttgtgtggacacttatgcatgatgataaagatatgtcaaagtatgctggagaagagttggaattagcagtaaaggaagttcagggcaaccatatggaaaaatgggaagcaattaacatgcttaaatatgtcctatcctcaattcattacccatggataatcaaatcccacagtttaaacttaatgctgattctatccggtgaagatcatgttgaagagatcaataatcatgtagatttcacatgctttgctcatcgcatttttgaaacactcaaggccattgaaagcgttatgattgctgcccctatggcattggtgcggaaaaaagcatttgctgctttgaaaaaggttatttcaatggtgccatcatcccagagatttgacatcttacatggtcttgtaaacaatagtacatctccagctttgactgcaattctccttgatctagtgaggcaggaagtttcgagagagagtcgccaagctgacaatgattgtattgaagacgaaggatttcgaggtaatgggttaccgcgctgggcatctcatgcacttgagttagttgagctgattttgaggcctccagaaggtggtcctccttgccttcctgatcacagtgaacaggaccttcgcacaggggaagtgattgggactggccgtcgccgtagagccgctcctcgcctctacatcttggactctttccggcttccttccttggctacatctccagcgcatgtgctttcagcaaccctttcttctgttg

SEQ ID NO: 2651 - DNA, 1777 bp, Zea Mays
ctaaactttcccccctacataatcggcaatagtgcgggctgcggcaccgcagcagcgccatgaacgccgtcgaaccctccgccgccgccatcgccgaagaccccattactccggccgcctccgcagccccgtaccctggccgcctccgcgaagcacttaccgccctttccgaggcttgcgagtccggcaacttcaatgcttccgaaaccgcctccttcaccatctccgacattcttgacaccgcagccggcgtaagtggcgagctcgatgacgggagcgacgacagccaagacgcgtcgaggtcaggggcctccgaagtgctgcttcgcgaggtgctcgagttcctctctcgcccgtcatcgatctcgaaccagatggcccttgacgcgctctcgcttgtgcttcccaaacccgtggcgaagctaggggctcgaatggggagatgccgggatgttgccgcagctatcctaaagttcttcgtgacgaattgcaatccgagggacatgctctccatcctctgtgaggcattagatgcaccaatggagctaccaaatggcttatccagttttgttcttctactcgatgcacttgctaaagtgtttactttaattcagaggcgacatatcgagcaagtaaaggtggcactgcccgttgtacttaaagttatgcatgctactgtatcagaatgtgttgaggaacatggaagtgctgctgttgatcttttcaatgcagcacatggtgttggcaaggccattcaagaaatgtgcatatcaatgttcaacaaaaacaaagatctctgtgcaattcttggtttatactcccttcagaatatagctcttgtatcacgaagcagacagcaggatattctctctgcttgtggttcagttgtttttcagagtttcagatttcttaaaactagtggattcacctatcgtggcctactaactggcagtgatgtcacagctgcaacggttgaactttccaaagaggaagatgctgattttatggagcatttttcctttgctatggatggtgcagcactttcagttgtgtggacacttatgcatgatgataaagatatgtcaaagtatgctggagaagagttggaattagcagtaaaggaagttcagggcaaccatatggaaaaatgggaagcaattaacatgcttaaatatgtcctatcctcaattcattacccatggataatcaaatcccacagtttaaacttaatgctgattctatccggtgaagatcatgttgaagagatcaataatcatgtagatttcacatgctttgctcatcgcatttttgaaacactcaaggccattgaaagcgttatgattgctgcccctatggcattggtgcggaaaaaagcatttgctgctttgaaaaaggttatttcaatggtgccatcatcccagagatttgacatcttacatggtcttgtaaacaatagtacatctccagctttgactgcaattctccttgatctagtgaggcaggaagtttcgagagagagtcgccaagctgacaatgattgtattgaagacgaaggatttcgaggtaatgggttaccgcgctgggcatctcatgcacttgagttagttgagctgattttgaggcctccagaaggtggtcctccttgccttcctgatcacagtgaacaggtaatatcagctctaaacttgctaagatttattctgataatagattcaagagctcgtgacgaacacctggggtgttagagagcagtgccatgacaccgaacgagacaacg

SEQ ID NO: 2652 - DNA, 2638 bp, Zea Mays
ctaaactttcccccctacataatcggcaatagtgcgggctgcggcaccgcagcagcgccatgaacgccgtcgaaccctccgccgccgccatcgccgaagaccccattactccggccgcctccgcagccccgtaccctggccgcctccgcgaagcacttaccgccctttccgaggcttgcgagtccggcaacttcaatgcttccgaaaccgcctccttcaccatctccgacattcttgacaccgcagccggcgtaagtggcgagctcgatgacgggagcgacgacagccaagacgcgtcgaggtcaggggcctccgaagtgctgcttcgcgaggtgctcgagttcctctctcgcccgtcatcgatctcgaaccagatggcccttgacgcgctctcgcttgtgcttcccaaacccgtggcgaagctaggggctcgaatggggagatgccgggatgttgccgcagctatcctaaagttcttcgtgacgaattgcaatccgagggacatgctctccatcctctgtgaggcattagatgcaccaatggagctaccaaatggcttatccagttttgttcttctactcgatgcacttgctaaagtgtttactttaattcagaggcgacatatcgagcaagtaaaggtggcactgcccgttgtacttaaagttatgcatgctactgtatcagaatgtgttgaggaacatggaagtgctgctgttgatcttttcaatgcagcacatggtgttggcaaggccattcaagaaatgtgcatatcaatggtttgttaatctaagtaactatttcaacaaaaacaaagatctctgtgcaattcttggtttatactcccttcagaatatagctcttgtatcacgaagcagacagcaggatattctctctgcttgtggttcagttgtttttcagagtttcagatttcttaaaactagtggattcacctatcgtggcctactaactggcagtgatgtcacagctgcaacggttgaactttccaaagaggaagatgctgattttatggagcatttttcctttgctatggatggtgcagcactttcagttgtgtggacacttatgcatgatgataaagatatgtcaaagtatgctggagaagagttggaattagcagtaaaggaagttcagggcaaccatatggaaaaatgggaagcaattaacatgcttaaatatgtcctatcctcaattcattacccatggataatcaaatcccacagtttaaacttaatgctgattctatccggtgaagatcatgttgaagagatcaataatcatgtagatttcacatgctttgctcatcgcatttttgaaacactcaaggccattgaaagcgttatgattgctgcccctatggcattggtgcggaaaaaagcatttgctgctttgaaaaaggttatttcaatggtgccatcatcccagagatttgacatcttacatggtcttgtaaacaatagtacatctccagctttgactgcaattctccttgatctagtgaggcaggaagtttcgagagagagtcgccaagctgacaatgattgtattgaagacgaaggatttcgaggtaatgggttaccgcgctgggcatctcatgcacttgagttagttgagctgattttgaggcctccagaaggtggtcctccttgccttcctgatcacagtgaacaggtaatatcagctctaaacttgctaagatttattctgataatagattcaagaggacaaagatctgcaaaattgtttcggaaagagacattgcacaaggtgcactcggagtggctgaccccattaagaccaatcgcggagcaaattcagttggaaaatgaaaaggatgctgatgagattacaaaacaaatagtgtgcatgttaaatcttgttcaactggtgctataccgctgcatcgagttggtggaggaaaagatgaaaggctgctaatgtttttggtacctgtcatttctatacagtagcatctgctgtatctggatggaatgttcttgaggatataaattccatcttctcaggttattgtatatttacatggccaggaagtctggttttatttaaagtgtgcataacgtattcacaggaatatatggtgttattatcataaactaacaaataggatgtggttaacccgtcaccggttgctccggtagcctctatgacaacgtgcgacacccctgattgcacgtaacgagcgcctctgaccgtgtgtcatgagtgcctcctgtgtactgtacattcagcctagatggccaaattggccgaccggcctgtcatgacacgggcctgaaaaatagaacagcttgatatttactactagtagctaacgcgcgataatttatttctttgaaggtgtttgataacgagataattggattttcagtttacaaataattatcatgaacaattacagtgagttgtgatcttcaaaataaaataacaatcttcgaacttggtttataggaacagatgtgatcctaactcccaagtttgtagatttgacaaagtaccaagataaatgtcattcaaaattattggtttgacaaatatcttaagaggtaacacatcattagtgcaataaaaattaacgataaaaactaaaaaaagaataaga

SEQ ID NO: 2653 - DNA, 1766 bp, Zea Mays
gtttgttaatctaagtaactatttcaacaaaaacaaagatctctgtgcaattcttggtttatactcccttcagaatatagctcttgtatcacgaagcagacagcaggatattctctctgcttgtggttcagttgtttttcagagtttcagatttcttaaaactagtggattcacctatcgtggcctactaactggcagtgatgtcacagctgcaacggttgaactttccaaagtgatgcagaggaagatgctgattttatggagcatttttcctttgctatggatggtgcagcactttcagttgtgtggacacttatgcatgatgataaagatatgtcaaagtatgctggagaagagttggaattagcagtaaaggaagttcagggcaaccatatggaaaaatgggaagcaattaacatgcttaaatatgtcctatcctcaattcattacccatggataatcaaatcccacagtttaaacttaatgctgattctatccggtgaagatcatgttgaagagatcaataatcatgtagatttcacatgctttgctcatcgcatttttgaaacactcaaggccattgaaagcgttatgattgctgcccctatggcattggtgcggaaaaaagcatttgctgctttgaaaaaggttatttcaatggtgccatcatcccagagatttgacatcttacatggtcttgtaaacaatagtacatctccagctttgactgcaattctccttgatctagtgaggcaggaagtttcgagagagagtcgccaagctgacaatgattgtattgaagacgaaggatttcgaggtaatatcagctctaaacttgctaagatttattctgataatagattcaagaggacaaagatctgcaaaattgtttcggaaagagacattgcacaaggtgcactcggagtggctgaccccattaagaccaatcgcggagcaaattcagttggaaaatgaaaaggatgctgatgagattacaaaacaaatagtgtgcatgttaaatcttgttcaactggtgctataccgctgcatcgagttggtggaggaaaagatgaaaggctgctaatgtttttggtacctgtcatttctatacagtagcatctgctgtatctggatggaatgttcttgaggatataaattccatcttctcaggttattgtatatttacatggccaggaagtctggttttatttaaagtgtgcataacgtattcacaggaatatatggtgttattatcataaactaacaaataggatgtggttaacccgtcaccggttgctccggtagcctctatgacaacgtgcgacacccctgattgcacgtaacgagcgcctctgaccgtgtgtcatgagtgcctcctgtgtactgtacattcagcctagatggccaaattggccgaccggcctgtcatgacacgggcctgaaaaatagaacagcttgatatttactactagtagctaacgcgcgataatttatttctttgaaggtgtttgataacgagataattggattttcagtttacaaataattatcatgaacaattacagtgagttgtgatcttcaaaataaaataacaatcttcgaacttggtttataggaacagatgtgatcctaactcccaagtttgtagatttgacaaagtaccaagataaatgtcattcaaaattattggtttgacaaatatcttaagaggtaacacatcattagtgcaataaaaattaacgataaaaactaaaaaaagaataaga

SEQ ID NO: 2654 - DNA, 1501 bp, Zea Mays
cgaaatctaggttttgcctctctctcttttgcgtcgtcgtagtcttattcatcacgagcgtcaatgggtatctgcaatcaggagagcagcgaaactctgtcttcaaaatcctacaccagaagaggacaaacaaggtttttagaaagcaacttacaattgtctgacgaccgccactgtcgtcttccctgctgcatcacgcttgcaccgcaaaatcatgatggtagcttcatggattggtggttacgggccaggcagggactgaattcccctaattatccttggagcgtagacaatatgaaagcacataaatagcaatgtttttgataggcaggctccaaatctgaatgtggctctcagaaaagctcatcaagagaaagatgtatggggctagcaggggctaaggagctctcccttctaactgcccctattccagattttgaatgaattagaggagaagtctcttcttctgttaatccaaaagaaactgcaagcaactgagatgactcggcataaccttgagcaagagaagaaatatagttctgagcttacacacacgttcaaacgttatgtgatcagtttgaggcaaccacgatcgagttggaaagtatgtagctgagcctttcgatttcttctgagtcctctatgtgtctaataattgactccttcttatagcttacaaggccaacaacattgtactcaaagtagtaaaggctctccaagttgaaagataaaactttagacatgaggaagtcattgactacatacaaaaacaacctagatcaaggcggagtcgctgtcaaagatttgactgagttggactcgaccaacaaagccaaagatcttgccctagcaaccatggcatgacctctccatagttcccataagcaaccatggcacgcacagtttccggctaagttaggtatgactaggattaggagatccaatcaattgtctcctttcatggttgtaatatatgatacatacacacagagagagagagagagagagatagagatgctattcgtcactctaggtgatgatcacccaccttggagaatgacttaaacaaatttaagttatttgtggtctttataagtcattttagggtaggtgatcatcacctagggtgacaaatagcactgctctatatgtgtgtgtgcgcgcgcgctcgcgccggttattcattgcctgagaatctgagataagctttacgctttcatttatttgtgtaatccgactttaaggtttgatgtctagttttacaaagcataattgatataactttcccatatggtataaagaaacaattgagaagcacacatacatatggaaaacatcacatctggatttgaattgtcaaataaaatttcagaaagagaaaaatgtaagatgaagatacacttacatgtataatgagcacaggacatgtaacttgagggattttatcaatattctagaagcaaataaacaatagagaattgtcagtgtaaaatagaggtag

SEQ ID NO: 2655 - DNA, 840 bp, Zea Mays
ctaggttttgcctctctctcttttgcgtcgtcgtagtcttattcatcacgagcgtcaatgggtatctgcaatcaggagagcagcgaaactctgtcttcaaaatcctacaccagaagaggacaaacaaggtttttagaaagcaacttacaattgtctgacgaccgccactgtcgtcttccctgctgcatcacggaataagatcttctcttcatccacttgaggaccatacacacaagtcaaccaccagcttgcaccgcaaaatcatgatggtagcttcatggattggtggttacgggccaggcagggactgaattcccctaattatccttggagcgtagacaatatgaaagcacataaatagcaatgtttttgataggcaggctccaaatctgaatgtggctctcagaaaagctcatcaagagaaagatgtatggggctagcaggggctaaggagctctcccttctaactgcccctattccaggtatttagttgagtttagatggttgatctattttttatctagattcatggatccttttgtgtattggtgttttttgccaccataaagtggttgtatcagtttgtaatgtttggtttggtccagcgtggactcttcttttcctcttaatataatgatgtgcgattctcttgcgcgttcgagaaaaaaaattgtgcacccaagttacctgagttcttgggtcagtgccccgagcctcgatatgaatggatgaaatatcctcaaaccaagcatatagatgttgtttcagccactatgaatcgaatccaagaattaaaggatcaaggcctcacagctgtccacgtggctggtaacaggattc

SEQ ID NO: 2656 - DNA, 785 bp, Zea Mays
ctaggttttgcctctctctcttttgcgtcgtcgtagtcttattcatcacgagcgtcaatgggtatctgcaatcaggagagcagcgaaactctgtcttcaaaatcctacaccagaagaggacaaacaaggtttttagaaagcaacttacaattgtctgacgaccgccactgtcgtcttccctgctgcatcacgcttgcaccgcaaaatcatgatggtagcttcatggattggtggttacgggccaggcagggactgaattcccctaattatccttggagcgtagacaatatgaaagcacataaatagcaatgtttttgataggcaggctccaaatctgaatgtggctctcagaaaagctcatcaagagaaagatgtatggggctagcaggggctaaggagctctcccttctaactgcccctattccaggtatttagttgagtttagatggttgatctattttttatctagattcatggatccttttgtgtattggtgttttttgccaccataaagtggttgtatcagtttgtaatgtttggtttggtccagcgtggactcttcttttcctcttaatataatgatgtgcgattctcttgcgcgttcgagaaaaaaaattgtgcacccaagttacctgagttcttgggtcagtgccccgagcctcgatatgaatggatgaaatatcctcaaaccaagcatatagatgttgtttcagccactatgaatcgaatccaagaattaaaggatcaaggcctcacagctgtccacgtggctggtaacaggattc

SEQ ID NO: 2657 - DNA, 922 bp, Zea Mays
ctgaccacgtggaggcattgtctcttcaccagtgcctgccatagcgctgctagagctcatcagcgcactctgctcccctggcgctgctctaggttctgccggtgtcctccatgctccttcctacagctcgcccctcaccagcgcttggatcgcccagcttcttccccggctgctcgttcctgctccagtacgcctggatgctgtcctgtggctcgaccgcgccctctgcgatcaacgccctggctccgtcgtcggccctacggtgccagggatgccgccccggtgtcctgctccctctccagccgcgtccgtggtggtcgagcacgctagccgccgcgggctcgcctcacccggctgccgtcaccaaccttcgcctcgacgtcattgttccttgtactcagcatgggagttctccgtcggtcccagctacaacgtcagctcgttgtgacctgtgagatttcagaggagagatccatgaggattgatgaagagaagcagccccaatacagcatccgctagatattcgacgaaacgctgaaaccaataatcttcgtcgtctctgacttccgcagcagcgtcgttccctccatggtgctcgtcatcgacttcgccctcaagtcatcatggcttgacggtcgcctaagctcgtccctgctcatctactcgtcctcaccatggacatgcgtctctgcatgctgacgtgcccagaccgtcagtctctcgcccttgccgttaaaagccattatttaggtacgctaattgatcacgtgatgcgaaggaccaaagctgggttgaccccaagatgtcgttaagcatgagcttcttcgcaaggtgatactgatgaataaacttgaagattggatgatcggatcaagcgctaggatgtgagatgctcgccaagtggacgtcatctaacaaaaac

SEQ ID NO: 2658 - DNA, 912 bp, Zea Mays
ctgaccacgtggaggcattgtctcttcaccagtgcctgccatagcgctgctagagctcatcagcgcactctgctcccctggcgctgctctaggttctgccggtgtcctccatgctccttcctacagctcgcccctcaccagcgcttggatcgcccagcttcttccccggctgctcgttcctgctccagtacgcctggatgctgtcctgtggctcgaccgcgccctctgcgatcaacgccctggctccgtcgtcggccctacggtgccagggatgccgccccggtgtcctgctccctctccagccgcgtccgtggtggtcgagcacgctagccgccgcgggctcgcctcacccggctgccgtcaccaaccttcgcctcgacgtcattgttccttgtactcagcatgggagttctccgtcggtcccagctacaacgtcagctcgttgtgacctgtgagatttcagaggagagatccatgaggattgatgaagagaagcagccccaatacagcatccgctagatattcgacgaaacgctgaaaccaataatcttcgtcgtctctgacttccgcagcagcgtcgttccctccatggtgctcgtcatcgacttcgccctcaagtcatcatggcttgacggtcgcctaagctcgtccctgctcatctactcgtcctcaccatggacatgcgtctctgcatgctgacgtgcccagaccgtcagtctctcgcccttgccgttaaaagcgtacgctaattgatcacgtgatgcgaaggaccaaagctgggttgaccccaagatgtcgttaagcatgagcttcttcgcaaggtgatactgatgaataaacttgaagattggatgatcggatcaagcgctaggatgtgagatgctcgccaagtggacgtcatctaacaaaaac

SEQ ID NO: 2659 - DNA, 573 bp, Zea Mays
attacaaggacctcagtatcttccatttgtatgaacccggattcctggtcctggctatttcgtatttgcgtgcccaattcttttaggcattgccggacctgatgtcatttgctgtgtcgattgagtgcttaaagaccaaatttgtagggtagcaatctctagcctacagttcaaacaaatgtatcatgtagtactgcaccctgattcatgtatatccataaggtgacagttttttctctgaagaaaattttatgtttcctctttctttatcaagcatgaataaggccaagaatataggggataactatttctagaatttctctagctagtaattacatgctcaaagaatcaatagagttgcataaagcttgacactttatgtagacatttttttaacacaataggtaacagatgctgaagaaacataccaaatgtccaaattgttctgaataggttttcagagggacaagcccaaattcattgcatccttgaaatgccatgcatcacagtgcccaatacttcaaggtactaagaagtccaattattgatcaacatttgctgagggaatgcaag

SEQ ID NO: 2660 - DNA, 601 bp, Zea Mays
ggaacatgttcatgtttctttcatcatgatgatgaagaagaggcacaagattgagcgggacctgagtatcggtgaggaagtgggatggtcaaagaatcagcaggtggctaaatccaaccccacccttgctgcaatgaacaagaagtttgggatgatccacgggctgtcatcactggccaacatcatgtcgtttggtagcttggccatgcactcctggtacctggccagcaagctggagctgtgaagaggagccaagacgtcttccatctccgcgttcttgtgaattttatcactatggtggtaatggtgcacgtcaggttgtcagatcgctagactaaactgtacgattgcgctattggcttcacaagataataaattgtactcctagttaaaaaaagaaatcctgtgttgcatggagctcccaaactagttattcaaaatcagaataattcagccaacaacgtggtatttgttgatctttcttcggtggaaaatgcatggtcctctttggaacagagatctgcaaaacacgaaaataggggaaaatgtaaggtaccttcaagaatagtcaatgtgctagcttatatgaaagagaccatta

SEQ ID NO: 2661 - DNA, 1615 bp, Zea Mays
aactatcccctccgtttgataaaaaacatttgcatttgtgtacgaaccatcctcgaatccaacgtcctctcctctccgtacttcctccgcagctacccccatcacattcccaaaccctccgtcgacccctcctcctcgatctacaccggcgatcggcggcgagtgatggggtgggcgacgcggttcctggcggcggtgtgcttctttgctgcgggtgtcctcttcgtccccgaggctctccttggttccccctccggcgcaggcgccgtcaccgctgccaagctggcccacgtcctctcctttgccacttcctggggcgccgccctctgggccacctttatcggcggcatcatcatgttcaagaacctgccgaggcacatgttcggcaacttgcagagcaagatgttcccggcctacttcacgcttatctctgcctgcgcagccatctcggtcgccaccttctcgcacctccacccgtggaagacggcgtccaccgtggagcgctaccagcttggattcctcctatcagcgctcggttgcaatctctccaacctgctagtcttcacccccatgacaattgaggaaattgagtaatgctttatctggtgtgcaatttattagagaatagaaatagcagccgctgtgtcatgactgtcatcgttgaaagttggatgcaaaatctgtgcatagtcaatggactaataataggtttgtttagtttaactgctcatgtaaatttgatagatttcttataagttcatggtagtgacctagttgctggaaggtgatagatcaggacattgggttctttttgtttctggtcttgttgagtcttaaaaggtgtttcatgctaatctactataaagctgacattgccggtcttggtttggtttgcgcccgtaattattgctcaacactcagtgagcaaaccagctatcaatttattgtttttgctttgtttgtgtagcttctaaaaaactggggttgttgtgaaaccattttctgaatgcaattatattgttttgattggtccacagcagcccatttcctttgatggcatgcaaatgtgattttatgatatgatgtgttggggacttgtccttaaatgctatgaattaagaataaggcaacacataaattgttaaacgttaaagtcattcgtccttcgaagcattattttccttgggatataatgagtttcggacgaaggttatgaaggtcataccttcataggcacaacaaaaaataaagaaggattcatataaagtataagaaataatgtaaacacttaaatattattattaactcatttctattttattattatggcaaaatagaaatgataacaaattacaaatgtaccttcggcttgagagaaggcaaaagtacaagcgtgacgcaaaagcaaatgccaagtccgcgtgaacagtacgggagcactgttcatctatttataggcacgagacgcagcccatataaaattacactcatgccctttacatttgctaataactctatagtaatccatcggggtctaaatagcattttcccctttaagtcggtttccttttctgccatcacgccgaagctcccctgcgcatagcttcggctctgc

SEQ ID NO: 2662 - DNA, 2448 bp, Zea Mays
aactatcccctccgtttgataaaaaacatttgcatttgtgtacgaaccatcctcgaatccaacgtcctctcctctccgtacttcctccgcagctacccccatcacattcccaaaccctccgtcgacccctcctcctcgatctacaccggcgatcggcggcgagtgatggggtgggcgacgcggttcctggcggcggtgtgcttctttgctgcgggtgtcctcttcgtccccgaggctctccttggttccccctccggcgcaggcgccgtcaccgctgccaagctggcccacgtcctctcctttgccacttcctggggcgccgccctctgggccacctttatcggcggcatcatcatgttcaagaacctgccgaggcacatgttcggcaacttgcagagcaagatgttcccggcctacttcacgcttatctctgcctgcgcagccatctcggtcgccaccttctcgcacctccacccgtggaagacggcgtccaccgtggagcgctaccagcttggattcctcctatcagcgctcggttgcaatctctccaacctgctagtcttcacccccatgacaattgaggtgagcctaattactcttaggctttggtctcttttcactgaggagcgaattttatgagcacctaggatttgttatgacagtagagggttcatggtttgtagacttgacatgaccataaaaatgtggatcggttagtaaataatcatcactaatttttagctgcaattgtacaaaattgagcaatgctttagagatcaaacctgattagtgctgtgctataactgtaaggtgaatgtaatagcttgtagttaatttgactaacaatggtgctttctagtttgttgcacccagttatgctgattgatttcttgttcactaatgctagcagccaaatcatggaatatcaggcttttggctggttttttttatgttctattagaaagttaattttggatagtcttggtttgaacaattcaccctttatgttattgcttttacttgtgtgtaaccacttcaacaaaataggagtcgctgtcaacaggctaatttttaactcaaatgacaaatataccttgtgaaatcatttgatgttattttctgcagcttaaaacatatacctttagcataaatatgccttgtataatatggttgctattgctatgattcacaatagtttacgaaaatggtttctcaagcattgtggttgaatagctttcgacattaaaagccaagggtattttaattcagatgtcctttttaatatcctggtgaaaaatactgttataattattcctctaatcaataaatatacttcacaattgatactacagcccaagttaagtgttaaatgacagatgttggcatcacattatcacaatgtctcacacaacaaggaaattgagtaatgctttatctggtgtgcaatttattagagaatagaaatagcagccgctgtgtcatgactgtcatcgttgaaagttggatgcaaaatctgtgcatagtcaatggactaataataggtttgtttagtttaactgctcatgtaaatttgatagatttcttataagttcatggtagtgacctagttgctggaaggtgatagatcaggacattgggttctttttgtttctggtcttgttgagtcttaaaaggtgtttcatgctaatctactataaagctgacattgccggtcttggtttggtttgcgcccgtaattattgctcaacactcagtgagcaaaccagctatcaatttattgtttttgctttgtttgtgtagcttctaaaaaactggggttgttgtgaaaccattttctgaatgcaattatattgttttgattggtccacagcagcccatttcctttgatggcatgcaaatgtgattttatgatatgatgtgttggggacttgtccttaaatgctatgaattaagaataaggcaacacataaattgttaaacgttaaagtcattcgtccttcgaagcattattttccttgggatataatgagtttcggacgaaggttatgaaggtcataccttcataggcacaacaaaaaataaagaaggattcatataaagtataagaaataatgtaaacacttaaatattattattaactcatttctattttattattatggcaaaatagaaatgataacaaattacaaatgtaccttcggcttgagagaaggcaaaagtacaagcgtgacgcaaaagcaaatgccaagtccgcgtgaacagtacgggagcactgttcatctatttataggcacgagacgcagcccatataaaattacactcatgccctttacatttgctaataactctatagtaatccatcggggtctaaatagcattttcccctttaagtcggtttccttttctgccatcacgccgaagctcccctgcgcatagcttcggctctgc

SEQ ID NO: 2663 - DNA, 1679 bp, Zea Mays
aactatcccctccgtttgataaaaaacatttgcatttgtgtacgaaccatcctcgaatccaacgtcctctcctctccgtacttcctccgcagctacccccatcacattcccaaaccctccgtcgacccctcctcctcgatctacaccggcgatcggcggcgagtgatggggtgggcgacgcggttcctggcggcggtgtgcttctttgctgcgggtgtcctcttcgtccccgaggctctccttggttccccctccggcgcaggcgccgtcaccgctgccaagctggcccacgtcctctcctttgccacttcctggggcgccgccctctgggccacctttatcggcggcatcatcatgttcaagaacctgccgaggcacatgttcggcaacttgcagagcaagatgttcccggcctacttcacgcttatctctgcctgcgcagccatctcggtcgccaccttctcgcacctccacccgtggaagacggcgtccaccgtggagcgctaccagcttggattcctcctatcagcgctcggttgcaatctctccaacctgctagtcttcacccccatgacaattgagcccaagttaagtgttaaatgacagatgttggcatcacattatcacaatgtctcacacaacaagggaaattgagtaatgctttatctggtgtgcaatttattagagaatagaaatagcagccgctgtgtcatgactgtcatcgttgaaagttggatgcaaaatctgtgcatagtcaatggactaataataggtttgtttagtttaactgctcatgtaaatttgatagatttcttataagttcatggtagtgacctagttgctggaaggtgatagatcaggacattgggttctttttgtttctggtcttgttgagtcttaaaaggtgtttcatgctaatctactataaagctgacattgccggtcttggtttggtttgcgcccgtaattattgctcaacactcagtgagcaaaccagctatcaatttattgtttttgctttgtttgtgtagcttctaaaaaactggggttgttgtgaaaccattttctgaatgcaattatattgttttgattggtccacagcagcccatttcctttgatggcatgcaaatgtgattttatgatatgatgtgttggggacttgtccttaaatgctatgaattaagaataaggcaacacataaattgttaaacgttaaagtcattcgtccttcgaagcattattttccttgggatataatgagtttcggacgaaggttatgaaggtcataccttcataggcacaacaaaaaataaagaaggattcatataaagtataagaaataatgtaaacacttaaatattattattaactcatttctattttattattatggcaaaatagaaatgataacaaattacaaatgtaccttcggcttgagagaaggcaaaagtacaagcgtgacgcaaaagcaaatgccaagtccgcgtgaacagtacgggagcactgttcatctatttataggcacgagacgcagcccatataaaattacactcatgccctttacatttgctaataactctatagtaatccatcggggtctaaatagcattttcccctttaagtcggtttccttttctgccatcacgccgaagctcccctgcgcatagcttcggctctgc

SEQ ID NO: 2664 - DNA, 1678 bp, Zea Mays
aactatcccctccgtttgataaaaaacatttgcatttgtgtacgaaccatcctcgaatccaacgtcctctcctctccgtacttcctccgcagctacccccatcacattcccaaaccctccgtcgacccctcctcctcgatctacaccggcgatcggcggcgagtgatggggtgggcgacgcggttcctggcggcggtgtgcttctttgctgcgggtgtcctcttcgtccccgaggctctccttggttccccctccggcgcaggcgccgtcaccgctgccaagctggcccacgtcctctcctttgccacttcctggggcgccgccctctgggccacctttatcggcggcatcatcatgttcaagaacctgccgaggcacatgttcggcaacttgcagagcaagatgttcccggcctacttcacgcttatctctgcctgcgcagccatctcggtcgccaccttctcgcacctccacccgtggaagacggcgtccaccgtggagcgctaccagcttggattcctcctatcagcgctcggttgcaatctctccaacctgctagtcttcacccccatgacaattgagcccaagttaagtgttaaatgacagatgttggcatcacattatcacaatgtctcacacaacaaggaaattgagtaatgctttatctggtgtgcaatttattagagaatagaaatagcagccgctgtgtcatgactgtcatcgttgaaagttggatgcaaaatctgtgcatagtcaatggactaataataggtttgtttagtttaactgctcatgtaaatttgatagatttcttataagttcatggtagtgacctagttgctggaaggtgatagatcaggacattgggttctttttgtttctggtcttgttgagtcttaaaaggtgtttcatgctaatctactataaagctgacattgccggtcttggtttggtttgcgcccgtaattattgctcaacactcagtgagcaaaccagctatcaatttattgtttttgctttgtttgtgtagcttctaaaaaactggggttgttgtgaaaccattttctgaatgcaattatattgttttgattggtccacagcagcccatttcctttgatggcatgcaaatgtgattttatgatatgatgtgttggggacttgtccttaaatgctatgaattaagaataaggcaacacataaattgttaaacgttaaagtcattcgtccttcgaagcattattttccttgggatataatgagtttcggacgaaggttatgaaggtcataccttcataggcacaacaaaaaataaagaaggattcatataaagtataagaaataatgtaaacacttaaatattattattaactcatttctattttattattatggcaaaatagaaatgataacaaattacaaatgtaccttcggcttgagagaaggcaaaagtacaagcgtgacgcaaaagcaaatgccaagtccgcgtgaacagtacgggagcactgttcatctatttataggcacgagacgcagcccatataaaattacactcatgccctttacatttgctaataactctatagtaatccatcggggtctaaatagcattttcccctttaagtcggtttccttttctgccatcacgccgaagctcccctgcgcatagcttcggctctgc

SEQ ID NO: 2665 - DNA, 4403 bp, Zea Mays
attcaatttatatgattattagtcacccctacaagaggaggctaaggtgaaaaggcagaaattgtatactgatgccataatatgatgtttgctgacaaatatgcaggaataagctatgcaaagccaacagccaacagggtattcacaaatagtagggggaattattgtttgacagcaacctcccccagaaaatcatcatcaaaactcaagtccctatattctgcatcctaaattgccttattcaccacaaaacaccaattaacaattccagcagaaatatggatacgagaaacaattccagcattggtttcaaacattgcttcttcgaccaaaagttatatgtacaccaggtacccttcacctaacctggcactcacttccaaaaaacgtagccatcaatcatatatccaaacaaagccacaaaatgctgcaaagcaaattagttggacaaatttccttatcacccaacaaagaatcaaggtaacagtatcaatatcctagcatctgcaatagcgagggctgaaactatccactacctaacaagcatacatcaaaccagacagacaataatatatcagaatcacaggcttcatcattgacttatcatctaccaaacaacaataacaacaaagcattttatcccgagcaatatgaggtaggctagagttaaaaaaaccaatagaaaccacaagtcatggttcaggcacatggatagctagtttctatgcactcctatcaaaactaaatctttggatatatcccatcctttcaagtcattgttcctcttcctctcttctcattgctatcacgacttagaatcctactacacactggtgcctctggaggtctccgttggacatgtccaaaccatctcaacacatatttgacaagtttttcttcaattgatgccacccctagcctatcacgtatatcatcattccggacttggtcttttcttgtatggccataaaaacatacacatttctgcaacacttatctactgaacatgtcgtctttttgtagaccaacattttgcaccgtacaacatagaaggtataattgtcatcctataaaacttgtcttttagcttctttggtaccctcgtcatctactaaacaatgcattaataagctatgatgttaccatgctgattttcaattcaatacagatcttagatgttacaggcagacccaacaaagaccaaagagcatgctcacaaaaactacaaacagaaacatgttagctcactttgatccaagcggttgtcagacatgctccaaaatactccatcataaatctaatgatttctgatgtttggtttttaggacattttgcaggtgggtaaagacatgtatccctcaatcaaacaactaaatcaccagtaatgaaaacaagtcatccctattcaggtagctgatgacatatatgacagcgttataatcgtgcctattcaggtggattataccaaatgtccttatatttgtggacaaaatccaatgatctgcagtaaaaatagacagcagattgacttatttgtgaaatagataataataacagagtactaacaaaaggtaaaaccaaaagcttcagaaattacgaggcacaattgagacttcagtgagtttgcactaagagcagtttatgcttcagcgtagtaaaggactggaagatggctatgatacacaatacacatacataagttatattacaaataaactcaactaatttacaggtaggaccgtagaagctcatgcaaactgcctagggtctggacaacgacacaacaccaaggaactttatagaagtctttacaggctagcatcggcaggcaatttcaatattaatcactgataactcaaaagaatcagtgttttcctaacaattttagccgaccgtttaaaccaccagtctaaacaattttatcccgcttattaggccgttttttatttggccaaaatgtggcgggttgagccgtaactagggcaatgtatgccccgaaccctgttgtagccgcccttctccaaactccaggtcacggaactgccgtcatccaggtctgggagccgctgctggccgcccagctcgcccacgacgccggccccctgctcattcggtccttcctgcataccattgaccaaccagcgcgcccacagtgacgatccccctgctccacggtgccctcgcaatgctcccaagcctgcatgcgcttagcctctccaacaacaagctcactgacacgttccccaatgtgtcggcgctcgctcaagatgctctacctgtcgcaaaaccgactgtctgacaccatccctgagggcaagttcggacccatgtgcggccgctcaagatgctctaactgtcgtgatatcgattgtccgacaccatccccgagggcacgttcggacccaagcgcggcctccgcaagctacacctctccaacaagttctccagccccatcccaaggtacatcacctaaacacgactgctcgagttgtcgctcgccaacaaccgctttgagggctcgatgctggacttctcccagccagagctcaggttcatcaatgtctccaacaacctcctctcagaacccattccaatagggatcaaccgcttcaatgcaagcatgttcgcaggcatcatatcgattgatccatataaactattgctttgtttgtaagaaactaagaactatgctatgtctatggtgctttgtttgtaccactgttttcaagtcgtccgactaatcacaattaatcgggtcggtcgcctagtagtggccgatcagccggacgactcgactagagtatcaagtcgtccaagtcatccgactagtcatcgattaggggcgattagtcgtctgactagatggtaaatcgaccagaaattgttcaggcggctagggtttctagtgggctactgggcttctattttttcgatccatctacagtagtataaaggcaatacgccgccactcattgtcatcccttgaaacttttcctctcctctattgagtctagaacacaaactgcggctctagaacaccggcaacggctccaaaacactagcgacgagatgagctcctcatctcaaggtccccccttctccccctttcctatctttcctattgtctgaattctgatgaatctgaatctgttggagaagctgctgctgctttttgcttgaatgatgatatgctctaggtagtaggtactgcattactgcttgtagccttgtattcaatatttcagtttcagttatgctatagtgctatatgcctatattgcctttcagtctgttactcagtttcaatttcagactttcagactcatataatgcctattgcagtattgcttatatatacatatatcatattatatatacatatgtccagaaatatataggacgattaggggacgaccagaggtcgaccaggaccgattaggtgtcctaatcatcaccctaatcgcgattaggcacctagtcggtcctctgaacgaccagctggtcgcccgacctgaaaacaatggtttgtactttgtaaacactatctatgtggctatgtttgtggatgatctttgatgtgccattttattgttattttgttggagcaaatatatttatggatttactcatttactcttgctaaaatttacatactacatactaacaattatcccttcttttgtaggtacatagcttagataaagaggacatcaaaagctttgtgtttacttcacaaaaggttagacagtaccaaaccatttagaccgtttaaacacataacactacatatttaatgtatagtgcaatggctatacgacacgcgagggccctctccataaaaaataaattataaattaaagtggaccctccctataaaaataaatttaaaattaaagtggacatggcccacatacaaaagtagataatgcactttatcttagccaaaaggccgagaaagttcgagttgaaaaagagatcagtcccttttttatagcttgctcggccgctcgtcctccttcagctagcgaggtggtactatccgggagcattgcgctgcatgtggcttcgtgtcgtgttaggcttgggtgttttctcatggaccgtctaagagttgaccatctaggagttgacaacccacatcacttgacaacacacaatgacgatggaaccatggaacctccgtggtgggcctaggtattttatcacgtccatctggaaggtaacgactagggatgaaaacggtttcggaatttttcggtattccgtaaaccgattgcgaaatttttcgatcggattcaccggtaacggtatttttcgaaaacggaatcggttttcggaattttctatcggaatcggtatcggaatcagtgtgtgttttaccaaccatttccttcggttaccgg

SEQ ID NO: 2666 - DNA, 870 bp, Zea Mays
ccgcgcgctccctggagcttctctcccagccgccgccaccgcctctatctctcccttccctcttctctctcccctcacatctctcctctctgtcccgaccgagcaacagcggccaagcactcaagtgttccgcgctcggcactttggcttcgggattcctgacctagcgcagccgccaccacagcgctgcccctgtcgcgatagctctgcgtcgccgctcaacggaggccgacgaggtgacgagaagcggaggccgagcagtcgcacttgcaggtccagtcctgctggtccgcagtccacagttcgccctctaccctctgctctgggatctgcagtaccgtctgcttcggcctcagcactgccatccgcttcagcctctgcactaccgtccaagtcaagtcgctgtatcaccttagcccatggacgctccccatgccttgacggcttgacctccgatggagaggaagcaaggtgagaaatcacgattgtttgttgactgtgtgaggccgtaaaaattgagatgtatttttaatatttttgtaatgctaaccatgtcaaatatgtctacacggttggatgaagttgtactgctgtaccagttcactgtatttgtagactacactacgccatgctttgccaatgaaccagccatcatgttctacaaaattggaggatgaactagccatgatactttgccaatgaaccagccgaagagatctcctctaccttggcagcacgatcaagaatgctgttgtcacggtccctgcctacttcaatgactcacagaggcaattaaaaaagagaattgatctttttatgggcgaagtgtcttgttagcatcaagtaagtggcgacatcacaacccctaca

SEQ ID NO: 2667 - DNA, 729 bp, Zea Mays
cgcgcgctccctggagcttctctcccagccgccgccaccgcctctatctctcccttccctcttctctctcccctcacatctctcctctctgtcccgaccgagcaacagcggccaagcactcaagtgttccgcgctcggcactttggcttcgggattcctgacctagcgcagccgccaccacagcgctgcccctgtcgcgatagctctgcgtcgccgctcaacggaggccgacgaggtgacgagaagcggaggccgagcagtcgcacttgcaggtccagtcctgctggtccgcagtccacagttcgccctctaccctctgctctgggatctgcagtaccgtctgcttcggcctcagcactgccatccgcttcagcctctgcactaccgtccaagtcaagtcgctgtatcaccttagcccatggacgctccccatgccttgacggcttgacctccgatggagaggaagcaagactacactacgccatgctttgccaatgaaccagccatcatgttctacaaaattggaggatgaactagccatgatactttgccaatgaaccagccgaagagatctcctctaccttggcagcacgatcaagaatgctgttgtcacggtccctgcctacttcaatgactcacagagacaggcaattaaaaaagagaattgatctttttatgggcgaagtgtcttgttagcatcaagtaagtggcgacatcacaacccctaca

SEQ ID NO: 2668 - DNA, 762 bp, Zea Mays
cgcgcgctccctggagcttctctcccagccgccgccaccgcctctatctctcccttccctcttctctctcccctcacatctctcctctctgtcccgaccgagcaacagcggccaagcactcaagtgttccgcgctcggcactttggcttcgggattcctgacctagcgcagccgccaccacagcgctgcccctgtcgcgatagctctgcgtcgccgctcaacggaggccgacgaggtgacgagaagcggaggccgagcagtcgcacttgcaggtccagtcctgctggtccgcagtccacagttcgccctctaccctctgctctgggatctgcagtaccgtctgcttcggcctcagcactgccatccgcttcagcctctgcactaccgtccaagtcaagtcgctgtatcaccttagcccatggacgctccccatgccttgacggcttgacctccgatggagaggaagcaagttgtactgctgtaccagttcactgtatttgtagactacactacgccatgctttgccaatgaaccagccatcatgttctacaaaattggaggatgaactagccatgatactttgccaatgaaccagccgaagagatctcctctaccttggcagcacgatcaagaatgctgttgtcacggtccctgcctacttcaatgactcacagagacaggcaattaaaaaagagaattgatctttttatgggcgaagtgtcttgttagcatcaagtaagtggcgacatcacaacccctaca

SEQ ID NO: 2669 - DNA, 743 bp, Zea Mays
cgcgctccctggagcttctctcccagccgccgccaccgcctctatctctcccttccctcttctctctcccctcacatctctcctctctgtcccgaccgagcaacagcggccaagcactcaagtgttccgcgctcggcactttggcttcgggattcctgacctagcgcagccgccaccacagcgctgcccctgtcgcgatagctctgcgtcgccgctcaacggaggccgacgaggtgacgagaagcggaggccgagcagtcgcacttgcaggtccagtcctgctggtccgcagtccacagttcgccctctaccctctgctctgggatctgcagtaccgtctgcttcggcctcagcactgccatccgcttcagcctctgcactaccgtccaagtcaagtcgctgtatcaccttagcccatggacgctccccatgccttgacggcttgacctccgatggagaggaagcaagttcactgtatttgtagactacactacgccatgctttgccaatgaaccagccatcatgttctacaaaattggaggatgaactagccatgatactttgccaatgaaccagccgaagagatctcctctaccttggcagcacgatcaagaatgctgttgtcacggtccctgcctacttcaatgactcacagagacaggcaattaaaaaagagaattgatctttttatgggcgaagtgtcttgttagcatcaagtaagtggcgacatcacaacccctaca

SEQ ID NO: 2670 - DNA, 2845 bp, Zea Mays
tgaagtgtgacattactatgttactattgtggttttctacctgcgaggtgtggtaactaggtgtgttgtacgttgtatacgtgatgcaccttggtaataagaaggttgtggaatcaggtggtggtaaaacaatgttcttatgtggttgaatagtttgatattattttacttgctgagatgtgtcatctcactcttgcattactcaatgcaggtacttgatacatgttgggaatgaggggagtagcagcacgtccacttacactctcacaataacgctgcccaggcgcagccatgatttaattagaaacttattgtcaaaggaagtttgttttttatatagtcgtgcgcactggttaattcagttcaggtcgtacgtttatctttccttgctagctgattaataatacttagtatgtttttgtcatgatatatgtttataccctgttgcccccttatttatgcaatcttgcaaaggggatgctgccgaaattttatatatggacgtcagaagtgtagttcagtagcattctgggttgtttgtggaacccggggtgttacagcgggatccacctggcagagagaagaagcgggcgcgcgtggggctggctgggctgaatgggccgaaaggccggggaagggggcggctgggcttctttctgtttttcttttatactgaattttctaatccctttttcttttattttatcttttggattcaaatttaaacatgccacaaattcaaacttaaatattccaaacatgtgcatcaaacaaaagaaacatctaggctcagcatgatgcaacatttcatgtctcccctaggttttaatattctaaaaaagtacacctctctcataaatacctagaattctattaaaaggaagagaaaggaaaatctatagaggtgagaaaaggagtaacacctaaatttggtagatattagagaagaaatttaataccccccaattcagggtgttacaagaactttcttttagggagagtaattctttttgagagggcaagtgtttaaattgcttcctatatgctttatcatgtcttcctttttggtgtttgaatcaaggggaaatgtttatggaccaaagcaaccaaagtgcatcaaataccaaaaactacccattttaaatttcttgatcctttcaattggttatctatgttggtttcggtccaaaaataggaaatatgtggattatgtagttaggggaggcttaagtccataatcacacattagtggactagttgcatatgcaagaatatgctttatttataaatgacctcataattgtcaatttggtatcttatacatcttgcttatgcatatgcatccatacaaagtagagtgcatattccaattttctatttaatattttcttgctttggttgtgttgtcatctgaggagattttaaggaaaaagaaccccgacccatttgattaagggattttggtgtttgatgaacaacataactagtgaactaatgttttccaagtggatgtgttttatagttcaaaggatgagaatatattttggactaaggtaatgatgatgcaacacctcaatgaagacattataagacttttattgaatatatacaagtatcaagcaaagtccaagacatggagaagaaatagccacgggtggacggtctgccctccctaggcagatgctttggagggtcacggatggtttggtgcacagaacgaacagtctggtacaccaaccgctagtcactagtgatgttgtatttgatgagactaatggctctccaagagagcaagtatttactatattaaagcaccggtttcaacggtcgtccagcgtcaaaatttttcaaaacacccctacatttctttagaatcaacctgcactcctataatctcatctctactactataataggagagtttatgtaaaaataagttaaaattatgtataagagagtgtttgaaccttggttgttggctccacattcacacccacataatcaatagaaagcatatattttttgatttattaaaacaaaatttatcatatgtcatatatataaaaactgtagcaatgcatgggcatatgactagttgatcttaatgatatagatgatgatgaggttccaatggacgcgccaaggaacatggggattagagatgtgcgaccgtaggaaccacacaaacaagaccaactttctttctcaacaatggtgcaacccccttctccagatgaggaataggtacgtcaagatactagcaacgatcaaggaggagcacatgaagaagaagacaaggaggaagaagatgttccacaggcacctccaccgcgtgtctgagccaccatccgatgaacatgatcctagggttgaagaagctttgaaggatacgaatcgcgtgatggccatgcaggaagagctcaacaaattcaagagaaatgaagtttggggcttggtgccgcgtgcaaagaaaaatattgtgggaaccaaaaaaagatgactatggagtggtgacaaggaacaaggctcgacttgtggcaaaaggttatgtccatgttgcagatttgaacttttaggagacttttgctcctgtagctaggttagagtcaattcgcattttattggcctatgttgtttcaccattattttaagctttttcaaatggatgtaaagagtgccttcctcaatggaccaatcaacgaggaagtgtatgtggagcagctacatggctttgagtatgatatgtatctcaaccatgtgtataagctctctagggccctctatgggcttaaggaagcacaaagaatttctaacttctaattcattcaaggttgagaaagatgat

SEQ ID NO: 2671 - DNA, 1127 bp, Zea Mays
cttcccttctgtggcgctcctgagcctgcggtgcctctctcaatgactagcggggcccacgttgtcatcccgctgcgcgctcacctaacacccgaggtccgatcgtggatctccgtggatctctagcggttagttggcgtggtcctggctataagactatgcctgggcacgcatctgaagccagctgaactccacgcttgggtcgtgcggcctaatcccttgaacctcgctgccgcctgctaggggaaaggcctgccattggctctgctctcgccatgacggttgtggagccgaattgaagcccttggacaatcggtggcgattaccaaaaccggccacaaccttccgctacggggaaatccaccgtgaggccactaatttctcaccgtcgtttcccctacgccgtgattttgcctggtacttggctggccgcaaccaagcattgactcacggtaagacgccttcctctcgaatcacctcgtcttcctctgcgtgtagcacgggtttgtgtaggatttggggccctgtctccgtcgggcggggtgcgccggcgagttgctccgctgcggcgtgctgttcgcccccgctcagccgcgtcgaggtggggaagatgtgctaggaccgctgatttggtcgccaacggccacgatcagagccagtgtgcggttcggccagatcttatgtgggtcgtccgtttgctgatatatttgtaataaagtttactacactatgacaaacatcccgttgtcatatcacatactcttttagttagttatttaattaccctatccatatagtagattaatattttatcaaagtagtccgactatgactattaattgactatcaaatgaactctaattaggttataacctatattaaaattagagtttgttatatcttttctcacatgatttattttaatcaacataaatatagtttcattgattaaatcacctaaattttaagtcatatcattgtaaccgtagctccaaatttagtgattctcgaacccacgatctcgtagcatcgcgtagatcattattacttagtttgtacttatgtttgatgtgatattaatttttcctataccattgtcggggaccataattaggggtaccctcaag

SEQ ID NO: 2672 - DNA, 579 bp, Zea Mays
cttcccttctgtggcgctcctgagcctgcggtgcctctctcaatgactagcggggcccacgttgtcatcccgctgcgcgctcacctaacacccgaggtccgatcgtggatctccgtggatctctagcggttagttggcgtggtcctggctataagactatgcctgggcacgcatctgaagccagctgaactccacgcttgggtcgtgcggcctaatcccttgaacctcgctgccgcctgctaggggaaaggcctgccattggctctgctctcgccatgacggttgtggagccgaattgaagcccttggacaatcggtggcgattaccaaaaccggccacaaccttccgctacggggaaatccaccgtgaggccactaatttctcaccgtcgtttcccctacgccgtgattttgcctggtacttggctggccgcaaccaagcattgactcacggtcaagaataggtaccacatgatgaggcgcatggaggatgctgcgatgtgttcgtgagaggtctaggtcgttgtctcctagtcaactttgggttgctggatcgttgtctccatatgatgtaattatt

SEQ ID NO: 2673 - DNA, 1490 bp, Zea Mays
gtcgtgcgtcctaacccctttaacctcatcaccgcctgcttggggaaaggcccgccgttggctctgctctcgccatggcggttgtggagccgaattgaagcccttggacaatcggtggtgattaccaaaactggccacaaccttccactgcggggaaatccaccgtgaggccactaatttctcgccgtcgtttcccctccgccgtgatttcgccttgtacgtggctggccgcaaccaagcattgactcatgtgaggtcacgagtcacctgaagagcaagttggtacctggaatctcaagtcccaggcaagttgagcccttgaccacttttattacccaataatgttctttattatcacttattcatgcataggcttaattttgatgggacccaataggtcaccctagactgattatcttgttaccttgtttacccctgaactatttggatagtttttgctattgctctatatggttttgggtttaatattacattatgttcatgttccaattatactattattttatttattattcatgtcaagatcattatttttaattggaacatggagcttaacttgagaaacatgtgccaccacaagggtggaatgggacgcccttggctgactaactaggaaagctagtggaggactaccttacccgataggggcaagggcagtaggcgtgtagggaggttcccgggttgattttgctgcgatggcggtcagatgggggattcccgcattgctcttcctagaaaatgtagcgggttttctgaagctagtggaactttgtaaaggcttcgtagtggatccctagccattcacctcggtagtttttaagggtctagctaaccctagtgacatgggatacacgacttgtgggtacagggtacaacctctgcagagtgtaaaactagtatactagccgtgctcgtgatcatgagcagctcaggactctcgcatgattaatttatggaattaaattcaatttgtcatatgcaattcattgcgggtgttgttatcaattttgatctattattactctggttaggtatctacttgcacttagtaactactaataaaattttgaccaactttaaaagcaatgctcagctttaatcattctctttggtaagccttacacttcacatgagctcccacctttggcgagtttatgcacattattccccacaacttgttgagcaaagaacatatgtgagctcacccgtgctgtctaaccacccccccacaagtcaagaacaggtaccgcaggatgaggcgcatggaggatgctgagatgtgttcgtgagaggtctagaccgtcgtctcccagtcagcttggggttgctggatcgttgtcttcatatgatgtaattatttatttattttatacagaactcctattatatagtaaagatgtgacatttttttctgtaccatgagtcatcatgtgtgtaagacttggtcctaacacacttggtgattattt

SEQ ID NO: 2674 - DNA, 3793 bp, Zea Mays
ctttgttcactttttttcttggcgtcttatctcttcccttctctgcctcgcttcgcttcctacccacgccacgcgtgtgttcttggcagccacccaatccccgcctcgcgaaatcagacgccaaatccccttatcttatcatcaaatcgatcgccaacgggcatgatctgatggctccctcatcatagcctctgctgctgcaccgcagcaaaatggccctggtttagtttagtcctcaagatcccgcctttctggtgctctgtttggctagtgtcgtgccgccgcgcgaggacccggagattcgattccggtccggtgtatctctaggctgcttggtttgggttaggatttagtgggcagggttgtgcagctggtgtctcgtggaggaagaatttcgtgggaggattttgaccgggtttgggcaaagagcgcgccgttcgggaggaggtgattctcgcgtggttgcgtgctttgctgggagtctgctgcggccaccgccggtatggcgacgcacttcacgccgtcgcaggcgcacgcggcgtcgcaccacgcggcgcaccaccactcggcggccgccgcggcggcggtcacggccacggccaccgcgcgactgcacccgtccgcgccgccggcctcggcgtcggccgcggccgcggcgctgtgcccgccacacctcctcgcggcggcttccccggccgcctcctcctccgcggcgtgccagcccgcccacaggcctatcttcgttggccacggcgcgccgtgggcgcagcagccccagcgcaccgcggcggcggccgccgcgctcggtccggagtttcggcgcgcgcgcaccaccaagaccatctccaagcgcacccgtggcggcggcggcggagggggcgcacaggaccgcgggcgcgtgtcctcagccgccgcgggtcgctgtgtcgagaagctgctccgcgtcgcgcctgaagataggcgagggcttggttcggccctctcgtcgtttcggggcgagctacttggtcctgaggactactgccagatcctccgggggctcggcgacagggataaatctgcacttcgtgcattcgaggtgttctatgccgcactacccttagttgggggtggtgctgttgacaagggaaaacttctgactgccgccattggtgcacttggcaagatgggccggccagacctcgcgaggagggcttttgatactggcattgcagggagctatggcaatacggtgtttgcgcactctgcgcttatctcagcttatgccaggagtgggcttgcaactgaggccatgggggtgcttgagtcgatgaaaggtgcaggattgcggcctaccacggtatcatacaatgcagtgattgatgcatgtggaaaagggggtgttgaccttaggttcacacttggatatttccgtcagatgctgcaggatgggctctgtccggaccgtaaaacatttaactcacttcttgctgcatgtagccgggctgggcatttggaagatgctcgcactgtctttgatgaaatgatccatcttggtagtgggcgtgacatttacacttacaacacattcgtcgatgctatttgcaagtgtggcaacatggggctggctctgcaagttgtattggatatggaagcaaacaatgccaagccaaatgtcgttacatatagtacgcttatggatggattctccaaactggagaaatatgatgaggcactcaagttgcgtgaaaagatgaagtctttgagaatacaactggaccgagtttgctacaacaccttactggccatatatgtgaagacagggaaatatgatgaaattgctactgtatgtgaagaaatggagaaattgggcattgagaaggacactgttacttacaattccttgattaatggatatggaaagcaaggacgcttggacatggtcgctttccttgttcaagatatgcgggcgcaaggcgtagctcctagtgtgctgacatactcaactttgatagatatctattcgaaggcaggaatgcatggagatgcatttaatgtctatttggattttaaggagtctggtctaaaggcagatgttgttctgttcagctcttttattgatactttggccaagaatggcttggttgagtgtgctttgtctttgcttgatgagatgatgaagatgggtatcaagccaaatgttgtaacctacaacacaatcattgatgcatttggcaagtcgaagatttttactgaggaggattctgatattggtgacatgggaattgttggggtttatggtggccaggttgtaagggtcactaatccagtgataagaggagggcgctctgccactgatgttaggatgaggaggtcacaggaactatttttcattctggaattgtttcagaagatggtccagcagggtgtacggccaaatgttgtaacattttctgcgatcctgaatgcttgcagtcgctgtaatagttttgaagatgcagcccttttactggaacagcttcgcttatttgataactctgtctatggggttgcgtatgggcttttgatgggccatcgagaagcttggtctcaagcacggtccctctttaatcagctgggccgcatggattctccaacatcttctgccttttacaatgctcttaccgatgtgctatggcatttcggccaggtaggtttactccttagcgtacacatggatccaagtgcagttattgtatattaggattatgagttcagtattttttttgtcataatcctattttacactgataattttttagaaagaagactattctatttcatttttgacaacttcaattatttgtcatatttcagtcctccacccttttgtcgcatcagttatgtaaactttgtccacacaagtaattaaatctatgtccgtggccattttcagaggcaaggagctcagcaagttgtgcttgaaggggtaaaccgccgtgtttgggagaacacatggggtgacttctgcttggacctgcacctcatgtcatgtggtgcagctcaagcaatggtgcatgcatggctcctgaacgtgcgctctattgtttttgaaggtcgagctatgcctgagtttttaagcattctgacaggctggggaaagcatagcaaggtagctggatcaagcaccctccgtcgagtcattgaagcgctgctcctttcaattggagcgccgtttcaggccgagcgcttcaacatcgggaggtttgtgtcacccagtgccttggtgtctgcctggctgagagagtccggcaccattaacatcctcctcctccgcaacgagcgaacgcaacatgcaaacgcgtccaatctggtaccgaggttacaggcgttgcagttatagccccttgatctcatctccttgtccctggtagggttggttcagttctgtcacaagcttcgctctgtttttttttatattcatcttcattgagaagattgtagagtaccataggctgagggaatagctcgcttgttgaatcccagtgttttagtccggtttagccatgaatgtaaaaatgttgtaaaattgtcagcctgccttacaactccttccatcaaggcaaaacgagtgcaatttctatttcttcacgaaaggagctccacggctggaaacctcagacccgtgcctcgcttccttaactgcaaagccctcgtgctcctctttcggtttgtttgatgaaagctacacctggccattactgctttctccctttttggctcgtgatgcctttgctgctttgaggagatgccagctctgccgaagatggagaga

SEQ ID NO: 2675 - DNA, 1242 bp, Zea Mays
atttcattggagacttcagatgccactgctgttgtagctctttgtatcgtgccagtgtttctataaaaatacactgtgtcagtcgtaaatgcaacaattgccaatgtgttaacctggacattaaactgtattttagcagcttaaactagtcgctgtaatagttttgaagatgcagcccttttactggaacagcttcgcttatttgataactctgtctatggggttgcgtatgggcttttgatgggccatcgagaagcttggtctcaagcacggtccctctttaatcagctgggccgcatggattctccaacatcttctgccttttacaatgctcttaccgatgtgctatggcatttcggccagaggcaaggagctcagcaagttgtgcttgaaggggtaaaccgccgtgtttgggagaacacatggggtgacttctgcttggacctgcacctcatgtcatgtggtgcagctcaagcaatggtgcatgcatggctcctgaacgtgcgctctattgtttttgaaggtcgagctatgcctgagtttttaagcattctgacaggctggggaaagcatagcaaggtagctggatcaagcaccctccgtcgagtcattgaagcgctgctcctttcaattggagcgccgtttcaggccgagcgcttcaacatcgggaggtttgtgtcacccagtgccttggtgtctgcctggctgagagagtccggcaccattaacatcctcctcctccgcaacgagcgaacgcaacatgcaaacgcgtccaatctggtaccgaggttacaggcgttgcagttatagccccttgatctcatctccttgtccctggtagggttggttcagttctgtcacaagcttcgctctgtttttttttatattcatcttcattgagaagattgtagagtaccataggctgagggaatagctcgcttgttgaatcccagtgttttagtccggtttagccatgaatgtaaaaatgttgtaaaattgtcagcctgccttacaactccttccatcaaggcaaaacgagtgcaatttctatttcttcacgaaaggagctccacggctggaaacctcagacccgtgcctcgcttccttaactgcaaagccctcgtgctcctctttcggtttgtttgatgaaagctacacctggccattactgctttctccctttttggctcgtgatgcctttgctgctttgaggagatgccagctctgccgaagatggagaga

SEQ ID NO: 2676 - DNA, 3277 bp, Zea Mays
gaaaattgccgaaacagaaaaaatgggcataaaatactttttgagaaggctacaaaatatcaaacaaaaactaagaccagatgcataaaatgccaccaggagaccagcaagcagccccggcagttttttattgccattattattactactattgtattttattcaatctccatctggatgcgtgtgtgtgaccggtgagcgagacagattccacagcaatttgctcctcttccacgcacaggcaagactgctccccagaaaagattgtagttttcatcgatttagccggtttctgcccggggggatcgctgctggagatctcagagaaccgggaggctccgagcttttgctccgtttgcgtcgaatctgcctcgggagcggagaaaggagcggccttccgagctcgtaggggccgtccctgagaaggcgagaggggacgcggcggcggcggagtcagctctagggcgctcgtggaagtcggtgatgccggtggtttgaggacgaggcggcctcggtggttttgaggaagccagcctctgccgcggcaaggatggactccagcggggaggaactcctgaagaagatccgggaactggaggttgggcaggcgcagctcaagcaggagatgtctaagctaatacccggcgctggggagcgtcggcgctcgcaatccgtctcgccgcggcgcggcgtgccggtgccgccgccaccgccggccaaggcgaaggcgggggcgccaggtaggcggctgtccggggggtttgagggcgggcagcgcgcgtgggcccgtgggtcggcgtctttcccgcactcatcaccgctgcagcgggagggccgcgcaggcgctggagacgctagcaccagcgctaggctgccggagaggcagtactccagggtgcttcagtcaatggggcagtccgtccacattcttgacctcgacgggaggatcatatactgttgttgcttgcttgagggccaacattgatgagtcacaagatgcaccaggagctccctacaagatcaaaattcgttttgagttgcatttcttatgaatcagtctgcggagaatctgtttggctatcctgcatcagaagcccttggtcaggatgccctcatgcttctggttgattcccatgaccacaatgcgtgattcccgccaattggagcagatattttgtaagcctccgacctctgcaaggtcccagtcagaatcatctatgacatcttgtgatgggagttgcagcaacactagtcacagaatcaattcgttgaatagaagttcttttgattctaatctacccctgcaaagcactttagcatccaagataacgaatttggctaccaaggtcacaaataaagttcgttctcgggtcaggacagacgagaatgacgatggtggcagtggtgagagccattgcttggatcgtggtgcaaaggaagagccaacatctagcggaacaagcacaccaagaggggatgcaccacatggtccctttgctacagaagagaactcacctgggaaatcaacgaacccaaacagcgacgaatcagaaggaaaagtaggtctgcacaagattttgggttctaaggcagaggcactattgaacaagaaagggatatcatggccttggaaagggcgcgagaatgagggacctgatgaaagaaaccatgtgatattgccgtggttgcatggtggccaagagaatggtgtgaatcatcagaaggtttctgattctagtatatctccagacgcccaaggcgctgaacacaaccaacctagcaaaaatgaggcatcaggttcctggtcctctttcaacaataacagcacaggcagtgcaagcagcacgggaagcactaatagcagtgctctctacaaagtagatcatgaagcagattgtctggattatgagatcctgtgggaagaccttgtcattggagaacaaataggtcaaggctcttgtgggacagtatatcatgctttgtggtatggttcggatgtggctgttaaagttttctccaagcaagaatattcagaagaagtgatactgacctttcgacaagaggtatcccttatgaagaaattgcgccatcctaacatactgctcttcatgggtgcggttatgtctccacaacgcctttgtattgtatcagagtttctcccccgtggaagcttgtttcgcttacttcaaaggagcgctaccaagttggatgtgagacggcgtgtccacatggctttagatattgtaaggggcatgaattatcttcaccattccagcccgcctatcattcatcgagatttaaaatcatctaaccttttggtcgacaagaactggattgtgaaggtggcagactttggtctttcacgtctcaagcgtgaaactttcttgacaacaaaaacaggaaaaggaacaccccaatggatggcgcccgaggtgttgcgcaatgaaccttccgatgagaagtctgatgtgtacagttacggggttatcctgtgggaacttgttactcagaagataccctgggaaaatctgaactcaatgcaggtcattggtgcagtgggttttatgaaccaaaggttggatatcccaagtgaagtagatcctcagtggaaatcaattatcctgagctgctgggaaagcgacccgcagcaacggccgtcgttccaggagcttcttgagaggctccgggagctgcagaggcactacgccatccagcaccggaacacaaagaacagcatcgaggagtaaagaacacaatgcgacctctcagagcggcttgcttcgaagcattttgcgagcgaacgaacgaagaaccccaggtctctagaagggcctggaccctcctgtactgtatggttttgcttctgcggaacagccaaggctggaagaagtttgttgtacagacgggggtacgttcttctttgtttgacagggcaattgtgactgtaatctctgggtcctgacacccaagggtagggtagagactatagagtgagtagtgactgagctccggattgctggcgcatttgggttcttctgattcgtggcaatgcaaatgcgtggttaacaataacatccaatccggggcttgtgtttctggaaaagggcatgatgatgtgtagattgtttgctctgacaagagtggtgcgtacatgtgatcggttgtgatcatgcgtgattgtgagtttaatcgatgtagtaaaatcttaatattctaaaatgcctgcgtttccttgaaaaatagtaaggccacggcaacagataaatctccattatcg

SEQ ID NO: 2677 - DNA, 2950 bp, Zea Mays
gaaggctacaaaatatcaaacaaaaactaagaccagatgcataaaatgccaccaggagaccagcaagcagccccggcagttttttattgccattattattactactattgtattttattcaatctccatctggatgcgtgtgtgtgaccggtgagcgagacagattccacagcaatttgctcctcttccacgcacaggcaagactgctccccagaaaagattgtagttttcatcgatttagccggtttctgcccggggggatcgctgctggagatctcagagaaccgggaggctccgagcttttgctccgtttgcgtcgaatctgcctcgggagcggagaaaggagcggccttccgagctcgtaggggccgtccctgagaaggcgagaggggacgcggcggcggcggagtcagctctagggcgctcgtggaagtcggtgatgccggtggtttgaggacgaggcggcctcggtggttttgaggaagccagcctctgccgcggcaaggatggactccagcggggaggaactcctgaagaagatccgggaactggaggttgggcaggcgcagctcaagcaggagatgtctaagctaatacccggcgctggggagcgtcggcgctcgcaatccgtctcgccgcggcgcggcgtgccggtgccgccgccaccgccggccaaggcgaaggcgggggcgccaggtaggcggctgtccggggggtttgagggcgggcagcgcgcgtgggcccgtgggtcggcgtctttcccgcactcatcaccgctgcagcgggagggccgcgcaggcgctggagacgctagcaccagcgctaggctgccggagaggcagtactccagggtgcttcagtcaatggggcagtccgtccacattcttgacctcgacgggaggatcatatactggaatcagtctgcggagaatctgtttggctatcctgcatcagaagcccttggtcaggatgccctcatgcttctggttgattcccatgaccacaatgcggctaccaaggtcacaaataaagttcgttctcgggtcaggacagacgagaatgacgatggtggcagtggtgagagccattgcttggatcgtggtgcaaaggaagagccaacatctagcggaacaagcacaccaagaggggatgcaccacatggtccctttgctacagaagagaactcacctgggaaatcaacgaacccaaacagcgacgaatcagaaggaaaagtaggtctgcacaagattttgggttctaaggcagaggcactattgaacaagaaagggatatcatggccttggaaagggcgcgagaatgagggacctgatgaaagaaaccatgtgatattgccgtggttgcatggtggccaagagaatggtgtgaatcatcagaaggtttctgattctagtatatctccagacgcccaaggcgctgaacacaaccaacctagcaaaaatgaggcatcaggttcctggtcctctttcaacaataacagcacaggcagtgcaagcagcacgggaagcactaatagcagtgctctctacaaagtagatcatgaagcagattgtctggattatgagatcctgtgggaagaccttgtcattggagaacaaataggtcaaggctcttgtgggacagtatatcatgctttgtggtatggttcggatgtggctgttaaagttttctccaagcaagaatattcagaagaagtgatactgacctttcgacaagaggtatcccttatgaagaaattgcgccatcctaacatactgctcttcatgggtgcggttatgtctccacaacgcctttgtattgtatcagagtttctcccccgtggaagcttgtttcgcttacttcaaaggagcgctaccaagttggatgtgagacggcgtgtccacatggctttagatattgtaaggggcatgaattatcttcaccattccagcccgcctatcattcatcgagatttaaaatcatctaaccttttggtcgacaagaactggattgtgaaggtggcagactttggtctttcacgtctcaagcgtgaaactttcttgacaacaaaaacaggaaaaggaacaccccaatggatggcgcccgaggtgttgcgcaatgaaccttccgatgagaagtctgatgtgtacagttacggggttatcctgtgggaacttgttactcagaagataccctgggaaaatctgaactcaatgcaggtcattggtgcagtgggttttatgaaccaaaggttggatatcccaagtgaagtagatcctcagtggaaatcaattatcctgagctgctgggaaagcgacccgcagcaacggccgtcgttccaggagcttcttgagaggctccgggagctgcagaggcactacgccatccagcaccggaacacaaagaacagcatcgaggagtaaagaacacaatgcgacctctcagagcggcttgcttcgaagcattttgcgagcgaacgaacgaagaaccccaggtctctagaagggcctggaccctcctgtactgtatggttttgcttctgcggaacagccaaggctggaagaagtttgttgtacagacgggggtacgttcttctttgtttgacagggcaattgtgactgtaatctctgggtcctgacacccaagggtagggtagagactatagagtgagtagtgactgagctccggattgctggcgcatttgggttcttctgattcgtggcaatgcaaatgcgtggttaacaataacatccaatccggggcttgtgtttctggaaaagggcatgatgatgtgtagattgtttgctctgacaagagtggtgcgtacatgtgatcggttgtgatcatgcgtgattgtgagtttaatcgatgtagtaaaatcttaatattctaaaatgcctgcgtttccttgaaaaatagtaaggccacggcaacagataaatctccattatcg

SEQ ID NO: 2678 - DNA, 3283 bp, Zea Mays
caaaatatcaaacaaaaactaagaccagatgcataaaatgccaccaggagaccagcaagcagccccggcagttttttattgccattattattactactattgtattttattcaatctccatctggatgcgtgtgtgtgaccggtgagcgagacagattccacagcaatttgctcctcttccacgcacaggcaagactgctccccagaaaagattgtagttttcatcgatttagccggtttctgcccggggggatcgctgctggagatctcagagaaccgggaggctccgagcttttgctccgtttgcgtcgaatctgcctcgggagcggagaaaggagcggccttccgagctcgtaggggccgtccctgagaaggcgagaggggacgcggcggcggcggagtcagctctagggcgctcgtggaagtcggtgatgccggtggtttgaggacgaggcggcctcggtggttttgaggaagccagcctctgccgcggcaaggatggactccagcggggaggaactcctgaagaagatccgggaactggaggttgggcaggcgcagctcaagcaggagatgtctaagctaatacccggcgctggggagcgtcggcgctcgcaatccgtctcgccgcggcgcggcgtgccggtgccgccgccaccgccggccaaggcgaaggcgggggcgccaggtaggcggctgtccggggggtttgagggcgggcagcgcgcgtgggcccgtgggtcggcgtctttcccgcactcatcaccgctgcagcgggagggccgcgcaggcgctggagacgctagcaccagcgctaggctgccggagaggcagtactccagggtgcttcagtcaatggggcagtccgtccacattcttgacctcgacgggaggatcatatactggaatcagtctgcggagaatctgtttggctatcctgcatcagaagcccttggtcaggatgccctcatgcttctggttgattcccatgaccacaatgcggtaaataacatcttccaacgtatttctatgggtgaaagttggactgggaagtttccagttaagaacaagcaaggacatagattttcagctgttgccaccaatacacctttctatgatgaagatggcagtttgatgggtttcatttgtgtttcaagtgattcccgccaattggagcagatattttgtaagcctccgacctctgcaaggtcccagtcagaatcatctatgacatcttgtgatgggagttgcagcaacactagtcacagaatcaattcgttgaatagaagttcttttgattctaatctacccctgcaaagcactttagcatccaagataacgaatttggctaccaaggtcacaaataaagttcgttctcgggtcaggacagacgagaatgacgatggtggcagtggtgagagccattgcttggatcgtggtgcaaaggaagagccaacatctagcggaacaagcacaccaagaggggatgcaccacatggtccctttgctacagaagagaactcacctgggaaatcaacgaacccaaacagcgacgaatcagaaggaaaagtaggtctgcacaagattttgggttctaaggcagaggcactattgaacaagaaagggatatcatggccttggaaagggcgcgagaatgagggacctgatgaaagaaaccatgtgatattgccgtggttgcatggtggccaagagaatggtgtgaatcatcagaaggtttctgattctagtatatctccagacgcccaaggcgctgaacacaaccaacctagcaaaaatgaggcatcaggttcctggtcctctttcaacaataacagcacaggcagtgcaagcagcacgggaagcactaatagcagtgctctctacaaagtagatcatgaagcagattgtctggattatgagatcctgtgggaagaccttgtcattggagaacaaataggtcaaggctcttgtgggacagtatatcatgctttgtggtatggttcggatgtggctgttaaagttttctccaagcaagaatattcagaagaagtgatactgacctttcgacaagaggtatcccttatgaagaaattgcgccatcctaacatactgctcttcatgggtgcggttatgtctccacaacgcctttgtattgtatcagagtttctcccccgtggaagcttgtttcgcttacttcaaaggagcgctaccaagttggatgtgagacggcgtgtccacatggctttagatattgtaaggggcatgaattatcttcaccattccagcccgcctatcattcatcgagatttaaaatcatctaaccttttggtcgacaagaactggattgtgaaggtggcagactttggtctttcacgtctcaagcgtgaaactttcttgacaacaaaaacaggaaaaggaacaccccaatggatggcgcccgaggtgttgcgcaatgaaccttccgatgagaagtctgatgtgtacagttacggggttatcctgtgggaacttgttactcagaagataccctgggaaaatctgaactcaatgtcattggtgcagtgggttttatgaaccaaaggttggatatcccaagtgaagtagatcctcagtggaaatcaattatcctgagctgctgggaaagcgacccgcagcaacggccgtcgttccaggagcttcttgagaggctccgggagctgcagaggcactacgccatccagcaccggaacacaaagaacagcatcgaggagtaaagaacacaatgcgacctctcagagcggcttgcttcgaagcattttgcgagcgaacgaacgaagaaccccaggtctctagaagggcctggaccctcctgtactgtatggttttgcttctgcggaacagccaaggctggaagaagtttgttgtacagacgggggtacgttcttctttgtttgacagggcaattgtgactgtaatctctgggtcctgacacccaagggtagggtagagactatagagtgagtagtgactgagctccggattgctggcgcatttgggttcttctgattcgtggcaatgcaaatgcgtggttaacaataacatccaatccggggcttgtgtttctggaaaagggcatgatgatgtgtagattgtttgctctgacaagagtggtgcgtacatgtgatcggttgtgatcatgcgtgattgtgagtttaatcgatgtagtaaaatcttaatattctaaaatgcctgcgtttccttgaaaaatagtaaggccacggcaacagataaatctccattatcg

SEQ ID NO: 2679 - DNA, 2891 bp, Zea Mays
caaacaaaaactaagaccagatgcataaaatgccaccaggagaccagcaagcagccccggcagttttttattgccattattattactactattgtattttattcaatctccatctggatgcgtgtgtgtgaccggtgagcgagacagattccacagcaatttgctcctcttccacgcacaggcaagactgctccccagaaaagattgtagttttcatcgatttagccggtttctgcccggggggatcgctgctggagatctcagagaaccgggaggctccgagcttttgctccgtttgcgtcgaatctgcctcgggagcggagaaaggagcggccttccgagctcgtaggggccgtccctgagaaggcgagaggggacgcggcggcggcggagtcagctctagggcgctcgtggaagtcggtgatgccggtggtttgaggacgaggcggcctcggtggttttgaggaagccagcctctgccgcggcaaggatggactccagcggggaggaactcctgaagaagatccgggaactggaggttgggcaggcgcagctcaagcaggagatgtctaagctaatacccggcgctggggagcgtcggcgctcgcaatccgtctcgccgcggcgcggcgtgccggtgccgccgccaccgccggccaaggcgaaggcgggggcgccaggtaggcggctgtccggggggtttgagggcgggcagcgcgcgtgggcccgtgggtcggcgtctttcccgcactcatcaccgctgcagcgggagggccgcgcaggcgctggagacgctagcaccagcgctaggctgccggagaggcagtactccagggtgcttcagtcaatggggcagtccgtccacattcttgacctcgacgggaggatcatatactggaatcagtctgcggagaatctgtttggctatcctgcatcagaagcccttggtcaggatgccctcatgcttctggttgattcccatgaccacaatgcgacgagaatgacgatggtggcagtggtgagagccattgcttggatcgtggtgcaaaggaagagccaacatctagcggaacaagcacaccaagaggggatgcaccacatggtccctttgctacagaagagaactcacctgggaaatcaacgaacccaaacagcgacgaatcagaaggaaaagtaggtctgcacaagattttgggttctaaggcagaggcactattgaacaagaaagggatatcatggccttggaaagggcgcgagaatgagggacctgatgaaagaaaccatgtgatattgccgtggttgcatggtggccaagagaatggtgtgaatcatcagaaggtttctgattctagtatatctccagacgcccaaggcgctgaacacaaccaacctagcaaaaatgaggcatcaggttcctggtcctctttcaacaataacagcacaggcagtgcaagcagcacgggaagcactaatagcagtgctctctacaaagtagatcatgaagcagattgtctggattatgagatcctgtgggaagaccttgtcattggagaacaaataggtcaaggctcttgtgggacagtatatcatgctttgtggtatggttcggatgtggctgttaaagttttctccaagcaagaatattcagaagaagtgatactgacctttcgacaagaggtatcccttatgaagaaattgcgccatcctaacatactgctcttcatgggtgcggttatgtctccacaacgcctttgtattgtatcagagtttctcccccgtggaagcttgtttcgcttacttcaaaggagcgctaccaagttggatgtgagacggcgtgtccacatggctttagatattgtaaggggcatgaattatcttcaccattccagcccgcctatcattcatcgagatttaaaatcatctaaccttttggtcgacaagaactggattgtgaaggtggcagactttggtctttcacgtctcaagcgtgaaactttcttgacaacaaaaacaggaaaaggaacaccccaatggatggcgcccgaggtgttgcgcaatgaaccttccgatgagaagtctgatgtgtacagttacggggttatcctgtgggaacttgttactcagaagataccctgggaaaatctgaactcaatgcaggtcattggtgcagtgggttttatgaaccaaaggttggatatcccaagtgaagtagatcctcagtggaaatcaattatcctgagctgctgggaaagcgacccgcagcaacggccgtcgttccaggagcttcttgagaggctccgggagctgcagaggcactacgccatccagcaccggaacacaaagaacagcatcgaggagtaaagaacacaatgcgacctctcagagcggcttgcttcgaagcattttgcgagcgaacgaacgaagaaccccaggtctctagaagggcctggaccctcctgtactgtatggttttgcttctgcggaacagccaaggctggaagaagtttgttgtacagacgggggtacgttcttctttgtttgacagggcaattgtgactgtaatctctgggtcctgacacccaagggtagggtagagactatagagtgagtagtgactgagctccggattgctggcgcatttgggttcttctgattcgtggcaatgcaaatgcgtggttaacaataacatccaatccggggcttgtgtttctggaaaagggcatgatgatgtgtagattgtttgctctgacaagagtggtgcgtacatgtgatcggttgtgatcatgcgtgattgtgagtttaatcgatgtagtaaaatcttaatattctaaaatgcctgcgtttccttgaaaaatagtaaggccacggcaacagataaatctccattatcg

SEQ ID NO: 2680 - DNA, 2111 bp, Zea Mays
aaaatgccaccaggagaccagcaagcagccccggcagttttttattgccattattattactactattgtattttattcaatctccatctggatgcgtgtgtgtgaccggtgagcgagacagattccacagcaatttgctcctcttccacgcacaggcaagactgctccccagaaaagattgtagttttcatcgatttagccggtttctgcccggggggatcgctgctggagatctcagagaaccgggaggctccgagcttttgctccgtttgcgtcgaatctgcctcgggagcggagaaaggagcggccttccgagctcgtaggggccgtccctgagaaggcgagaggggacgcggcggcggcggagtcagctctagggcgctcgtggaagtcggtgatgccggtggtttgaggacgaggcggcctcggtggttttgaggaagccagcctctgccgcggcaaggatggactccagcggggaggaactcctgaagaagatccgggaactggaggttgggcaggcgcagctcaagcaggagatgtctaagctaatacccggcgctggggagcgtcggcgctcgcaatccgtctcgccgcggcgcggcgtgccggtgccgccgccaccgccggccaaggcgaaggcgggggcgccaggtaggcggctgtccggggggtttgagggcgggcagcgcgcgtgggcccgtgggtcggcgtctttcccgcactcatcaccgctgcagcgggagggccgcgcaggcgctggagacgctagcaccagcgctaggctgccggagaggcagtactccagggtgcttcagtcaatggggcagtccgtccacattcttgacctcgacgggaggatcatatactggaatcagtctgcggagaatctgtttggctatcctgcatcagaagcccttggtcaggatgccctcatgcttctggttgattcccatgaccacaatgcggtaaataacatcttccaacgtatttctatgggtgaaagttggactgggaagtttccagttaagaacaagcaaggacatagattttcagctgttgccaccaatacacctttctatgatgaagatggcagtttgatgggtttcatttgtgtttcaagtgattcccgccaattggagcagatattttgtaagcctccgacctctgcaaggtcccagtcagaatcatctatgacatcttgtgatgggagttgcagcaacactagtcacagaatcaattcgttgaatagaagttcttttgattctaatctacccctgcaaagcactttagcatccaagataacgaatttggctaccaaggtcacaaataaagttcgttctcgggtcaggacagacgagaatgacgatggtggcagtggtgagagccattgcttggatcgtggtgcaaaggaagagccaacatctagcggaacaagcacaccaagaggggatgcaccacatggtccctttgctacagaagagaactcacctgggaaatcaacgaacccaaacagcgacgaatcagaaggaaaagtaggtctgcacaagattttgggttctaaggcagaggcactattgaacaagaaagggatatcatggccttggaaagggcgcgagaatgagggacctgatgaaagaaaccatgtgatattgccgtggttgcatggtggccaagagaatggtgtgaatcatcagaaggtttctgattctagtatatctccagacgcccaaggcgctgaacacaaccaacctagcaaaaatgaggcatcaggttcctggtcctctttcaacaataacagcacaggcagtgcaagcagcacgggaagcactaatagcagtgctctctacaaagtagatcatgaagcagattgtctggattatgagatcctgtgggaagaccttgtcattggagaacaaataggtcaaggctcttgtgggacagtatatcatgctttgtggtatggttcggatgtggctgttaaagttttctccaagcaagaatattcagaagaagtgatactgacctttcgacaagaggcatgcagctcatcctagaactgcagaggaattattaggttatggaccaaaataaagagacttcaaacaaat

SEQ ID NO: 2681 - DNA, 3085 bp, Zea Mays
aaaatgccaccaggagaccagcaagcagccccggcagttttttattgccattattattactactattgtattttattcaatctccatctggatgcgtgtgtgtgaccggtgagcgagacagattccacagcaatttgctcctcttccacgcacaggcaagactgctccccagaaaagattgtagttttcatcgatttagccggtttctgcccggggggatcgctgctggagatctcagagaaccgggaggctccgagcttttgctccgtttgcgtcgaatctgcctcgggagcggagaaaggagcggccttccgagctcgtaggggccgtccctgagaaggcgagaggggacgcggcggcggcggagtcagctctagggcgctcgtggaagtcggtgatgccggtggtttgaggacgaggcggcctcggtggttttgaggaagccagcctctgccgcggcaaggatggactccagcggggaggaactcctgaagaagatccgggaactggaggttgggcaggcgcagctcaagcaggagatgtctaagctaatacccggcgctggggagcgtcggcgctcgcaatccgtctcgccgcggcgcggcgtgccggtgccgccgccaccgccggccaaggcgaaggcgggggcgccaggtaggcggctgtccggggggtttgagggcgggcagcgcgcgtgggcccgtgggtcggcgtctttcccgcactcatcaccgctgcagcgggagggccgcgcaggcgctggagacgctagcaccagcgctaggctgccggagaggcagtactccagggtgcttcagtcaatggggcagtccgtccacattcttgacctcgacgggaggatcatatactggaatcagtctgcggagaatctgtttggctatcctgcatcagaagcccttggtcaggatgccctcatgcttctggttgattcccatgaccacaatgcgtgattcccgccaattggagcagatattttgtaagcctccgacctctgcaaggtcccagtcagaatcatctatgacatcttgtgatgggagttgcagcaacactagtcacagaatcaattcgttgaatagaagttcttttgattctaatctacccctgcaaagcactttagcatccaagataacgaatttggctaccaaggtcacaaataaagttcgttctcgggtcaggacagacgagaatgacgatggtggcagtggtgagagccattgcttggatcgtggtgcaaaggaagagccaacatctagcggaacaagcacaccaagaggggatgcaccacatggtccctttgctacagaagagaactcacctgggaaatcaacgaacccaaacagcgacgaatcagaaggaaaagtaggtctgcacaagattttgggttctaaggcagaggcactattgaacaagaaagggatatcatggccttggaaagggcgcgagaatgagggacctgatgaaagaaaccatgtgatattgccgtggttgcatggtggccaagagaatggtgtgaatcatcagaaggtttctgattctagtatatctccagacgcccaaggcgctgaacacaaccaacctagcaaaaatgaggcatcaggttcctggtcctctttcaacaataacagcacaggcagtgcaagcagcacgggaagcactaatagcagtgctctctacaaagtagatcatgaagcagattgtctggattatgagatcctgtgggaagaccttgtcattggagaacaaataggtcaaggctcttgtgggacagtatatcatgctttgtggtatggttcggatgtggctgttaaagttttctccaagcaagaatattcagaagaagtgatactgacctttcgacaagaggtatcccttatgaagaaattgcgccatcctaacatactgctcttcatgggtgcggttatgtctccacaacgcctttgtattgtatcagagtttctcccccgtggaagcttgtttcgcttacttcaaaggagcgctaccaagttggatgtgagacggcgtgtccacatggctttagatattgtaaggggcatgaattatcttcaccattccagcccgcctatcattcatcgagatttaaaatcatctaaccttttggtcgacaagaactggattgtgaaggtggcagactttggtctttcacgtctcaagcgtgaaactttcttgacaacaaaaacaggaaaaggaacaccccaatggatggcgcccgaggtgttgcgcaatgaaccttccgatgagaagtctgatgtgtacagttacggggttatcctgtgggaacttgttactcagaagataccctgggaaaatctgaactcaatgcagtgggttttatgaaccaaaggttggatatcccaagtgaagtagatcctcagtggaaatcaattatcctgagctgctgggaaagcgacccgcagcaacggccgtcgttccaggagcttcttgagaggctccgggagctgcagaggcactacgccatccagcaccggaacacaaagaacagcatcgaggagtaaagaacacaatgcgacctctcagagcggcttgcttcgaagcattttgcgagcgaacgaacgaagaaccccaggtctctagaagggcctggaccctcctgtactgtatggttttgcttctgcggaacagccaaggctggaagaagtttgttgtacagacgggggtacgttcttctttgtttgacagggcaattgtgactgtaatctctgggtcctgacacccaagggtagggtagagactatagagtgagtagtgactgagctccggattgctggcgcatttgggttcttctgattcgtggcaatgcaaatgcgtggttaacaataacatccaatccggggcttgtgtttctggaaaagggcatgatgatgtgtagattgtttgctctgacaagagtggtgcgtacatgtgatcggttgtgatcatgcgtgattgtgagtttaatcgatgtagtaaaatcttaatattctaaaatgcctgcgtttccttgaaaaatagtaaggccacggcaacagataaatctccattatcg

SEQ ID NO: 2682 - DNA, 3098 bp, Zea Mays
aaaatgccaccaggagaccagcaagcagccccggcagttttttattgccattattattactactattgtattttattcaatctccatctggatgcgtgtgtgtgaccggtgagcgagacagattccacagcaatttgctcctcttccacgcacaggcaagactgctccccagaaaagattgtagttttcatcgatttagccggtttctgcccggggggatcgctgctggagatctcagagaaccgggaggctccgagcttttgctccgtttgcgtcgaatctgcctcgggagcggagaaaggagcggccttccgagctcgtaggggccgtccctgagaaggcgagaggggacgcggcggcggcggagtcagctctagggcgctcgtggaagtcggtgatgccggtggtttgaggacgaggcggcctcggtggttttgaggaagccagcctctgccgcggcaaggatggactccagcggggaggaactcctgaagaagatccgggaactggaggttgggcaggcgcagctcaagcaggagatgtctaagctaatacccggcgctggggagcgtcggcgctcgcaatccgtctcgccgcggcgcggcgtgccggtgccgccgccaccgccggccaaggcgaaggcgggggcgccaggtaggcggctgtccggggggtttgagggcgggcagcgcgcgtgggcccgtgggtcggcgtctttcccgcactcatcaccgctgcagcgggagggccgcgcaggcgctggagacgctagcaccagcgctaggctgccggagaggcagtactccagggtgcttcagtcaatggggcagtccgtccacattcttgacctcgacgggaggatcatatactggaatcagtctgcggagaatctgtttggctatcctgcatcagaagcccttggtcaggatgccctcatgcttctggttgattcccatgaccacaatgcgtgattcccgccaattggagcagatattttgtaagcctccgacctctgcaaggtcccagtcagaatcatctatgacatcttgtgatgggagttgcagcaacactagtcacagaatcaattcgttgaatagaagttcttttgattctaatctacccctgcaaagcactttagcatccaagataacgaatttggctaccaaggtcacaaataaagttcgttctcgggtcaggacagacgagaatgacgatggtggcagtggtgagagccattgcttggatcgtggtgcaaaggaagagccaacatctagcggaacaagcacaccaagaggggatgcaccacatggtccctttgctacagaagagaactcacctgggaaatcaacgaacccaaacagcgacgaatcagaaggaaaagtaggtctgcacaagattttgggttctaaggcagaggcactattgaacaagaaagggatatcatggccttggaaagggcgcgagaatgagggacctgatgaaagaaaccatgtgatattgccgtggttgcatggtggccaagagaatggtgtgaatcatcagaaggtttctgattctagtatatctccagacgcccaaggcgctgaacacaaccaacctagcaaaaatgaggcatcaggttcctggtcctctttcaacaataacagcacaggcagtgcaagcagcacgggaagcactaatagcagtgctctctacaaagtagatcatgaagcagattgtctggattatgagatcctgtgggaagaccttgtcattggagaacaaataggtcaaggctcttgtgggacagtatatcatgctttgtggtatggttcggatgtggctgttaaagttttctccaagcaagaatattcagaagaagtgatactgacctttcgacaagaggtatcccttatgaagaaattgcgccatcctaacatactgctcttcatgggtgcggttatgtctccacaacgcctttgtattgtatcagagtttctcccccgtggaagcttgtttcgcttacttcaaaggagcgctaccaagttggatgtgagacggcgtgtccacatggctttagatattgtaaggggcatgaattatcttcaccattccagcccgcctatcattcatcgagatttaaaatcatctaaccttttggtcgacaagaactggattgtgaaggtggcagactttggtctttcacgtctcaagcgtgaaactttcttgacaacaaaaacaggaaaaggaacaccccaatggatggcgcccgaggtgttgcgcaatgaaccttccgatgagaagtctgatgtgtacagttacggggttatcctgtgggaacttgttactcagaagataccctgggaaaatctgaactcaatgcaggtcattggtgcagtgggttttatgaaccaaaggttggatatcccaagtgaagtagatcctcagtggaaatcaattatcctgagctgctgggaaagcgacccgcagcaacggccgtcgttccaggagcttcttgagaggctccgggagctgcagaggcactacgccatccagcaccggaacacaaagaacagcatcgaggagtaaagaacacaatgcgacctctcagagcggcttgcttcgaagcattttgcgagcgaacgaacgaagaaccccaggtctctagaagggcctggaccctcctgtactgtatggttttgcttctgcggaacagccaaggctggaagaagtttgttgtacagacgggggtacgttcttctttgtttgacagggcaattgtgactgtaatctctgggtcctgacacccaagggtagggtagagactatagagtgagtagtgactgagctccggattgctggcgcatttgggttcttctgattcgtggcaatgcaaatgcgtggttaacaataacatccaatccggggcttgtgtttctggaaaagggcatgatgatgtgtagattgtttgctctgacaagagtggtgcgtacatgtgatcggttgtgatcatgcgtgattgtgagtttaatcgatgtagtaaaatcttaatattctaaaatgcctgcgtttccttgaaaaatagtaaggccacggcaacagataaatctccattatcg

SEQ ID NO: 2683 - DNA, 2387 bp, Zea Mays
caggagctccctacaagatcaaaattcgttttgagttgcatttcttatgaatcagtctgcggagaatctgtttggctatcctgcatcagaagcccttggtcaggatgccctcatgcttctggttgattcccatgaccacaatgcggtaaataacatcttccaacgtatttctatgggtgaaagttggactgggaagtttccagttaagaacaagcaaggacatagattttcagctgttgccaccaatacacctttctatgatgaagatggcagtttgatgggtttcatttgtgtttcaagtgattcccgccaattggagcagatattttgtaagcctccgacctctgcaaggtcccagtcagaatcatctatgacatcttgtgatgggagttgcagcaacactagtcacagaatcaattcgttgaatagaagttcttttgattctaatctacccctgcaaagcactttagcatccaagataacgaatttgacgagaatgacgatggtggcagtggtgagagccattgcttggatcgtggtgcaaaggaagagccaacatctagcggaacaagcacaccaagaggggatgcaccacatggtccctttgctacagaagagaactcacctgggaaatcaacgaacccaaacagcgacgaatcagaaggaaaagtaggtctgcacaagattttgggttctaaggcagaggcactattgaacaagaaagggatatcatggccttggaaagggcgcgagaatgagggacctgatgaaagaaaccatgtgatattgccgtggttgcatggtggccaagagaatggtgtgaatcatcagaaggtttctgattctagtatatctccagacgcccaaggcgctgaacacaaccaacctagcaaaaatgaggcatcaggttcctggtcctctttcaacaataacagcacaggcagtgcaagcagcacgggaagcactaatagcagtgctctctacaaagtagatcatgaagcagattgtctggattatgagatcctgtgggaagaccttgtcattggagaacaaataggtcaaggctcttgtgggacagtatatcatgctttgtggtatggttcggatgtggctgttaaagttttctccaagcaagaatattcagaagaagtgatactgacctttcgacaagaggtatcccttatgaagaaattgcgccatcctaacatactgctcttcatgggtgcggttatgtctccacaacgcctttgtattgtatcagagtttctcccccgtggaagcttgtttcgcttacttcaaaggagcgctaccaagttggatgtgagacggcgtgtccacatggctttagatattgtaaggggcatgaattatcttcaccattccagcccgcctatcattcatcgagatttaaaatcatctaaccttttggtcgacaagaactggattgtgaaggtggcagactttggtctttcacgtctcaagcgtgaaactttcttgacaacaaaaacaggaaaaggaacaccccaatggatggcgcccgaggtgttgcgcaatgaaccttccgatgagaagtctgatgtgtacagttacggggttatcctgtgggaacttgttactcagaagataccctgggaaaatctgaactcaatgcaggtcattggtgcagtgggttttatgaaccaaaggttggatatcccaagtgaagtagatcctcagtggaaatcaattatcctgagctgctgggaaagcgacccgcagcaacggccgtcgttccaggagcttcttgagaggctccgggagctgcagaggcactacgccatccagcaccggaacacaaagaacagcatcgaggagtaaagaacacaatgcgacctctcagagcggcttgcttcgaagcattttgcgagcgaacgaacgaagaaccccaggtctctagaagggcctggaccctcctgtactgtatggttttgcttctgcggaacagccaaggctggaagaagtttgttgtacagacgggggtacgttcttctttgtttgacagggcaattgtgactgtaatctctgggtcctgacacccaagggtagggtagagactatagagtgagtagtgactgagctccggattgctggcgcatttgggttcttctgattcgtggcaatgcaaatgcgtggttaacaataacatccaatccggggcttgtgtttctggaaaagggcatgatgatgtgtagattgtttgctctgacaagagtggtgcgtacatgtgatcggttgtgatcatgcgtgattgtgagtttaatcgatgtagtaaaatcttaatattctaaaatgcctgcgtttccttgaaaaatagtaaggccacggcaacagataaatctccattatcg

SEQ ID NO: 2684 - DNA, 2372 bp, Zea Mays
ctccctacaagatcaaaattcgttttgagttgcatttcttatgaatcagtctgcggagaatctgtttggctatcctgcatcagaagcccttggtcaggatgccctcatgcttctggttgattcccatgaccacaatgcggtaaataacatcttccaacgtatttctatgggtgaaagttggactgggaagtttccagttaagaacaagcaaggacatagattttcagctgttgccaccaatacacctttctatgatgaagatggcagtttgatgggtttcatttgtgtttcaagtgattcccgccaattggagcagatattttgtaagcctccgacctctgcaaggtcccagtcagaatcatctatgacatcttgtgatgggagttgcagcaacactagtcacagaatcaattcgttgaatagaagttcttttgattctaatctacccctgcaaagcactttagcatccaagataacgaatttgacgagaatgacgatggtggcagtggtgagagccattgcttggatcgtggtgcaaaggaagagccaacatctagcggaacaagcacaccaagaggggatgcaccacatggtccctttgctacagaagagaactcacctgggaaatcaacgaacccaaacagcgacgaatcagaaggaaaagtaggtctgcacaagattttgggttctaaggcagaggcactattgaacaagaaagggatatcatggccttggaaagggcgcgagaatgagggacctgatgaaagaaaccatgtgatattgccgtggttgcatggtggccaagagaatggtgtgaatcatcagaaggtttctgattctagtatatctccagacgcccaaggcgctgaacacaaccaacctagcaaaaatgaggcatcaggttcctggtcctctttcaacaataacagcacaggcagtgcaagcagcacgggaagcactaatagcagtgctctctacaaagtagatcatgaagcagattgtctggattatgagatcctgtgggaagaccttgtcattggagaacaaataggtcaaggctcttgtgggacagtatatcatgctttgtggtatggttcggatgtggctgttaaagttttctccaagcaagaatattcagaagaagtgatactgacctttcgacaagaggtatcccttatgaagaaattgcgccatcctaacatactgctcttcatgggtgcggttatgtctccacaacgcctttgtattgtatcagagtttctcccccgtggaagcttgtttcgcttacttcaaaggagcgctaccaagttggatgtgagacggcgtgtccacatggctttagatattgtaaggggcatgaattatcttcaccattccagcccgcctatcattcatcgagatttaaaatcatctaaccttttggtcgacaagaactggattgtgaaggtggcagactttggtctttcacgtctcaagcgtgaaactttcttgacaacaaaaacaggaaaaggaacagtaaccccaatggatggcgcccgaggtgttgcgcaatgaaccttccgatgagaagtctgatgtgtacagttacggggttatcctgtgggaacttgttactcagaagataccctgggaaaatctgaactcaatgcagtgggttttatgaaccaaaggttggatatcccaagtgaagtagatcctcagtggaaatcaattatcctgagctgctgggaaagcgacccgcagcaacggccgtcgttccaggagcttcttgagaggctccgggagctgcagaggcactacgccatccagcaccggaacacaaagaacagcatcgaggagtaaagaacacaatgcgacctctcagagcggcttgcttcgaagcattttgcgagcgaacgaacgaagaaccccaggtctctagaagggcctggaccctcctgtactgtatggttttgcttctgcggaacagccaaggctggaagaagtttgttgtacagacgggggtacgttcttctttgtttgacagggcaattgtgactgtaatctctgggtcctgacacccaagggtagggtagagactatagagtgagtagtgactgagctccggattgctggcgcatttgggttcttctgattcgtggcaatgcaaatgcgtggttaacaataacatccaatccggggcttgtgtttctggaaaagggcatgatgatgtgtagattgtttgctctgacaagagtggtgcgtacatgtgatcggttgtgatcatgcgtgattgtgagtttaatcgatgtagtaaaatcttaatattctaaaatgcctgcgtttccttgaaaaatagtaaggccacggcaacagataaatctccattatcg

SEQ ID NO: 2685 - DNA, 1272 bp, Zea Mays
aatacatgcgtaacacgtcggacgtgtgcaaaataattaaagaaaatcaaaattgaagttggttaaagttagttatatggaaatggttttttaatgagtagagggatatataggggaaagtatagggggaacggttgcaggacgagtgaatataggggatggaatcttgctgacgtgacgtggctgcatagtaacatttagggggaaaaatttagggtgaacggttgcggacagtctaaaccgctgctctttgggcttgactctgcccgctcctctccatctccacttggtccctctcgcatggcggcggcggcatcggcgtcgacgccgcagggggtggcggagcggcggggcatcccggcggcggccttcgtcgaggacgtcgaggcctacctccggcaggccgggcttgacgttaactccgccctcgccttcctccaggaaaggttgcaacagtacaaaatagtggagatgaagcttctagcacaacaacgagaccttcaggcaaagattcctgatatagagaagtgtttggatattgtttcaacattacaagctaaaaatgatttgggcacttatagctgattttgaattatccgaggggatatactcctgtgcgaaaatcgaggatactgactcagtgtgcctgtggttgggtgcaaatgtgatgctggagtactcttgcgatgaggccaatgccctcttgaagaaaaacttggaaaatgctaaggccagcttagaagtccttgttgctgatcttcagttcttgcgagaccagcaaaccatcactcaggttacaattgctcgggtattcaactgggatgtacaccaccggagaagcaaacaggctgtaaaggaaccttaatcagttagatcacgaggtcaaccaatgtgattgggacaaattttttcgtaccttttggtacctctggcagattagtccatcatagcgagctctttgtttgttgatggtttctttgctgtgtaacaatgtatcggtttattctctttaatggtgtgggaacattagtagaagatggaacattttactgcctttttccccactggatgtccactggatcacgtcgcaaaatattttttttttcatgattcatgcataattcctgctttccaaagggcttcctttatgtttactgcattacagtccaggagatagacggtccattgtcatgttgagcaaagatagaagaaaatcgacaacaggtgaggtgactcgtttttacatatgtagggctttactgcttgacactt

SEQ ID NO: 2686 - DNA, 1262 bp, Zea Mays
aatacatgcgtaacacgtcggacgtgtgcaaaataattaaagaaaatcaaaattgaagttggttaaagttagttatatggaaatggttttttaatgagtagagggatatataggggaaagtatagggggaacggttgcaggacgagtgaatataggggatggaatcttgctgacgtgacgtggctgcatagtaacatttagggggaaaaatttagggtgaacggttgcggacagtctaaaccgctgctctttgggcttgactctgcccgctcctctccatctccacttggtccctctcgcatggcggcggcggcatcggcgtcgacgccgcagggggtggcggagcggcggggcatcccggcggcggccttcgtcgaggacgtcgaggcctacctccggcaggccgggcttgacgttaactccgccctcgccttcctccaggaaaggttgcaacagtacaaaatagtggagatgaagcttctagcacaacaacgagaccttcaggcaaagattcctgatatagagaagtgtttggatattgtttcaacattacaagctaaaaatgatttggctgattttgaattatccgaggggatatactcctgtgcgaaaatcgaggatactgactcagtgtgcctgtggttgggtgcaaatgtgatgctggagtactcttgcgatgaggccaatgccctcttgaagaaaaacttggaaaatgctaaggccagcttagaagtccttgttgctgatcttcagttcttgcgagaccagcaaaccatcactcaggttacaattgctcgggtattcaactgggatgtacaccaccggagaagcaaacaggctgtaaaggaaccttaatcagttagatcacgaggtcaaccaatgtgattgggacaaattttttcgtaccttttggtacctctggcagattagtccatcatagcgagctctttgtttgttgatggtttctttgctgtgtaacaatgtatcggtttattctctttaatggtgtgggaacattagtagaagatggaacattttactgcctttttccccactggatgtccactggatcacgtcgcaaaatattttttttttcatgattcatgcataattcctgctttccaaagggcttcctttatgtttactgcattacagtccaggagatagacggtccattgtcatgttgagcaaagatagaagaaaatcgacaacaggtgaggtgactcgtttttacatatgtagggctttactgcttgacactt

SEQ ID NO: 2687 - DNA, 1401 bp, Zea Mays
aatacatgcgtaacacgtcggacgtgtgcaaaataattaaagaaaatcaaaattgaagttggttaaagttagttatatggaaatggttttttaatgagtagagggatatataggggaaagtatagggggaacggttgcaggacgagtgaatataggggatggaatcttgctgacgtgacgtggctgcatagtaacatttagggggaaaaatttagggtgaacggttgcggacagtctaaaccgctgctctttgggcttgactctgcccgctcctctccatctccacttggtccctctcgcatggcggcggcggcatcggcgtcgacgccgcagggggtggcggagcggcggggcatcccggcggcggccttcgtcgaggacgtcgaggcctacctccggcaggccgggcttgacgttaactccgccctcgccttcctccaggaaaggggagtggaaagcaacgttgaagccagggcgtgggatgatacaaagaacactggccattggattgagttgaagcctttgagggcggattatgagccattgatcttaatgatgttggaatacatggttgcaacagtacaaaatagtggagatgaagcttctagcacaacaacgagaccttcaggcaaagattcctgatatagagaagtgtttggatattgtttcaacattacaagctaaaaatgatttgggtgaggcacttatagctgattttgaattatccgaggggatatactcctgtgcgaaaatcgaggatactgactcagtgtgcctgtggttgggtgcaaatgtgatgctggagtactcttgcgatgaggccaatgccctcttgaagaaaaacttggaaaatgctaaggccagcttagaagtccttgttgctgatcttcagttcttgcgagaccagcaaaccatcactcaggttacaattgctcgggtattcaactgggatgtacaccaccggagaagcaaacaggctgtaaaggaaccttaatcagttagatcacgaggtcaaccaatgtgattgggacaaattttttcgtaccttttggtacctctggcagattagtccatcatagcgagctctttgtttgttgatggtttctttgctgtgtaacaatgtatcggtttattctctttaatggtgtgggaacattagtagaagatggaacattttactgcctttttccccactggatgtccactggatcacgtcgcaaaatattttttttttcatgattcatgcataattcctgctttccaaagggcttcctttatgtttactgcattacagtccaggagatagacggtccattgtcatgttgagcaaagatagaagaaaatcgacaacaggtgaggtgactcgtttttacatatgtagggctttactgcttgacactt

SEQ ID NO: 2688 - DNA, 963 bp, Zea Mays
ctgacaagactgagtgctggtacatgaggggaatcaaagtcgcatccctagtcatacgctctccatgatttgtgaatctatgcatactgtgtggttgtggatactgtttagtggaagatagaggtgaaagcagcatggttgcaacagtacaaaatagtggagatgaagcttctagcacaacaacgagaccttcaggcaaagattcctgatatagagaagtgtttggatattgtttcaacattacaagctaaaaatgatttgggcacttatagctgattttgaattatccgaggggatatactcctgtgcgaaaatcgaggatactgactcagtgtgcctgtggttgggtgcaaatgtgatgctggagtactcttgcgatgaggccaatgccctcttgaagaaaaacttggaaaatgctaaggccagcttagaagtccttgttgctgatcttcagttcttgcgagaccagcaaaccatcactcaggttacaattgctcgggtattcaactgggatgtacaccaccggagaagcaaacaggctgtaaaggaaccttaatcagttagatcacgaggtcaaccaatgtgattgggacaaattttttcgtaccttttggtacctctggcagattagtccatcatagcgagctctttgtttgttgatggtttctttgctgtgtaacaatgtatcggtttattctctttaatggtgtgggaacattagtagaagatggaacattttactgcctttttccccactggatgtccactggatcacgtcgcaaaatattttttttttcatgattcatgcataattcctgctttccaaagggcttcctttatgtttactgcattacagtccaggagatagacggtccattgtcatgttgagcaaagatagaagaaaatcgacaacaggtgaggtgactcgtttttacatatgtagggctttactgcttgacactt

SEQ ID NO: 2689 - DNA, 952 bp, Zea Mays
ctggtacatgaggggaatcaaagtcgcatccctagtcatacgctctccatgatttgtgaatctatgcatactgtgtggttgtggatactgtttagtggaagatagaggtgaaagcagcatggttgcaacagtacaaaatagtggagatgaagcttctagcacaacaacgagaccttcaggcaaagattcctgatatagagaagtgtttggatattgtttcaacattacaagctaaaaatgatttgggtgaggcacttatagctgattttgaattatccgaggggatatactcctgtgcgaaaatcgaggatactgactcagtgtgcctgtggttgggtgcaaatgtgatgctggagtactcttgcgatgaggccaatgccctcttgaagaaaaacttggaaaatgctaaggccagcttagaagtccttgttgctgatcttcagttcttgcgagaccagcaaaccatcactcaggttacaattgctcgggtattcaactgggatgtacaccaccggagaagcaaacaggctgtaaaggaaccttaatcagttagatcacgaggtcaaccaatgtgattgggacaaattttttcgtaccttttggtacctctggcagattagtccatcatagcgagctctttgtttgttgatggtttctttgctgtgtaacaatgtatcggtttattctctttaatggtgtgggaacattagtagaagatggaacattttactgcctttttccccactggatgtccactggatcacgtcgcaaaatattttttttttcatgattcatgcataattcctgctttccaaagggcttcctttatgtttactgcattacagtccaggagatagacggtccattgtcatgttgagcaaagatagaagaaaatcgacaacaggtgaggtgactcgtttttacatatgtagggctttactgcttgacactt

SEQ ID NO: 2690 - DNA, 1018 bp, Zea Mays
agcgaccccatctcccaaggcatgatgcggcacaggaactcgctgtggaacctctcccgcctggggagtggaaagcaacgttgaagccagggcgtgggatgatacaaagaacactggccattggattgagttgaagcctttgagggcggattatgagccattgatcttaatgatgttggaatacatggttgcaacagtacaaaatagtggagatgaagcttctagcacaacaacgagaccttcaggcaaagattcctgatatagagaagtgtttggatattgtttcaacattacaagctaaaaatgatttgggtgaggcacttatagctgattttgaattatccgaggggatatactcctgtgcgaaaatcgaggatactgactcagtgtgcctgtggttgggtgcaaatgtgatgctggagtactcttgcgatgaggccaatgccctcttgaagaaaaacttggaaaatgctaaggccagcttagaagtccttgttgctgatcttcagttcttgcgagaccagcaaaccatcactcaggttacaattgctcgggtattcaactgggatgtacaccaccggagaagcaaacaggctgtaaaggaaccttaatcagttagatcacgaggtcaaccaatgtgattgggacaaattttttcgtaccttttggtacctctggcagattagtccatcatagcgagctctttgtttgttgatggtttctttgctgtgtaacaatgtatcggtttattctctttaatggtgtgggaacattagtagaagatggaacattttactgcctttttccccactggatgtccactggatcacgtcgcaaaatattttttttttcatgattcatgcataattcctgctttccaaagggcttcctttatgtttactgcattacagtccaggagatagacggtccattgtcatgttgagcaaagatagaagaaaatcgacaacaggtgaggtgactcgtttttacatatgtagggctttactgcttgacactt

SEQ ID NO: 2691 - DNA, 888 bp, Zea Mays
cccatctcccaaggcatgatgcggcacaggaactcgctgtggaacctctcccgcctggttgcaacagtacaaaatagtggagatgaagcttctagcacaacaacgagaccttcaggcaaagattcctgatatagagaagtgtttggatattgtttcaacattacaagctaaaaatgatttgggtgaggcacttatagctgattttgaattatccgaggggatatactcctgtgcgaaaatcgaggatactgactcagtgtgcctgtggttgggtgcaaatgtgatgctggagtactcttgcgatgaggccaatgccctcttgaagaaaaacttggaaaatgctaaggccagcttagaagtccttgttgctgatcttcagttcttgcgagaccagcaaaccatcactcaggttacaattgctcgggtattcaactgggatgtacaccaccggagaagcaaacaggctgtaaaggaaccttaatcagttagatcacgaggtcaaccaatgtgattgggacaaattttttcgtaccttttggtacctctggcagattagtccatcatagcgagctctttgtttgttgatggtttctttgctgtgtaacaatgtatcggtttattctctttaatggtgtgggaacattagtagaagatggaacattttactgcctttttccccactggatgtccactggatcacgtcgcaaaatattttttttttcatgattcatgcataattcctgctttccaaagggcttcctttatgtttactgcattacagtccaggagatagacggtccattgtcatgttgagcaaagatagaagaaaatcgacaacaggtgaggtgactcgtttttacatatgtagggctttactgcttgacactt

SEQ ID NO: 2692 - DNA, 934 bp, Zea Mays
gttgaagccagggcgtgggatgatacaaagaacactggccattggattgagttgaagcctttgagggcggattatgagccattgatcttaatgatgttggaatacatggttgcaacagtacaaaatagtggagatgaagcttctagcacaacaacgagaccttcaggcaaagattcctgatatagagaagtgtttggatattgtttcaacattacaagctaaaaatgatttgggcacttatagctgattttgaattatccgaggggatatactcctgtgcgaaaatcgaggatactgactcagtgtgcctgtggttgggtgcaaatgtgatgctggagtactcttgcgatgaggccaatgccctcttgaagaaaaacttggaaaatgctaaggccagcttagaagtccttgttgctgatcttcagttcttgcgagaccagcaaaccatcactcaggttacaattgctcgggtattcaactgggatgtacaccaccggagaagcaaacaggctgtaaaggaaccttaatcagttagatcacgaggtcaaccaatgtgattgggacaaattttttcgtaccttttggtacctctggcagattagtccatcatagcgagctctttgtttgttgatggtttctttgctgtgtaacaatgtatcggtttattctctttaatggtgtgggaacattagtagaagatggaacattttactgcctttttccccactggatgtccactggatcacgtcgcaaaatattttttttttcatgattcatgcataattcctgctttccaaagggcttcctttatgtttactgcattacagtccaggagatagacggtccattgtcatgttgagcaaagatagaagaaaatcgacaacaggtgaggtgactcgtttttacatatgtagggctttactgcttgacactt

SEQ ID NO: 2693 - DNA, 854 bp, Zea Mays
gagccattgatcttaatgatgttggaatacatgtacaaaatagtggagatgaagcttctagcacaacaacgagaccttcaggcaaagattcctgatatagagaagtgtttggatattgtttcaacattacaagctaaaaatgatttgggtgaggcacttatagctgattttgaattatccgaggggatatactcctgtgcgaaaatcgaggatactgactcagtgtgcctgtggttgggtgcaaatgtgatgctggagtactcttgcgatgaggccaatgccctcttgaagaaaaacttggaaaatgctaaggccagcttagaagtccttgttgctgatcttcagttcttgcgagaccagcaaaccatcactcaggttacaattgctcgggtattcaactgggatgtacaccaccggagaagcaaacaggctgtaaaggaaccttaatcagttagatcacgaggtcaaccaatgtgattgggacaaattttttcgtaccttttggtacctctggcagattagtccatcatagcgagctctttgtttgttgatggtttctttgctgtgtaacaatgtatcggtttattctctttaatggtgtgggaacattagtagaagatggaacattttactgcctttttccccactggatgtccactggatcacgtcgcaaaatattttttttttcatgattcatgcataattcctgctttccaaagggcttcctttatgtttactgcattacagtccaggagatagacggtccattgtcatgttgagcaaagatagaagaaaatcgacaacaggtgaggtgactcgtttttacatatgtagggctttactgcttgacactt

SEQ ID NO: 2694 - DNA, 821 bp, Zea Mays
gaaaaaactatgacgacctacattttgcaatggagtattggattagaggcaaagattcctgatatagagaagtgtttggatattgtttcaacattacaagctaaaaatgatttgggtgaggcacttatagctgattttgaattatccgaggggatatactcctgtgcgaaaatcgaggatactgactcagtgtgcctgtggttgggtgcaaatgtgatgctggagtactcttgcgatgaggccaatgccctcttgaagaaaaacttggaaaatgctaaggccagcttagaagtccttgttgctgatcttcagttcttgcgagaccagcaaaccatcactcaggttacaattgctcgggtattcaactgggatgtacaccaccggagaagcaaacaggctgtaaaggaaccttaatcagttagatcacgaggtcaaccaatgtgattgggacaaattttttcgtaccttttggtacctctggcagattagtccatcatagcgagctctttgtttgttgatggtttctttgctgtgtaacaatgtatcggtttattctctttaatggtgtgggaacattagtagaagatggaacattttactgcctttttccccactggatgtccactggatcacgtcgcaaaatattttttttttcatgattcatgcataattcctgctttccaaagggcttcctttatgtttactgcattacagtccaggagatagacggtccattgtcatgttgagcaaagatagaagaaaatcgacaacaggtgaggtgactcgtttttacatatgtagggctttactgcttgacactt

SEQ ID NO: 2695 - DNA, 2117 bp, Zea Mays
gccaaagggccttaactgtgttttaagatcggtgacaactagagagaaggcgaagcgaacttgagccagagagagaatctcgcaccgcagcaggaggggaccgagagagaagcgaactcgagaaagggattcaaggaggctgttgccgatggccatggcggcgcggctgctgcgagcaaccgaggtggcatctcgatttctatctgcttcccatggtttcgtccagcgagctgcatacacagctggtgggatagtcgatgttggccaaccaacaccccagtctcatccagagttattagctgatggagagatcacaccaggcatcacaaacgaggaatacatctctagaagaaaaaaacttttagaggtgctaccagagaagagcttggccattattgcttctgctgatcagcagatgatgactgatgtagtgccatatccattcagacagaatggtgattacctgtatattacaggttgtacacaacccggtggagtagcagttttgagtgaagaaacagggttctgcatgttcatgccagatacaaataaggaggatttagtttggcaaggtgaaactgctggagttgaggctgctgtggatttctttaaagcagataaagcatttccacttagtcagatgcaaaagatccttcctgaactgattgagcaatcaaaaggggtgtatcacaatgtgaatacaacatcttcttataagaacttggatgcctttcgtagggcatcactcaacaataaagtaaaagatcttacaaattacactgatgaattacggtgggtcaagtcgaaatcagaaattaagttgatgagggaatcagcatctattgtttctcagagaggaaagccagttggcagctaagattgaatacgagtgcaaaatgagaggtgcccaaagaatggcgttccatcccgtagttggtggaggagcaaatggcagcattatacattattcaagaaacgatagaaaaatcaggacaggtgatcttctgctcatggatgttggctgcgagtatcatggctaccttagcgatctgactcgaacatggccaccctgtggcaggttttcacctgctcaggaagagctgtacagcctaatactggagacaaataaggagtgcataaagctctgtaaacccggcacaagcattaacgagatacacaatcattcggtaaagctgttgataaagggattccaagaactgaggatcctggagaaggggaaatccatccaatacaactacttgaacccaaccgcaataggccactcgttaggcatggatattcatgactccatgacactccccaaggacaagcccttggagcctggcgtcgtaataacgatcgagcccggggtgtacatcccggcggccccggtcctgaacgagcgcgcgccgagcaggtaccgcggtatggggatccggatcgaggacgaggtcctcatcaccgacgacggccacgaggtgctgacggcgtcggtgcccaaggaggtctcgcacctgaccaccctgatgaacatgggcaggggcggctcggctgcggacgcccatggccatgagctgcgagccgcctgcagctagctgaggcggctgcgtgcgtgaggtcatgcccgtggcggcggccggacctagtagacctggcacgacgtcgtggagcagaatctacgtgctctgcgaatacccgttgcatccattgattggactgttgtaatcacgggaacagatagcgaattgggcaggtgtttttttaaggtaatgggaggtgttatattctggacccttaccatggcgcgtcattgtatttgcatgcgcagttgtgttgtggccgcattcagcttctttatattgttttgtcgccgttcagaacggttagccgaatcttaccgtgagccatggcatggtgaccacacggattacagccagccgtgtggcgctagcagatgcatgcaacagtcggctggggcggccatgaatgcgggaggctgtagacctgtagtgatgtcctgtttgtttcagtttatacattatataatctggattataatctagattatataattcatgttataatctgtctagattataatatatatgttgtttggc

SEQ ID NO: 2696 - DNA, 2131 bp, Zea Mays
cttaactgtgttttaagatcggtgacaactagagagaaggcgaagcgaacttgagccagagagagaatctcgcaccgcagcaggaggggaccgagagagaagcgaactcgagaaagggattcaaggaggctgttgccgatggccatggcggcgcggctgctgcgagcaaccgaggtggcatctcgatttctatctgcttcccatggtttcgtccagcgagctgcatacacagctggtgggatagtcgatgttggccaaccaacaccccagtctcatccagagttattagctgatggagagatcacaccaggcatcacaaacgaggaatacatctctagaagaaaaaaacttttagaggtgctaccagagaagagcttggccattattgcttctgctgatcagcagatgatgactgatgtagtgccatatccattcagacagaatggtgattacctgtatattacaggttgtacacaacccggtggagtagcagttttgagtgaagaaacagggttctgcatgttcatgccagatacaaataaggaggatttagtttggcaaggtgaaactgctggagttgaggctgctgtggatttctttaaagcagataaagcatttccacttagtcagatgcaaaagatccttcctgaactgattgagcaatcaaaaggggtgtatcacaatgtgaatacaacatcttcttataagaacttggatgcctttcgtagggcatcactcaacaataaagtaaaagatcttacaaattacactgatgaattacggtgggtcaagtcgaaatcagaaattaagttgatgagggaatcagcatctattgtttctcagtctcttttacaaacaatgttgatgtcgaggacccacagagaggaaagccagttggcagctaagattgaatacgagtgcaaaatgagaggtgcccaaagaatggcgttccatcccgtagttggtggaggagcaaatggcagcattatacattattcaagaaacgatagaaaaatcaggacaggtgatcttctgctcatggatgttggctgcgagtatcatggctaccttagcgatctgactcgaacatggccaccctgtggcaggttttcacctgctcagcctaatactggagacaaataaggagtgcataaagctctgtaaacccggcacaagcattaacgagatacacaatcattcggtaaagctgttgataaagggattccaagaactgaggatcctggagaaggggaaatccatccaatacaactacttgaacccaaccgcaataggccactcgttaggcatggatattcatgactccatgacactccccaaggacaagcccttggagcctggcgtcgtaataacgatcgagcccggggtgtacatcccggcggccccggtcctgaacgagcgcgcgccgagcaggtaccgcggtatggggatccggatcgaggacgaggtcctcatcaccgacgacggccacgaggtgctgacggcgtcggtgcccaaggaggtctcgcacctgaccaccctgatgaacatgggcaggggcggctcggctgcggacgcccatggccatgagctgcgagccgcctgcagctagctgaggcggctgcgtgcgtgaggtcatgcccgtggcggcggccggacctagtagacctggcacgacgtcgtggagcagaatctacgtgctctgcgaatacccgttgcatccattgattggactgttgtaatcacgggaacagatagcgaattgggcaggtgtttttttaaggtaatgggaggtgttatattctggacccttaccatggcgcgtcattgtatttgcatgcgcagttgtgttgtggccgcattcagcttctttatattgttttgtcgccgttcagaacggttagccgaatcttaccgtgagccatggcatggtgaccacacggattacagccagccgtgtggcgctagcagatgcatgcaacagtcggctggggcggccatgaatgcgggaggctgtagacctgtagtgatgtcctgtttgtttcagtttatacattatataatctggattataatctagattatataattcatgttataatctgtctagattataatatatatgttgtttggc

SEQ ID NO: 2697 - DNA, 2069 bp, Zea Mays
gaagcgaacttgagccagagagagaatctcgcaccgcagcaggaggggaccgagagagaagcgaactcgagaaagggattcaaggaggctgttgccgatggccatggcggcgcggctgctgcgagcaaccgaggtggcatctcgatttctatctgcttcccatggtttcgtccagcgagctgcatacacagctggtgggatagtcgatgttggccaaccaacaccccagtctcatccagaggcatcacaaacgaggaatacatctctagaagaaaaaaacttttagaggtgctaccagagaagagcttggccattattgcttctgctgatcagcagatgatgactgatgtagtgccatatccattcagacagaatggtgattacctgtatattacaggttgtacacaacccggtggagtagcagttttgagtgaagaaacagggttctgcatgttcatgccagatacaaataaggagtttggcaaggtgaaactgctggagttgaggctgctgtggatttctttaaagcagataaagcatttccacttagtcagatgcaaaagatccttcctgaactgattgagcaatcaaaaggggtgtatcacaatgtgaatacaacatcttcttataagaacttggatgcctttcgtagggcatcactcaacaataaagtaaaagatcttacaaattacactgatgaattacggtgggtcaagtcgaaatcagaaattaagttgatgagggaatcagcatctattgtttctcagtctcttttacaaacaatgttgatgtcgaggacccacagagaggaaagccagttggcagctaagattgaatacgagtgcaaaatgagaggtgcccaaagaatggcgttccatcccgtagttggtggaggagcaaatggcagcattatacattattcaagaaacgatagaaaaatcaggacaggtgatcttctgctcatggatgttggctgcgagtatcatggctaccttagcgatctgactcgaacatggccaccctgtggcaggttttcacctgctcaggaagagctgtacagcctaatactggagacaaataaggagtgcataaagctctgtaaacccggcacaagcattaacgagatacacaatcattcggtaaagctgttgataaagggattccaagaactgaggatcctggagaaggggaaatccatccaatacaactacttgaacccaaccgcaataggccactcgttaggcatggatattcatgactccatgacactccccaaggacaagcccttggagcctggcgtcgtaataacgatcgagcccggggtgtacatcccggcggccccggtcctgaacgagcgcgcgccgagcaggtaccgcggtatggggatccggatcgaggacgaggtcctcatcaccgacgacggccacgaggtgctgacggcgtcggtgcccaaggaggtctcgcacctgaccaccctgatgaacatgggcaggggcggctcggctgcggacgcccatggccatgagctgcgagccgcctgcagctagctgaggcggctgcgtgcgtgaggtcatgcccgtggcggcggccggacctagtagacctggcacgacgtcgtggagcagaatctacgtgctctgcgaatacccgttgcatccattgattggactgttgtaatcacgggaacagatagcgaattgggcaggtgtttttttaaggtaatgggaggtgttatattctggacccttaccatggcgcgtcattgtatttgcatgcgcagttgtgttgtggccgcattcagcttctttatattgttttgtcgccgttcagaacggttagccgaatcttaccgtgagccatggcatggtgaccacacggattacagccagccgtgtggcgctagcagatgcatgcaacagtcggctggggcggccatgaatgcgggaggctgtagacctgtagtgatgtcctgtttgtttcagtttatacattatataatctggattataatctagattatataattcatgttataatctgtctagattataatatatatgttgtttggc

SEQ ID NO: 2698 - DNA, 2388 bp, Zea Mays
gaagcgaacttgagccagagagagaatctcgcaccgcagcaggaggggaccgagagagaagcgaactcgagaaagggattcaaggaggctgttgccgatggccatggcggcgcggctgctgcgagcaaccgaggtggcatctcgatttctatctgcttcccatggtttcgtccagcgagctgcatacacagctggtgggatagtcgatgttggccaaccaacaccccagtctcatccagagttattagctgatggagagatcacaccaggcatcacaaacgaggaatacatctctagaagaaaaaaacttttagaggtgctaccagagaagagcttggccattattgcttctgctgatcagcagatgatgactgatgtagtgccatatccattcagacagaatggtgattacctgtatattacaggttgtacacaacccggtggagtagcagttttgagtgaagaaacagggttctgcatgttcatgccagatacaaataaggaggatttagtttggcaaggtgaaactgctggagttgaggctgctgtggatttctttaaagcagataaagcatttccacttagtcagatgcaaaagatccttcctgaactgattgagcaatcaaaaggggtgtatcacaatgtgaatacaacatcttcttataagaacttggatgcctttcgtagggcatcactcaacaataaagtaaaagatcttacaaattacactgatgaattacggtgggtcaagtcgaaatcagaaattaagttgatgagggaatcagcatctattgtttctcaggtattttgttaaatgtttacctttggcatccagccttaggtcatagagtattaatttctcagttcagccttgcatagagaattttctgagtctgtttgttgttccagttcctaatattagtctagcttgcttctgataaattattaggagctgtggttattctggatggggaagggtcaagatggtttttaatttcttaggtgaacttttggagttgatgtggggaaaaccattggtagagtaacagagactcaacactgaaggtacttcagctaattagatagtctcttttacaaacaatgttgatgtcgaggacccacagagaggaaagccagttggcagctaagattgaatacgagtgcaaaatgagaggtgcccaaagaatggcgttccatcccgtagttggtggaggagcaaatggcagcattatacattattcaagaaacgatagaaaaatcaggacaggtgatcttctgctcatggatgttggctgcgagtatcatggctaccttagcgatctgactcgaacatggccaccctgtggcaggttttcacctgctcaggaagagctgtacagcctaatactggagacaaataaggagtgcataaagctctgtaaacccggcacaagcattaacgagatacacaatcattcggtaaagctgttgataaagggattccaagaactgaggatcctggagaaggggaaatccatccaatacaactacttgaacccaaccgcaataggccactcgttaggcatggatattcatgactccatgacactccccaaggacaagcccttggagcctggcgtcgtaataacgatcgagcccggggtgtacatcccggcggccccggtcctgaacgagcgcgcgccgagcaggtaccgcggtatggggatccggatcgaggacgaggtcctcatcaccgacgacggccacgaggtgctgacggcgtcggtgcccaaggaggtctcgcacctgaccaccctgatgaacatgggcaggggcggctcggctgcggacgcccatggccatgagctgcgagccgcctgcagctagctgaggcggctgcgtgcgtgaggtcatgcccgtggcggcggccggacctagtagacctggcacgacgtcgtggagcagaatctacgtgctctgcgaatacccgttgcatccattgattggactgttgtaatcacgggaacagatagcgaattgggcaggtgtttttttaaggtaatgggaggtgttatattctggacccttaccatggcgcgtcattgtatttgcatgcgcagttgtgttgtggccgcattcagcttctttatattgttttgtcgccgttcagaacggttagccgaatcttaccgtgagccatggcatggtgaccacacggattacagccagccgtgtggcgctagcagatgcatgcaacagtcggctggggcggccatgaatgcgggaggctgtagacctgtagtgatgtcctgtttgtttcagtttatacattatataatctggattataatctagattatataattcatgttataatctgtctagattataatatatatgttgtttggc

SEQ ID NO: 2699 - DNA, 2210 bp, Zea Mays
gaagcgaacttgagccagagagagaatctcgcaccgcagcaggaggggaccgagagagaagcgaactcgagaaagggattcaaggaggctgttgccgatggccatggcggcgcggctgctgcgagcaaccgaggtggcatctcgatttctatctgcttcccatggtttcgtccagcgagctgcatacacagctggtgggatagtcgatgttggccaaccaacaccccagtctcatccagagttattagctgatggagagatcacaccaggcatcacaaacgaggaatacatctctagaagaaaaaaacttttagaggtgctaccagagaagagcttggccattattgcttctgctgatcagcagatgatgactgatgtagtgccatatccattcagacagaatggtgattacctgtatattacaggttgtacacaacccggtggagtagcagttttgagtgaagaaacagggttctgcatgttcatgccagatacaaataaggagtttggcaaggtgaaactgctggagttgaggctgctgtggatttctttaaagcagataaagcatttccacttagtcagatgcaaaagatccttcctgaactgattgagcaatcaaaaggggtgtatcacaatgtgaatacaacatcttcttataagaacttggatgcctttcgtagggcatcactcaacaataaagtaaaagatcttacaaattacactgatgaattacggtgggtcaagtcgaaatcagaaattaagttgatgagggaatcagcatctattgtttctcagtctcttttacaaacaatgttgatgtcgaggacccacagagaggaaagccagttggcagctaagattgaatacgagtgcaaaatgagaggtgcccaaagaatggcgttccatcccgtagttggtggaggagcaaatggcagcattatacattattcaagaaacgatagaaaaatcaggacaggtgatcttctgctcatggatgttggctgcgagtatcatggctaccttagcgatctgactcgaacatggccaccctgtggcaggttttcacctgctcaggaagagctgtacagcctaatactggagacaaataaggagtgcataaagctctgtaaacccggcacaagcattaacgagatacacaatcattcggtattgtccttggagctattctggtttccttgctatttccgtaaaataaatatattaaatgccatgaaaaattcagagaagacatatctcccaaaaaaatctatcaaatgcaggtaaagctgttgataaagggattccaagaactgaggatcctggagaaggggaaatccatccaatacaactacttgaacccaaccgcaataggccactcgttaggcatggatattcatgactccatgacactccccaaggacaagcccttggagcctggcgtcgtaataacgatcgagcccggggtgtacatcccggcggccccggtcctgaacgagcgcgcgccgagcaggtaccgcggtatggggatccggatcgaggacgaggtcctcatcaccgacgacggccacgaggtgctgacggcgtcggtgcccaaggaggtctcgcacctgaccaccctgatgaacatgggcaggggcggctcggctgcggacgcccatggccatgagctgcgagccgcctgcagctagctgaggcggctgcgtgcgtgaggtcatgcccgtggcggcggccggacctagtagacctggcacgacgtcgtggagcagaatctacgtgctctgcgaatacccgttgcatccattgattggactgttgtaatcacgggaacagatagcgaattgggcaggtgtttttttaaggtaatgggaggtgttatattctggacccttaccatggcgcgtcattgtatttgcatgcgcagttgtgttgtggccgcattcagcttctttatattgttttgtcgccgttcagaacggttagccgaatcttaccgtgagccatggcatggtgaccacacggattacagccagccgtgtggcgctagcagatgcatgcaacagtcggctggggcggccatgaatgcgggaggctgtagacctgtagtgatgtcctgtttgtttcagtttatacattatataatctggattataatctagattatataattcatgttataatctgtctagattataatatatatgttgtttggc

SEQ ID NO: 2700 - DNA, 2071 bp, Zea Mays
gaagcgaacttgagccagagagagaatctcgcaccgcagcaggaggggaccgagagagaagcgaactcgagaaagggattcaaggaggctgttgccgatggccatggcggcgcggctgctgcgagcaaccgaggtggcatctcgatttctatctgcttcccatggtttcgtccagcgagctgcatacacagctggtgggatagtcgatgttggccaaccaacaccccagtctcatccagaggcatcacaaacgaggaatacatctctagaagaaaaaaacttttagaggtgctaccagagaagagcttggccattattgcttctgctgatcagcagatgatgactgatgtagtgccatatccattcagacagaatggtgattacctgtatattacaggttgtacacaacccggtggagtagcagttttgagtgaagaaacagggttctgcatgttcatgccagatacaaataaggaggatttagtttggcaaggtgaaactgctggagttgaggctgctgtggatttctttaaagcagataaagcatttccacttagtcagatgcaaaagatccttcctgaactgattgagcaatcaaaaggggtgtatcacaatgtgaatacaacatcttcttataagaacttggatgcctttcgtagggcatcactcaacaataaagtaaaagatcttacaaattacactgatgaattacggtgggtcaagtcgaaatcagaaattaagttgatgagggaatcagcatctattgtttctcagtctcttttacaaacaatgttgatgtcgaggacccacagagaggaaagccagttggcagctaagattgaatacgagtgcaaaatgagaggtgcccaaagaatggcgttccatcccgtagttggtggaggagcaaatggcagcattatacattattcaagaaacgatagaaaagacaggtgatcttctgctcatggatgttggctgcgagtatcatggctaccttagcgatctgactcgaacatggccaccctgtggcaggttttcacctgctcaggaagagctgtacagcctaatactggagacaaataaggagtgcataaagctctgtaaacccggcacaagcattaacgagatacacaatcattcggtaaagctgttgataaagggattccaagaactgaggatcctggagaaggggaaatccatccaatacaactacttgaacccaaccgcaataggccactcgttaggcatggatattcatgactccatgacactccccaaggacaagcccttggagcctggcgtcgtaataacgatcgagcccggggtgtacatcccggcggccccggtcctgaacgagcgcgcgccgagcaggtaccgcggtatggggatccggatcgaggacgaggtcctcatcaccgacgacggccacgaggtgctgacggcgtcggtgcccaaggaggtctcgcacctgaccaccctgatgaacatgggcaggggcggctcggctgcggacgcccatggccatgagctgcgagccgcctgcagctagctgaggcggctgcgtgcgtgaggtcatgcccgtggcggcggccggacctagtagacctggcacgacgtcgtggagcagaatctacgtgctctgcgaatacccgttgcatccattgattggactgttgtaatcacgggaacagatagcgaattgggcaggtgtttttttaaggtaatgggaggtgttatattctggacccttaccatggcgcgtcattgtatttgcatgcgcagttgtgttgtggccgcattcagcttctttatattgttttgtcgccgttcagaacggttagccgaatcttaccgtgagccatggcatggtgaccacacggattacagccagccgtgtggcgctagcagatgcatgcaacagtcggctggggcggccatgaatgcgggaggctgtagacctgtagtgatgtcctgtttgtttcagtttatacattatataatctggattataatctagattatataattcatgttataatctgtctagattataatatatatgttgtttggc

SEQ ID NO: 2701 - DNA, 2019 bp, Zea Mays
gaagcgaacttgagccagagagagaatctcgcaccgcagcaggaggggaccgagagagaagcgaactcgagaaagggattcaaggaggctgttgccgatggccatggcggcgcggctgctgcgagcaaccgaggtggcatctcgatttctatctgcttcccatggtttcgtccagcgagctgcatacacagctggtgggatagtcgatgttggccaaccaacaccccagtctcatccagaggttgtacacaacccggtggagtagcagttttgagtgaagaaacagggttctgcatgttcatgccagatacaaataaggaggatttagtttggcaaggtgaaactgctggagttgaggctgctgtggatttctttaaagcagataaagcatttccacttagtcagatgcaaaagatccttcctgaactgattgagcaatcaaaaggggtgtatcacaatgtgaatacaacatcttcttataagaacttggatgcctttcgtagggcatcactcaacaataaagtaaaagatcttacaaattacactgatgaattacggtgggtcaagtcgaaatcagaaattaagttgatgagggaatcagcatctattgtttctcagtctcttttacaaacaatgttgatgtcgaggacccacagagaggaaagccagttggcagctaagattgaatacgagtgcaaaatgagaggtgcccaaagaatggcgttccatcccgtagttggtggaggagcaaatggcagcattatacattattcaagaaacgatagaaaaatcaggacaggtgatcttctgctcatggatgttggctgcgagtatcatggctaccttagcgatctgactcgaacatggccaccctgtggcaggttttcacctgctcagcctaatactggagacaaataaggagtgcataaagctctgtaaacccggcacaagcattaacgagatacacaatcattcggtattgtccttggagctattctggtttccttgctatttccgtaaaataaatatattaaatgccatgaaaaattcagagaagacatatctcccaaaaaaatctatcaaatgcaggtaaagctgttgataaagggattccaagaactgaggatcctggagaaggggaaatccatccaatacaactacttgaacccaaccgcaataggccactcgttaggcatggatattcatgactccatgacactccccaaggacaagcccttggagcctggcgtcgtaataacgatcgagcccggggtgtacatcccggcggccccggtcctgaacgagcgcgcgccgagcaggtaccgcggtatggggatccggatcgaggacgaggtcctcatcaccgacgacggccacgaggtgctgacggcgtcggtgcccaaggaggtctcgcacctgaccaccctgatgaacatgggcaggggcggctcggctgcggacgcccatggccatgagctgcgagccgcctgcagctagctgaggcggctgcgtgcgtgaggtcatgcccgtggcggcggccggacctagtagacctggcacgacgtcgtggagcagaatctacgtgctctgcgaatacccgttgcatccattgattggactgttgtaatcacgggaacagatagcgaattgggcaggtgtttttttaaggtaatgggaggtgttatattctggacccttaccatggcgcgtcattgtatttgcatgcgcagttgtgttgtggccgcattcagcttctttatattgttttgtcgccgttcagaacggttagccgaatcttaccgtgagccatggcatggtgaccacacggattacagccagccgtgtggcgctagcagatgcatgcaacagtcggctggggcggccatgaatgcgggaggctgtagacctgtagtgatgtcctgtttgtttcagtttatacattatataatctggattataatctagattatataattcatgttataatctgtctagattataatatatatgttgtttggc

SEQ ID NO: 2702 - DNA, 303 bp, Zea Mays
atggagctatcggttgaagaatcatgtaggccactcaacaaccaattacagcatctgttggtacacactgacaactgtagatacaacaagttacagatagctgggcacctggtctctgcccagctgtgcctcgaaaatgggggaagacgaagagaaaaccggccgacaaaaaaagggaacctcacgctgttgcagatgacccatcagagtgatctgaaactttctacaggatccgagtcctcgagcattgaggccgcctggaagcagtcggcggcatcagctagcctgccgtcctgcttgtga

SEQ ID NO: 2703 - DNA, 3443 bp, Zea Mays
cttgtgcctttttgctttccgtgtgctcagctcactcagcatccagcaagcctcccctggacagttcttgagcaatgcatatttttcagggtaacttttttgctttaaacgtttttttttttgtaccaagatttcttttgtgaattggcagcggtgcccctcctccgccactgcctatatatgtgccctcaaacccgctccattgctctgtagctcttccctctgctgctctctctgagcctggcccttgccctcctctccctccgggaaccagccctgctctctatgctcctcttccattcatagcctcggccttcgtcttcctccatggatccgcgctaaatgcattgcgaggttccaaactggtagcacttctccctgctccatctgccgcaagatgtaagcacggcctcacgccctcacttgacactccgactggccatccagaatataccttcagatcttcctgtctgcgaaaagcgacgcccttttggcccgggcaatggaggagagcttcgtgcccttgcggggcatcaaggacgacctccacgggaggctcgcctgctacaagcaggactggaccggagggttccgtgccggtatcagggtttgtgtgtggactgctatcctgctcttcttgctggccatactaggcgcgtgctccatcatcaaccggttcacccgcatcgctggcgagctgttcgggcttctgattgctatgctcttcatgcagcaggctatcaagggacttgtcgacgagttccgcgttcctgagagggaaaacacaaaggcactagagtttgttccatcatggcggttcgccaatgggatgttcgcaattgtcttgtcgtttggccttttactcactgccctcaggagcaggaaggcacgatcatggcgctatgggacaggttggctgcgtggcttcatcgctgactatggtgttccactgatggtgctagtgtggactggagtgtcttacataccttatggaaatgtaccaaaaggaattccgcggcgcctttttagccctaatccatggtcccctggcgcatacgacaattggacagtcgtcaaggacatgacacaggttccactcctctatatccttggtgcattcataccagcaacgatgatcgctgttctctactacttcgatcacagcgttgcgtctcagcttgctcagcagaaagagttcaacttgaggaagcctccatccttccactacgatttgcttctcttaggtttcctgacgttaatgtgtggccttattggtatccctccatcaaatggtgtcattccacaatcacccatgcatacgaagagtttggctactctcaagcaccagatccttcgtaaccggctagtagccaccgcacggaagggcatgagccagaatgcaagcctgagccaactgtatggcagcatgcaggatgcttatcagcagatgcagacaccactggtttatcagcaacagtctgtcagaagaggcttaaatgagctcaaggactcaacagtccagctagcttcgagtatgggtaacattgatgcaccagttgatgagacagtctttgacatagagaaagaaattgatgatctgctgcccatcgaggtcaaggagcagcgtttgagcaaccttctacaggcttcgatggtggtgggctgtgtcgctgctatgcccctgctcaagaagatccctacgtctgtcctctggggctattttgccttcatggccattgagagcttgcctggtaaccagttttgggagaggatcttgctcctcttcactgctcccagcagaagatacaaggtgcttgaagagtaccacacgacgttcgtcgagacagtgccattcaagacaatagccatgttcacagtgttccagacagcttacctgttggtctgctttggaatcacatggattccaatagccggagttcttttccctctcatgatcatgctcctggttccagtcaggcagtacatcctccctaagctcttcaaaggtgcacatctaactgacctggatgcagctgaatacgaggaatcaccagctataccattcagccttgctgcgcaagacatcgatgtcgcattgggacgcagccagagtgcagaaatcctagacgacatggtcacgagaagccggggtgagatcaaacgcctgaacagcccgaagatcaccagctcaggtggcacgcctgtggcagaactgaaaggcatccgcagcccatccatttctgaaaaagcatacagccctcgtctcactgagctccagcatgagcgcagccctctgggagggagaagcaggcctaggacgccatccaagttgggtgaaggctcggcaccaaagtgaataaagcaatgatgcattgcttaagctatgcaactactgggttactggccatcaattatataagtgattttaaagtggtttcagtgttagtatccaagatgtcctctgatgagattactactattcatgtgtatctctagcctctttttctttctttctcttcttttgtgttctcctgattaaaggagtgctatacctgtaatctctgaactagcagaaatattagagtaactactcgaaaaatcctgtcgctaacatattatcattcttcgattgttttaatatgtacatgaaattggtgggaaattatgcgcatgcatttccattgaactcaagcatgcatccggattctggaatactctagtgcttattctattgacgttggtgctggagcatggaatcattttttgcttcaaaaatgtatactgaacgtgtgattcaataaccaattcagtgaactgaaagttcagaaacggattcagaaaaacaaggataaggtcagaaatgactgattcagacatgatgctaaaagttcccaacatcataaaagtttttgacttgagagttgcgcatgcgaaaaacaaggataaggtcagaaatgactgattcagatagaaagatgattgcacagggagataccaatcgtgtggagtcttccactctacgtatctgcaagaggaattccatgctgactccggcagtaatttgctaggcaccaccacaagctgtaagacatggtatgattgtataggagacctgcatggccaaatggttcttctcaatgtcatgaatgccaagtacatctgctgaatacagccttgaaatcgtacttgctcatgctactatagagggaaaggctccttgtggtgggaacaactgcaacacatgcctgcagtaggtagaaagtgtagaaacttgagggtggcacccaagcacagcacagctacaatccatccttctctctactgcagccatgattccagctttagaagaaaccccctgcattggccctgaagcgttgacctgctgaagccaacatgtcatagccccaccatgaaattccctcaggatgcaggctcacctcatt

SEQ ID NO: 2704 - DNA, 3201 bp, Zea Mays
ctttcctcgtaatcttgcattgtgctgtctaggattaggaattcggtatcaccatggtgccaaaatctcgaaactgactgcggcggaggatcctggcgcctaccacttacatattcttcgcgtccgcgataccggtgatatcgttcggggagcaattggagaggaacactgatggagtcctcacagcagtgcagacgttggcgtccactgccctgtgcggcataatccactccattgtaggagggcagcccctgctgatcctgggagttgccgaaccgacggtactcatgtacacattcatgttcaactttgccaaggacaggcccgacctcggacggaatctgttcctggcctggaccggttgggtttgtgtgtggactgctatcctgctcttcttgctggccatactaggcgcgtgctccatcatcaaccggttcacccgcatcgctggcgagctgttcgggcttctgattgctatgctcttcatgcagcaggctatcaagggacttgtcgacgagttccgcgttcctgagagggaaaacacaaaggcactagagtttgttccatcatggcggttcgccaatgggatgttcgcaattgtcttgtcgtttggccttttactcactgccctcaggagcaggaaggcacgatcatggcgctatgggacaggttggctgcgtggcttcatcgctgactatggtgttccactgatggtgctagtgtggactggagtgtcttacataccttatggaaatgtaccaaaaggaattccgcggcgcctttttagccctaatccatggtcccctggcgcatacgacaattggacagtcgtcaaggacatgacacaggttccactcctctatatccttggtgcattcataccagcaacgatgatcgctgttctctactacttcgatcacagcgttgcgtctcagcttgctcagcagaaagagttcaacttgaggaagcctccatccttccactacgatttgcttctcttaggtttcctgacgttaatgtgtggccttattggtatccctccatcaaatggtgtcattccacaatcacccatgcatacgaagagtttggctactctcaagcaccagatccttcgtaaccggctagtagccaccgcacggaagggcatgagccagaatgcaagcctgagccaactgtatggcagcatgcaggatgcttatcagcagatgcagacaccactggtttatcagcaacagtctgtcagaagaggcttaaatgagctcaaggactcaacagtccagctagcttcgagtatgggtaacattgatgcaccagttgatgagacagtctttgacatagagaaagaaattgatgatctgctgcccatcgaggtcaaggagcagcgtttgagcaaccttctacaggcttcgatggtggtgggctgtgtcgctgctatgcccctgctcaagaagatccctacgtctgtcctctggggctattttgccttcatggccattgagagcttgcctggtaaccagttttgggagaggatcttgctcctcttcactgctcccagcagaagatacaaggtgcttgaagagtaccacacgacgttcgtcgagacagtgccattcaagacaatagccatgttcacagtgttccagacagcttacctgttggtctgctttggaatcacatggattccaatagccggagttcttttccctctcatgatcatgctcctggttccagtcaggcagtacatcctccctaagctcttcaaaggtgcacatctaactgacctggatgcagctgaatacgaggaatcaccagctataccattcagccttgctgcgcaagacatcgatgtcgcattgggacgcagccagagtgcagaaatcctagacgacatggtcacgagaagccggggtgagatcaaacgcctgaacagcccgaagatcaccagctcaggtggcacgcctgtggcagaactgaaaggcatccgcagcccatccatttctgaaaaagcatacagccctcgtctcactgagctccagcatgagcgcagccctctgggagggagaagcaggcctaggacgccatccaagttgggtgaaggctcggcaccaaagtgaataaagcaatgatgcattgcttaagctatgcaactactgggttactggccatcaattatataagtgattttaaagtggtttcagtgttagtatccaagatgtcctctgatgagattactactattcatgtgtatctctagcctctttttctttctttctcttcttttgtgttctcctgattaaaggagtgctatacctgtaatctctgaactagcagaaatattagagtaactactcgaaaaatcctgtcgctaacatattatcattcttcgattgttttaatatgtacatgaaattggtgggaaattatgcgcatgcatttccattgaactcaagcatgcatccggattctggaatactctagtgcttattctattgacgttggtgctggagcatggaatcattttttgcttcaaaaatgtatactgaacgtgtgattcaataaccaattcagtgaactgaaagttcagaaacggattcagaaaaacaaggataaggtcagaaatgactgattcagacatgatgctaaaagttcccaacatcataaaagtttttgacttgagagttgcgcatgcgaaaaacaaggataaggtcagaaatgactgattcagatagaaagatgattgcacagggagataccaatcgtgtggagtcttccactctacgtatctgcaagaggaattccatgctgactccggcagtaatttgctaggcaccaccacaagctgtaagacatggtatgattgtataggagacctgcatggccaaatggttcttctcaatgtcatgaatgccaagtacatctgctgaatacagccttgaaatcgtacttgctcatgctactatagagggaaaggctccttgtggtgggaacaactgcaacacatgcctgcagtaggtagaaagtgtagaaacttgagggtggcacccaagcacagcacagctacaatccatccttctctctactgcagccatgattccagctttagaagaaaccccctgcattggccctgaagcgttgacctgctgaagccaacatgtcatagccccaccatgaaattccctcaggatgcaggctcacctcatt

SEQ ID NO: 2705 - DNA, 3105 bp, Zea Mays
gcggccgggagcggcggcacgacgggtggagggaaggcagggcggcgcgggcgggtgcagggaagacagaaagaaacagagaagaagggtcggggaccgttttaaacttttagttttcgtcggccagggctagccgccgaaaataagccattattttcggcggctgtgtcagaagccgccggaaataacgttattttcggcggctgtgtcagaccgccgaaaataactgcttattttcggcggccaacccctggccgccgaaaataacagtggccgccgaaaatggtgcactgctgttgtgttagttagccaagggcgtcccattccacccttgtggtagcacgtgtttctcaagttaagctccatgtttcaattaaaaatataatgatcttgacatgagcataaataaaataacagaatatttggaacatagatataatgaaataataatcccaaaaccaaataatgtaatagcataactacccaagtgaatcaggggtaaacaaggtaaacatgataaccagactagggtgacctattgggacccaccaaaattaaacctatgcattgaataatgataataaagaatattattgggtaacaaaagtggatcaagggcacaacttgcctggcacttgagattccagttaccagggtgattcttcagatcctcgtgacctcactgctagttgtagcaatacaaacaaacatggtatagacaaaattaacatcacaccaaccataagtacaaactgaataataataatctacgcgtcgtaacgagatcgcgggttcgagaactactaagatcggagttacgattgaggagttatgattgtatagaggatttatgtgattaaaatattaaactatattataaattggttaatacaaatcatatgagaggttattctataaataattatctcaactttaatctaagttatgaattgaccatagatcatcttctagtagattataatgataagtagattaacaagactaacccacataaaattaaataaagatctaattagaaaagattgagacatggtataataaatgttgttactacgtagtaaatacttgtacgagactaacacaacttgaatggatcaaatcggagttatagattttaagttatgaatttctaaagattctatgtgttttgtacaagattagatagaatataaattttaatgtgactttcatgtcaaaacagatgtactatgtgataaacaataatattatagatttatagaaattaaaatgaactaatttggacatcatatgaattttcgatgaattaaacatattctagcatttattttcacattaaaaaccattttctaatcacttttactaaatttctatttccctagactgggcgccaaattctggaaaagctaggggcctacgcataagaaatcctaagactcagcctaaccacgagttgtattgcgggtttattatgaagaactctgagggctcatctgcgaaacgaccgagccgaaggggtatcagggatccagcgccattggatccaaatttaagggctcagattatattgctctttaaccaaaccgatatcaaattatagtcgtcggatgatcgatccacagctcctatctaatagcgcgaagggatatacactaatccgatctcaaccgttcattctctgatccacggctacgattcaactaaccgaagggggtatcacgcttctaatctgatccctcaatccagggatcgacagtccagatggccccaagctgcgtctcctcccccccgcatacctgggcacggcggcgaccgcacagacggcgacgccattaacggtgaccgtgttcctccaaaactaaggtcctctactccaatccatggtcgctacacgccgttccaaccaaatagagataatggcgcatgtactcaccaaggatggcgcgtgcagtagctcggcccacggtagacccaggcacaacacggtggtgagagctccggcgagcaattcccaagaaagcctcatacaccgatgtccgcaacctccaccctcgctctcagggtgcaccagcgaaggatcacgaccccaacggaggccccgagctgcgacgtggacgagatgacggcggcagcgctggtgatacactctgctttcttccccctcgctctgcactcgatgtctttggtcgccaccctagggaatgaggcaaggcaaagacgatccgagtatttatgctccaaggtagggcacatgcatcgaggacctcggtggccgttaggtggttgagcagtcgtgagaatcctggcatcaagcatcggatattcatggaggaggagctgctaaccgtcgaggtccacacgtcagcgacgtaagacccatgcgtgagtgctacgcgaggtccacgcgctagcacgcgtggagcgcgacgtgggagggaggccagtgcgcacgcacggcgagaaacacgactgttccgttttcggccgcgcgatgtggagaagaagcgtctgaccccagggtcccacaagcaaggttacgagtgcgcctggccatgctgttagtgaaagtcgcctagagggggggtgaataggcggaatctgaaatttacaaacttaagcacacactacaagctggggttagcgttagaattaaattcgagtccgaaagagagggaaaaaatcaacaaagaaataaagcgatgcacatggtaatttgttttaccgaggttcggttcttgcaaacctactccccgttgaggtggtcacaaagaccgggtctctttcaaccctttccctctctcaaacggtcacttagaccgagtgagcctttctcttcaatcaaatgggacacttagtccactacaaggaccaccacaacttggtgtctcttgctttgattacaagtgagttggaaacaagaatagatgaagaagaaaagcaatccaagtgcaagagctcaaaagaacacaaaagtctctctctctagtcactaatttgtttggagtgattccggacttgggagaggatttgatctctttgtttgtgtcttggaatgaagtctatagctcttgtatgaggtttgatggctgaaaacttggatgcatt

SEQ ID NO: 2706 - DNA, 2916 bp, Zea Mays
cacaaatcacataccaaaatttttgcagcagaatttttattacaaagctttcaaattacaataagtttacattatcggagtgattacaaatgtgattaaaatattatactttgaaatgttataaaatatttgtaagtttggattacatgctagcataagcgacaatcctcaaaaagaagataaagatgggatatacttatataggaaggccgagcccaccgacacttagcaccatcaaagcagcacaaatctagtacctgcaacaacatgggttcgaaaaccctgagcacgaagtgtactttcgcaagtcttacccgactaaggaaaaagactctcaaggatatgctggctgattaggaatcaaggtacgactaagcaataatcaaggactcattttgcagaaaaacttactaatactagatccttaagccatcttttaattatcaatttaagttcttacctgattctagattttcctgatctagagcattttcacttgtctgatctagctttcttttaaccaattcatgtttcacttattaactacgatgagtggtcggagggtcaagtctccataaccgaggagcaacgacgatttgaaccgattatacccagctggggatccctaaccacacgacatatgtagcacttaacccttgcatatgtcaacagttctcacagatcctccacaacgtgaaccggtccgcgctacccgggagcacagtactcctctgtctagcctctagccaggagggtacacgctactcccaccatctcccacgtccagtgcacgattgtgttttcacgtatggaatagccgggttcaggcttaccggggcatgtggctagttgcaaagtctcaaccacaacaggcctacatcaaacggtccttaatcgacacaggcggagcactacactgactcatttcacgatgcaagccacccacccggtctcatattaattatctaactcaagttcattcacacataacaataaccagtaatcaaaataaatttcaaaatcttatcactttaagcagggctaagcgacactagtttttcataaaataggtatcaaggaatgattattcaaattctcaaggatggtaatgcatcaattgtttgatcacgcaactcatatcacctaatgcatcatatcaagtgataaaagttttgtaaacgacaaggaaggtggtggatgcaccggggcttgcctttgatgcagagaagagagccgaagactaagaaaataaaatgtcacaagtcttcagggtgatgaccagtctccagaaaattactccaccaaacgattgattcaccgatgacgtgatctacacgtagagtaaagatgcatgcatgctatgatcacgatgccatgatgagattaacgtacatgcatgaaaaagaatctaaatcataaaatctcaattatatctttcattcaccaataagttgcacttaattatcgacaaaaatctaattactaccctaacaagattgctaacactttttttaaaaaaaaacacaactaaaagttgccatgaattaaccgaaatccatacaccaaggacttcatccgacactacaaaaattattaaaactatttatccattcttcgtaatttcctaagtatttactctattaataaatgtatcttttaactagatttagactggttatctaactgaacaaactctgaattaaatcaaaccatactgcaaaagaatctaagcctacacaataccaaagccgagtgaagattcaccaaaatggtggcaaacctgactcaggcatttttttatctagcgagcgacacatataaattcacttttattcaccatctaattccttccgaccactaatcacactaccacgattcacccgcacaagatacggactgatggcgtagaccaccagtcgatcaataacacacatgaaacaatttttctcggaccacactctcctataatcaaaacacacaaccatcatcaccgacgcaagcataaatctacgatattaaaatcacagtcacaagaagtggcatattaagtgaacagctaagacgtcgagacacatacaactacatcatctaccagacaacaactaccgaacgacgtcatatatcagacaaacttttggcacccaccataattttagacattggagcacttactcaggttttcagtaagcatcaccgacatggaggaaataaagtgtgaggagcacgacgtcgcgagacagcagggatgacgacgcggcgaactgcatgaggtgatgtcgaacaaagctaagaattttgatcggcagttttaaacaaataatgacaacgacgacgaaccggtgaggcaaggaagtcggccgatgactggggaatttccagggagccggcgagctgctgtagagcgagtagtaggcgcagtaggcaacaacggtgttggggagacgagcgccggcatggcgatacagaagctggagacgtcggcgttcagcagctccacgcgacgacgcaccacaggaaggaaaaaatgagttaagtagctgcttccgagcgcgacgaggaggatgctattcggcgagtgtagcttgaggatggggctgagcgtggcgccacaaagtggctgctggcgcgatgacttctagtcgagggagacgagtcggagccggggacctagagcatggcgacacttgttggtaggaggagctagggccgagcgatctgaaggtgagagccaagaacaggaagaacgagcgttgagcagcatccgtgaagagtgaagacctgcacgtcgggacaggggagatgagggcgctggagcaacagaggtgcgatggctgagcagctttgctagcgcgataggctgagagcgacgacgtgccaaatctcagaatgaagactgagcatgtacgtggagataag

SEQ ID NO: 2707 - DNA, 5161 bp, Zea Mays
cgggctcccgtccccgcgtccattcacgccatgccacgcatggggtgctactcctgcaaggaaatctggtatgactgttctaggaaaagtcccaaaacctattaatttaccaagccagaggttggaaaacaatggtcttgatcccaatctagaactggttccaaagggcacccacacctggggcagcaaagcaccatccacaacaccaaatgcatggagttcctcgtcaattctgtctaccaagaacgatggaagttccagttcatctagccacttcaatggtcgaccgtcctctggcggaggctcaaggccatcaacagctggaagtgaaccacttggttcacccaatgcttggggtccaaattctcgcccatcttcagcatcaggcacatttccatcatctcatctaccaatggccacaaatcgtccccgaagtgcggaaacaagacccggaagttcacaactttctcgatttgcggataatgcttcagataatgtgaaagcgtcgataaggactattgatagaccggggtcttcatcacatgggcctgggttcacactaagtactggtgatttcccaacacttggctctgaagcaaatagtcaacgaggccatagttcgaaagggcgcccaatttctagttcgggtaaagaggtgtcgcaaggtgaacaagtgaagagcctaacaactggaaatggtgaattaatttcacaatccaataatcaacctgttgatatcatgaagacagagcagcatgcacacactggaggtgctcctgtcctcgccacaaatgtgccaaatgaaggcctgcaaccgcggccatatccaccaaattttcctatgcctcatccgcagtttgattcatggcgtgcacctcctggtcacccccctgagggaatgtggcatagaggactagtgccaggtgggccatacagaccagttggcccccctggtagttttcctgtcgaaccatttggttattatggtcagttcccacccaactctgaagttgcagcaaggcagggcccagggcatggtggatatcaggctaaaaatggagatgtgtatcatcctacgcctcctaattcctatattatgaatcagcctgttattccagtcagaccagtttatcagggtccagtgccgtatgatgggtattatggccctcgagcacatttcaataatgccaatgttagagatcctcattttgttggaggtcctggaatattaaatcaattccctaatcagaatgacaggtttcaccctggacatcctcaaaacagaccaggcagacatgaaacagttccaagggagcagctggaatatgataaaatacatgtgtttcatcgaggaaaccctgggagtttgcatgataattctgatcgtctaggaggttcccgtgaatttgaaaggaatgcgcagccagcatcgccacttcttccacatcctgatggaaaccggactgatgtgaacatgaggacagatacaagggacacctttagtgaaagtgaaagaaccagggtacttacaaaatcggtgcctaatcagagaggttcggttggtacagaacatttgtctgtttatgacaatgcacattcccatcacagagaaactggcgatggcactctgcgcaagaaattcaaggaggatggttcagctgcactgcatcctgtaattaagaagaatgcagctttaatagagaaaattgagagtttgaacaacaaagccagaaatgttgatgcacgtaatctcccagaatcagcttcgtccaaggaattcaataagcataaaaaaagcactgatgtttcatctaatgatgtcatgggtatggcatgcaaatctgacccggcagtttctgtttcctgtgtttctcctgcggtgcagagactaccaaacgtgcccatcaagggtacaattcttggtccggcacatccacagttaactgaatttagcaaagctgaaaagcttggtgattcaattagcgatcatgtacataggaaaagtgattcttcaagaaacagttaccatggtccttctaaagataggccagctaataaattcggaagtcatggacggggagaaagttccacaactgatctgaggaataatatcgatcatggccaacaacctgagattgcttcgcagctgcaacctgcgattgtacctgatgatatgccagcttcactcgattatgagtctcagcgtgcaaaaatgaaggagttggctgcagaacgtgcaaaaaagttgaaagctgaggaagaggaacggataaagaaccaaaaagcaaaagcgctcgcaaagttggaagaattgaacaggcgatcatcagtacttcagaagaaatcaaatgatataaaagtagaaacttatgatgcacatgataagcaacatgctggacttgatgtgactgctaaacttgacacttcaactgaaccacatgatgttattgcgcctgataggcttactgatcttctgcctcctaatgatcccaatcatactatggttcatatacaggcccagtctacagcacaatcacatgctttagatggtggcaaagaccctgatgctcatgcaacctcgtctttggtcaagaacactcacagcaacatggagcctgttgtgcagaagagtatctcgcagttgcatgacatcactgtggtaaaggccaagcaagggtacaggaaaagacatgtgtcagaagagaaaatttctgatgagaaggcaagtgcttcaataaccactagaaatattacgaaaaatgttgatgttctcatcgacacagtgacggctgttgttgcaccacatgatgatccacctactcagaacaagaagggaacccgacatttgagaagtaagaaaaagttagatgatgctccagttacttctaaacatccacctgtggtgttgaatgagccgaatacagtgaaagtctctaccgagccaaagacacatactggtggtgttatcatcagcagctctattgttcccactgaaggtactattgtaactgttggaagtataactgttggtggaatttcacttaaacctatgaatcaggagcgggttaaatcaccagatggaacaaataatactgaaagtagccaaccaagacctcagcaaacgagaaaatctggaaagcatcagcatgttcttcggcctgttgagaagccacatgggaatgatggtatcttgtgtgcaccagttaagccaccagtgccgaatgagcactctgatggagccatgccgactgcagcagtagctgacctcactaaaccagtagggaaagccataaatgatggggagaatgtgacaagaacaaagagggctgaaatggaaagatacgttcctaagcctatgtccaaagaactgcaacaacaaaatccaagtgatgataaggaagcagttgataagcccagtggtgctaaatcacatcctgcagccgaacccaagaaaactagcaaagcacatgggggtaaatctaatccttcttggcgcaagaggaatccagatgaatcagctttggtggcaccaaattctgttgagcaagcagacgtctcttatgaatcaaaggaggttcagaacttcacctatcagaagcagcctgttgaacttggcaagcaagatacacagttaaaattcagtgtagatgctgctgctgaaaatagctcagctccagttcaaacagttccgctatctgtcggtggcgcaaaacaacatagtgcagctaacagacaaaggcgacagcatgttaaggctcaaagaaatgaagcaagtggctactcaaatgagagcaaaggtagcgagggcaagaatgatgttgtctatcaatcagcaacacccgtcatggattcgaactcatccaatcacaggaatgtgccaagatctgatgtgaaaaacagcggcgtagtttcacactctagagcctggaagccgaaaaccaattcccatcctcaggacagctcagacggcaagattgctgttgacgggcaagtggattcccatggtggtaggcttgagatgaatacgtccaaaggatctgatacaattacccatctagtgaccagtagtgaaccgacgaaaaggagtgatggcaaagaggtctcacacagcaaacatgagaacctggcacgggaagatggtaaccagaagggtgagactgaacaggagcaggctaatcctacactacgtcgccaaggccagcccaatgcaaggtaccacaggggaggtgggtcacacaggggaagggggggttatgacactgggaggccaaaccatgtcacaaatgtggagaggcggaagggtggcagccatcttgaataccagccagtcggaccccaaaacaaagctgcagacttccaacagagcctgggcatggaagaacgaaccgaggggcctcctgcttctggacaagcgttcaggcagcgtggacacaacagggggctacgcccagcaggccgctttgtccagcgaaaccctgcttctacgcctaccactaattctcaccaaaatgaataatcttccgcggctgccacatccactgagcttcaggaactcgcgcttgtggtggtgtttcacaacagataggtttggatgcgcggcaggtgtccttctacgactaaactctactggtggtgagcattaggatcctgtaatgataatagtctttgtcccaagggcacctggaccctgtgattgtgggaatttgcctttgttgggatgcaatgttggaacgtgtactaacagagttgttgtgtttgagaacttggtttaaatgttagcctgtgatgctaatgagaacagaaagtgttggtttttgcccaacttcctggcctcagtggataatatgctggcatcaccatagcacgctggcgttttatattgttgtcgatggtgttcatggcaatttgctttggatcgactggattggatcgccgaaataatcaaatcgtatgtggttattttgataaacggggtggtgatcatcttggccctgtttactgtttagcaagctgtttaaatccatagcaaggtcaatgctaaaagctgttatgtttcaaatttattccttccattccaaacggctcatatttcgatgagttaaacttcatatataatgtaatacttgttcgaataaaaactgtaaatgagtcgagaactgtt

SEQ ID NO: 2708 - DNA, 5517 bp, Zea Mays
acgaacccctctggcctctggccctctccaaccttctctcttccccgttcccccgtcgcctcggcattccgccgccgactccgacgagggggccccacctgtcatcctcctcccccgccgccgttcgccggacggcagcgcgacgaggagccgtttaccccttcctgccccgcggcatccgcgttcgcgttgtgcgccgctgatccgagcggaccgcttcccgcgctgatcgctttctccgttcgacccctagggtttcggcgttcccctgtctccccgcgcccccttggaggcagcaccagagatctcgatcttccgcggcctcggtcgcgctacgcagttgaccccgctcgatttatcaccggggaattagagaggcgttttccgggggagtttcttcgcggggaagaggggccatggcctcgagtctgctcaccacggacaggagatggggtgctactcctgcaaggaaatctggtatgactgttctaggaaaagtcccaaaacctattaatttaccaagccagaggttggaaaacaatggtcttgatcccaatctagaactggttccaaagggcacccacacctggggcagcaaagcaccatccacaacaccaaatgcatggagttcctcgtcaattctgtctaccaagaacgatggaagttccagttcatctagccacttcaatggtcgaccgtcctctggcggaggctcaaggccatcaacagctggaagtgaaccacttggttcacccaatgcttggggtccaaattctcgcccatcttcagcatcaggcacatttccatcatctcatctaccaatggccacaaatcgtccccgaagtgcggaaacaagacccggaagttcacaactttctcgatttgcggataatgcttcagataatgtgaaagcgtcgataaggactattgatagaccggggtcttcatcacatgggcctgggttcacactaagtactggtgatttcccaacacttggctctgaagcaaatagtcaacgaggccatagttcgaaagggcgcccaatttctagttcgggtaaagaggtgtcgcaaggtgaacaagtgaagagcctaacaactgacagagcagcatgcacacactggaggtgctcctgtcctcgccacaaatgtgccaaatgaaggcctgcaaccgcggccatatccaccaaattttcctatgcctcatccgcagtttgattcatggcgtgcacctcctggtcacccccctgagggaatgtggcatagaggactagtgccaggtgggccatacagaccagttggcccccctggtagttttcctgtcgaaccatttggttattatggtcagttcccacccaactctgaagttgcagcaaggcagggcccagggcatggtggatatcaggctaaaaatggagatgtgtatcatcctacgcctcctaattcctatattatgaatcagcctgttattccagtcagaccagtttatcagggtccagtgccgtatgatgggtattatggccctcgagcacatttcaataatgccaatgttagagatcctcattttgttggaggtcctggaatattaaatcaattccctaatcagaatgacaggtttcaccctggacatcctcaaaacagaccaggcagacatgaaacagttccaagggagcagctggaatatgataaaatacatgtgtttcatcgaggaaaccctgggagtttgcatgataattctgatcgtctaggaggttcccgtgaatttgaaaggaatgcgcagccagcatcgccacttcttccacatcctgatggaaaccggactgatgtgaacatgaggacagatacaagggacacctttagtgaaagtgaaagaaccagggtacttacaaaatcggtgcctaatcagagaggttcggttggtacagaacatttgtctgtttatgacaatgcacattcccatcacagagaaactggcgatggcactctgcgcaagaaattcaaggaggatggttcagctgcactgcatcctgtaattaagaagaatgcagctttaatagagaaaattgagagtttgaacaacaaagccagaaatgttgatgcacgtaatctcccagaatcagcttcgtccaaggaattcaataagcataaaaaaagcactgatgtttcatctaatgatgtcatgggtatggcatgcaaatctgacccggcagtttctgtttcctgtgtttctcctgcggtgcagagactaccaaacgtgcccatcaagggtacaattcttggtccggcacatccacagttaactgaatttagcaaagctgaaaagcttggtgattcaattagcgatcatgtacataggaaaagtgattcttcaagaaacagttaccatggtccttctaaagataggccagctaataaattcggaagtcatggacggggagaaagttccacaactgatctgaggaataatatcgatcatggccaacaacctgagattgcttcgcagctgcaacctgcgattgtacctgatgatatgccagcttcactcgattatgagtctcagcgtgcaaaaatgaaggagttggctgcagaacgtgcaaaaaagttgaaagctgaggaagaggaacggataaagaaccaaaaagcaaaagcgctcgcaaagttggaagaattgaacaggcgatcatcagtacttcagaagaaatcaaatgatataaaagtagaaacttatgatgcacatgataagcaacatgctggacttgatgtgactgctaaacttgacacttcaactgaaccacatgatgttattgcgcctgataggcttactgatcttctgcctcctaatgatcccaatcatactatggttcatatacaggcccagtctacagcacaatcacatgctttagatggtggcaaagaccctgatgctcatgcaacctcgtctttggtcaagaacactcacagcaacatggagcctgttgtgcagaagagtatctcgcagttgcatgacatcactgtggtaaaggccaagcaagggtacaggaaaagacatgtgtcagaagagaaaatttctgatgagaaggcaagtgcttcaataaccactagaaatattacgaaaaatgttgatgttctcatcgacacagtgacggctgttgttgcaccacatgatgatccacctactcagaacaagaagggaacccgacatttgagaagtaagaaaaagttagatgatgctccagttacttctaaacatccacctgtggtgttgaatgagccgaatacagtgaaagtctctaccgagccaaagacacatactggtggtgttatcatcagcagctctattgttcccactgaaggtactattgtaactgttggaagtataactgttggtggaatttcacttaaacctatgaatcaggagcgggttaaatcaccagatggaacaaataatactgaaagtagccaaccaagacctcagcaaacgagaaaatctggaaagcatcagcatgttcttcggcctgttgagaagccacatgggaatgatggtatcttgtgtgcaccagttaagccaccagtgccgaatgagcactctgatggagccatgccgactgcagcagtagctgacctcactaaaccagtagggaaagccataaatgatggggagaatgtgacaagaacaaagagggctgaaatggaaagatacgttcctaagcctatgtccaaagaactgcaacaacaaaatccaagtgatgataaggaagcagttgataagcccagtggtgctaaatcacatcctgcagccgaacccaagaaaactagcaaagcacatgggggtaaatctaatccttcttggcgcaagaggaatccagatgaatcagctttggtggcaccaaattctgttgagcaagcagacgtctcttatgaatcaaaggaggttcagaacttcacctatcagaagcagcctgttgaacttggcaagcaagatacacagttaaaattcagtgtagatgctgctgctgaaaatagctcagctccagttcaaacagttccgctatctgtcggtggcgcaaaacaacatagtgcagctaacagacaaaggcgacagcatgttaaggctcaaagaaatgaagcaagtggctactcaaatgagagcaaaggtagcgagggcaagaatgatgttgtctatcaatcagcaacacccgtcatggattcgaactcatccaatcacaggaatgtgccaagatctgatgtgaaaaacagcggcgtagtttcacactctagagcctggaagccgaaaaccaattcccatcctcaggacagctcagacggcaagattgctgttgacgggcaagtggattcccatggtggtaggcttgagatgaatacgtccaaaggatctgatacaattacccatctagtgaccagtagtgaaccgacgaaaaggagtgatggcaaagaggtctcacacagcaaacatgagaacctggcacgggaagatggtaaccagaagggtgagactgaacaggagcaggctaatcctacactacgtcgccaaggccagcccaatgcaaggtaccacaggggaggtgggtcacacaggggaagggggggttatgacactgggaggccaaaccatgtcacaaatgtggagaggcggaagggtggcagccatcttgaataccagccagtcggaccccaaaacaaagctgcagacttccaacagagcctgggcatggaagaacgaaccgaggggcctcctgcttctggacaagcgttcaggcagcgtggacacaacagggggctacgcccagcaggccgctttgtccagcgaaaccctgcttctacgcctaccactaattctcaccaaaatgaataatcttccgcggctgccacatccactgagcttcaggaactcgcgcttgtggtggtgtttcacaacagataggtttggatgcgcggcaggtgtccttctacgactaaactctactggtggtgagcattaggatcctgtaatgataatagtctttgtcccaagggcacctggaccctgtgattgtgggaatttgcctttgttgggatgcaatgttggaacgtgtactaacagagttgttgtgtttgagaacttggtttaaatgttagcctgtgatgctaatgagaacagaaagtgttggtttttgcccaacttcctggcctcagtggataatatgctggcatcaccatagcacgctggcgttttatattgttgtcgatggtgttcatggcaatttgctttggatcgactggattggatcgccgaaataatcaaatcgtatgtggttattttgataaacggggtggtgatcatcttggccctgtttactgtttagcaagctgtttaaatccatagcaaggtcaatgctaaaagctgttatgtttcaaatttattccttccattccaaacggctcatatttcgatgagttaaacttcatatataatgtaatacttgttcgaataaaaactgtaaatgagtcgagaactgtt

SEQ ID NO: 2709 - DNA, 4988 bp, Zea Mays
ctccaaccttctctcttccccgttcccccgtcgcctcggcattccgccgccgactccgacgagggggccccacctgtcatcctcctcccccgccgccgttcgccggacggcagcgcgacgaggagccgtttaccccttcctgccccgcggcatccgcgttcgcgttgtgcgccgctgatccgagcggaccgcttcccgcgctgatcgctttctccgttcgacccctagggtttcggcgttcccctgtctccccgcgcccccttggaggcagcaccagagatctcgatcttccgcggcctcggtcgcgctacgcagttgaccccgctcgatttatcaccggggaattagagaggcgttttccgggggagtttcttcgcggggaagaggggccatggcctcgagtctgctcaccacggacaggagatggggtgctactcctgcaaggaaatctggtatgactgttctaggaaaagtcccaaaacctattaatttaccaagccagaggttggaaaacaatggtcttgatcccaatctagaactggttccaaagggcacccacacctggggcagcaaagcaccatccacaacaccaaatgcatggagttcctcgtcaattctgtctaccaagaacgatggaagttccagttcatctagccacttcaatggtcgaccgtcctctggcggaggctcaaggccatcaacagctggaagtgaaccacttggttcacccaatgcttggggtccaaattctcgcccatcttcagcatcaggcacatttccatcatctcatctaccaatggccacaaatcgtccccgaagtgcggaaacaagacccggaagttcacaactttctcgatttgcggataatgcttcagataatgtgaaagcgtcgataaggactattgatagaccggggtcttcatcacatgggcctgggttcacactaagtactggtgatttcccaacacttggctctgaagcaaatagtcaacgaggccatagttcgaaagggcgcccaatttctagttcgggtaaagaggtgtcgcaaggtgaacaagtgaagagcctaacaactgaatgacaggtttcaccctggacatcctcaaaacagaccaggcagacatgaaacagttccaagggagcagctggaatatgataaaatacatgtgtttcatcgaggaaaccctgggagtttgcatgataattctgatcgtctaggaggttcccgtgaatttgaaaggaatgcgcagccagcatcgccacttcttccacatcctgatggaaaccggactgatgtgaacatgaggacagatacaagggacacctttagtgaaagtgaaagaaccagggtacttacaaaatcggtgcctaatcagagaggttcggttggtacagaacatttgtctgtttatgacaatgcacattcccatcacagagaaactggcgatggcactctgcgcaagaaattcaaggaggatggttcagctgcactgcatcctgtaattaagaagaatgcagctttaatagagaaaattgagagtttgaacaacaaagccagaaatgttgatgcacgtaatctcccagaatcagcttcgtccaaggaattcaataagcataaaaaaagcactgatgtttcatctaatgatgtcatgggtatggcatgcaaatctgacccggcagtttctgtttcctgtgtttctcctgcggtgcagagactaccaaacgtgcccatcaagggtacaattcttggtccggcacatccacagttaactgaatttagcaaagctgaaaagcttggtgattcaattagcgatcatgtacataggaaaagtgattcttcaagaaacagttaccatggtccttctaaagataggccagctaataaattcggaagtcatggacggggagaaagttccacaactgatctgaggaataatatcgatcatggccaacaacctgagattgcttcgcagctgcaacctgcgattgtacctgatgatatgccagcttcactcgattatgagtctcagcgtgcaaaaatgaaggagttggctgcagaacgtgcaaaaaagttgaaagctgaggaagaggaacggataaagaaccaaaaagcaaaagcgctcgcaaagttggaagaattgaacaggcgatcatcagtacttcagaagaaatcaaatgatataaaagtagaaacttatgatgcacatgataagcaacatgctggacttgatgtgactgctaaacttgacacttcaactgaaccacatgatgttattgcgcctgataggcttactgatcttctgcctcctaatgatcccaatcatactatggttcatatacaggcccagtctacagcacaatcacatgctttagatggtggcaaagaccctgatgctcatgcaacctcgtctttggtcaagaacactcacagcaacatggagcctgttgtgcagaagagtatctcgcagttgcatgacatcactgtggtaaaggccaagcaagggtacaggaaaagacatgtgtcagaagagaaaatttctgatgagaaggcaagtgcttcaataaccactagaaatattacgaaaaatgttgatgttctcatcgacacagtgacggctgttgttgcaccacatgatgatccacctactcagaacaagaagggaacccgacatttgagaagtaagaaaaagttagatgatgctccagttacttctaaacatccacctgtggtgttgaatgagccgaatacagtgaaagtctctaccgagccaaagacacatactggtggtgttatcatcagcagctctattgttcccactgaaggtactattgtaactgttggaagtataactgttggtggaatttcacttaaacctatgaatcaggagcgggttaaatcaccagatggaacaaataatactgaaagtagccaaccaagacctcagcaaacgagaaaatctggaaagcatcagcatgttcttcggcctgttgagaagccacatgggaatgatggtatcttgtgtgcaccagttaagccaccagtgccgaatgagcactctgatggagccatgccgactgcagcagtagctgacctcactaaaccagtagggaaagccataaatgatggggagaatgtgacaagaacaaagagggctgaaatggaaagatacgttcctaagcctatgtccaaagaactgcaacaacaaaatccaagtgatgataaggaagcagttgataagcccagtggtgctaaatcacatcctgcagccgaacccaagaaaactagcaaagcacatgggggtaaatctaatccttcttggcgcaagaggaatccagatgaatcagctttggtggcaccaaattctgttgagcaagcagacgtctcttatgaatcaaaggaggttcagaacttcacctatcagaagcagcctgttgaacttggcaagcaagatacacagttaaaattcagtgtagatgctgctgctgaaaatagctcagctccagttcaaacagttccgctatctgtcggtggcgcaaaacaacatagtgcagctaacagacaaaggcgacagcatgttaaggctcaaagaaatgaagcaagtggctactcaaatgagagcaaaggtagcgagggcaagaatgatgttgtctatcaatcagcaacacccgtcatggattcgaactcatccaatcacaggaatgtgccaagatctgatgtgaaaaacagcggcgtagtttcacactctagagcctggaagccgaaaaccaattcccatcctcaggacagctcagacggcaagattgctgttgacgggcaagtggattcccatggtggtaggcttgagatgaatacgtccaaaggatctgatacaattacccatctagtgaccagtagtgaaccgacgaaaaggagtgatggcaaagaggtctcacacagcaaacatgagaacctggcacgggaagatggtaaccagaagggtgagactgaacaggagcaggctaatcctacactacgtcgccaaggccagcccaatgcaaggtaccacaggggaggtgggtcacacaggggaagggggggttatgacactgggaggccaaaccatgtcacaaatgtggagaggcggaagggtggcagccatcttgaataccagccagtcggaccccaaaacaaagctgcagacttccaacagagcctgggcatggaagaacgaaccgaggggcctcctgcttctggacaagcgttcaggcagcgtggacacaacagggggctacgcccagcaggccgctttgtccagcgaaaccctgcttctacgcctaccactaattctcaccaaaatgaataatcttccgcggctgccacatccactgagcttcaggaactcgcgcttgtggtggtgtttcacaacagataggtttggatgcgcggcaggtgtccttctacgactaaactctactggtggtgagcattaggatcctgtaatgataatagtctttgtcccaagggcacctggaccctgtgattgtgggaatttgcctttgttgggatgcaatgttggaacgtgtactaacagagttgttgtgtttgagaacttggtttaaatgttagcctgtgatgctaatgagaacagaaagtgttggtttttgcccaacttcctggcctcagtggataatatgctggcatcaccatagcacgctggcgttttatattgttgtcgatggtgttcatggcaatttgctttggatcgactggattggatcgccgaaataatcaaatcgtatgtggttattttgataaacggggtggtgatcatcttggccctgtttactgtttagcaagctgtttaaatccatagcaaggtcaatgctaaaagctgttatgtttcaaatttattccttccattccaaacggctcatatttcgatgagttaaacttcatatataatgtaatacttgttcgaataaaaactgtaaatgagtcgagaactgtt

SEQ ID NO: 2710 - DNA, 5570 bp, Zea Mays
ctccaaccttctctcttccccgttcccccgtcgcctcggcattccgccgccgactccgacgagggggccccacctgtcatcctcctcccccgccgccgttcgccggacggcagcgcgacgaggagccgtttaccccttcctgccccgcggcatccgcgttcgcgttgtgcgccgctgatccgagcggaccgcttcccgcgctgatcgctttctccgttcgacccctagggtttcggcgttcccctgtctccccgcgcccccttggaggcagcaccagagatctcgatcttccgcggcctcggtcgcgctacgcagttgaccccgctcgatttatcaccggggaattagagaggcgttttccgggggagtttcttcgcggggaagaggggccatggcctcgagtctgctcaccacggacaggagatggggtgctactcctgcaaggaaatctggtatgactgttctaggaaaagtcccaaaacctattaatttaccaagccagaggttggaaaacaatggtcttgatcccaatctagaactggttccaaagggcacccacacctggggcagcaaagcaccatccacaacaccaaatgcatggagttcctcgtcaattctgtctaccaagaacgatggaagttccagttcatctagccacttcaatggtcgaccgtcctctggcggaggctcaaggccatcaacagctggaagtgaaccacttggttcacccaatgcttggggtccaaattctcgcccatcttcagcatcaggcacatttccatcatctcatctaccaatggccacaaatcgtccccgaagtgcggaaacaagacccggaagttcacaactttctcgatttgcggataatgcttcagataatgtgaaagcgtcgataaggactattgatagaccggggtcttcatcacatgggcctgggttcacactaagtactggtgatttcccaacacttggctctgaagcaaatagtcaacgaggccatagttcgaaagggcgcccaatttctagttcgggtaaagaggtgtcgcaaggtgaacaagtgaagagcctaacaactgtaatgggaaatatcttgtgtgctaggaaatggtgaattaatttcacaatccaataatcaacctgttgatatcatgaagacagagcagcatgcacacactggaggtgctcctgtcctcgccacaaatgtgccaaatgaaggcctgcaaccgcggccatatccaccaaattttcctatgcctcatccgcagtttgattcatggcgtgcacctcctggtcacccccctgagggaatgtggcatagaggactagtgccaggtgggccatacagaccagttggcccccctggtagttttcctgtcgaaccatttggttattatggtcagttcccacccaactctgaagttgcagcaaggcagggcccagggcatggtggatatcaggctaaaaatggagatgtgtatcatcctacgcctcctaattcctatattatgaatcagcctgttattccagtcagaccagtttatcagggtccagtgccgtatgatgggtattatggccctcgagcacatttcaataatgccaatgttagagatcctcattttgttggaggtcctggaatattaaatcaattccctaatcagaatgacaggtttcaccctggacatcctcaaaacagaccaggcagacatgaaacagttccaagggagcagctggaatatgataaaatacatgtgtttcatcgaggaaaccctgggagtttgcatgataattctgatcgtctaggaggttcccgtgaatttgaaaggaatgcgcagccagcatcgccacttcttccacatcctgatggaaaccggactgatgtgaacatgaggacagatacaagggacacctttagtgaaagtgaaagaaccagggtacttacaaaatcggtgcctaatcagagaggttcggttggtacagaacatttgtctgtttatgacaatgcacattcccatcacagagaaactggcgatggcactctgcgcaagaaattcaaggaggatggttcagctgcactgcatcctgtaattaagaagaatgcagctttaatagagaaaattgagagtttgaacaacaaagccagaaatgttgatgcacgtaatctcccagaatcagcttcgtccaaggaattcaataagcataaaaaaagcactgatgtttcatctaatgatgtcatgggtatggcatgcaaatctgacccggcagtttctgtttcctgtgtttctcctgcggtgcagagactaccaaacgtgcccatcaagggtacaattcttggtccggcacatccacagttaactgaatttagcaaagctgaaaagcttggtgattcaattagcgatcatgtacataggaaaagtgattcttcaagaaacagttaccatggtccttctaaagataggccagctaataaattcggaagtcatggacggggagaaagttccacaactgatctgaggaataatatcgatcatggccaacaacctgagattgcttcgcagctgcaacctgcgattgtacctgatgatatgccagcttcactcgattatgagtctcagcgtgcaaaaatgaaggagttggctgcagaacgtgcaaaaaagttgaaagctgaggaagaggaacggataaagaaccaaaaagcaaaagcgctcgcaaagttggaagaattgaacaggcgatcatcagtacttcagaagaaatcaaatgatataaaagtagaaacttatgatgcacatgataagcaacatgctggacttgatgtgactgctaaacttgacacttcaactgaaccacatgatgttattgcgcctgataggcttactgatcttctgcctcctaatgatcccaatcatactatggttcatatacaggcccagtctacagcacaatcacatgctttagatggtggcaaagaccctgatgctcatgcaacctcgtctttggtcaagaacactcacagcaacatggagcctgttgtgcagaagagtatctcgcagttgcatgacatcactgtggtaaaggccaagcaagggtacaggaaaagacatgtgtcagaagagaaaatttctgatgagaaggcaagtgcttcaataaccactagaaatattacgaaaaatgttgatgttctcatcgacacagtgacggctgttgttgcaccacatgatgatccacctactcagaacaagaagggaacccgacatttgagaagtaagaaaaagttagatgatgctccagttacttctaaacatccacctgtggtgttgaatgagccgaatacagtgaaagtctctaccgagccaaagacacatactggtggtgttatcatcagcagctctattgttcccactgaaggtactattgtaactgttggaagtataactgttggtggaatttcacttaaacctatgaatcaggagcgggttaaatcaccagatggaacaaataatactgaaagtagccaaccaagacctcagcaaacgagaaaatctggaaagcatcagcatgttcttcggcctgttgagaagccacatgggaatgatggtatcttgtgtgcaccagttaagccaccagtgccgaatgagcactctgatggagccatgccgactgcagcagtagctgacctcactaaaccagtagggaaagccataaatgatggggagaatgtgacaagaacaaagagggctgaaatggaaagatacgttcctaagcctatgtccaaagaactgcaacaacaaaatccaagtgatgataaggaagcagttgataagcccagtggtgctaaatcacatcctgcagccgaacccaagaaaactagcaaagcacatgggggtaaatctaatccttcttggcgcaagaggaatccagatgaatcagctttggtggcaccaaattctgttgagcaagcagacgtctcttatgaatcaaaggaggttcagaacttcacctatcagaagcagcctgttgaacttggcaagcaagatacacagttaaaattcagtgtagatgctgctgctgaaaatagctcagctccagttcaaacagttccgctatctgtcggtggcgcaaaacaacatagtgcagctaacagacaaaggcgacagcatgttaaggctcaaagaaatgaagcaagtggctactcaaatgagagcaaaggtagcgagggcaagaatgatgttgtctatcaatcagcaacacccgtcatggattcgaactcatccaatcacaggaatgtgccaagatctgatgtgaaaaacagcggcgtagtttcacactctagagcctggaagccgaaaaccaattcccatcctcaggacagctcagacggcaagattgctgttgacgggcaagtggattcccatggtggtaggcttgagatgaatacgtccaaaggatctgatacaattacccatctagtgaccagtagtgaaccgacgaaaaggagtgatggcaaagaggtctcacacagcaaacatgagaacctggcacgggaagatggtaaccagaagggtgagactgaacaggagcaggctaatcctacactacgtcgccaaggccagcccaatgcaaggtaccacaggggaggtgggtcacacaggggaagggggggttatgacactgggaggccaaaccatgtcacaaatgtggagaggcggaagggtggcagccatcttgaataccagccagtcggaccccaaaacaaagctgcagacttccaacagagcctgggcatggaagaacgaaccgaggggcctcctgcttctggacaagcgttcaggcagcgtggacacaacagggggctacgcccagcaggccgctttgtccagcgaaaccctgcttctacgcctaccactaattctcaccaaaatgaataatcttccgcggctgccacatccactgagcttcaggaactcgcgcttgtggtggtgtttcacaacagataggtttggatgcgcggcaggtgtccttctacgactaaactctactggtggtgagcattaggatcctgtaatgataatagtctttgtcccaagggcacctggaccctgtgattgtgggaatttgcctttgttgggatgcaatgttggaacgtgtactaacagagttgttgtgtttgagaacttggtttaaatgttagcctgtgatgctaatgagaacagaaagtgttggtttttgcccaacttcctggcctcagtggataatatgctggcatcaccatagcacgctggcgttttatattgttgtcgatggtgttcatggcaatttgctttggatcgactggattggatcgccgaaataatcaaatcgtatgtggttattttgataaacggggtggtgatcatcttggccctgtttactgtttagcaagctgtttaaatccatagcaaggtcaatgctaaaagctgttatgtttcaaatttattccttccattccaaacggctcatatttcgatgagttaaacttcatatataatgtaatacttgttcgaataaaaactgtaaatgagtcgagaactgtt

SEQ ID NO: 2711 - DNA, 5501 bp, Zea Mays
ccaaccttctctcttccccgttcccccgtcgcctcggcattccgccgccgactccgacgagggggccccacctgtcatcctcctcccccgccgccgttcgccggacggcagcgcgacgaggagccgtttaccccttcctgccccgcggcatccgcgttcgcgttgtgcgccgctgatccgagcggaccgcttcccgcgctgatcgctttctccgttcgacccctagggtttcggcgttcccctgtctccccgcgcccccttggaggcagcaccagagatctcgatcttccgcggcctcggtcgcgctacgcagttgaccccgctcgatttatcaccggggaattagagaggcgttttccgggggagtttcttcgcggggaagaggggccatggcctcgagtctgctcaccacggacaggagatggggtgctactcctgcaaggaaatctggtatgactgttctaggaaaagtcccaaaacctattaatttaccaagccagaggttggaaaacaatggtcttgatcccaatctagaactggttccaaagggcacccacacctggggcagcaaagcaccatccacaacaccaaatgcatggagttcctcgtcaattctgtctaccaagaacgatggaagttccagttcatctagccacttcaatggtcgaccgtcctctggcggaggctcaaggccatcaacagctggaagtgaaccacttggttcacccaatgcttggggtccaaattctcgcccatcttcagcatcaggcacatttccatcatctcatctaccaatggccacaaatcgtccccgaagtgcggaaacaagacccggaagttcacaactttctcgatttgcggataatgcttcagataatgtgaaagcgtcgataaggactattgatagaccggggtcttcatcacatgggcctgggttcacactaagtactggccatagttcgaaagggcgcccaatttctagttcgggtaaagaggtgtcgcaaggtgaacaagtgaagagcctaacaactggaaatggtgaattaatttcacaatccaataatcaacctgttgatatcatgaagacagagcagcatgcacacactggaggtgctcctgtcctcgccacaaatgtgccaaatgaaggcctgcaaccgcggccatatccaccaaattttcctatgcctcatccgcagtttgattcatggcgtgcacctcctggtcacccccctgagggaatgtggcatagaggactagtgccaggtgggccatacagaccagttggcccccctggtagttttcctgtcgaaccatttggttattatggtcagttcccacccaactctgaagttgcagcaaggcagggcccagggcatggtggatatcaggctaaaaatggagatgtgtatcatcctacgcctcctaattcctatattatgaatcagcctgttattccagtcagaccagtttatcagggtccagtgccgtatgatgggtattatggccctcgagcacatttcaataatgccaatgttagagatcctcattttgttggaggtcctggaatattaaatcaattccctaatcagaatgacaggtttcaccctggacatcctcaaaacagaccaggcagacatgaaacagttccaagggagcagctggaatatgataaaatacatgtgtttcatcgaggaaaccctgggagtttgcatgataattctgatcgtctaggaggttcccgtgaatttgaaaggaatgcgcagccagcatcgccacttcttccacatcctgatggaaaccggactgatgtgaacatgaggacagatacaagggacacctttagtgaaagtgaaagaaccagggtacttacaaaatcggtgcctaatcagagaggttcggttggtacagaacatttgtctgtttatgacaatgcacattcccatcacagagaaactggcgatggcactctgcgcaagaaattcaaggaggatggttcagctgcactgcatcctgtaattaagaagaatgcagctttaatagagaaaattgagagtttgaacaacaaagccagaaatgttgatgcacgtaatctcccagaatcagcttcgtccaaggaattcaataagcataaaaaaagcactgatgtttcatctaatgatgtcatgggtatggcatgcaaatctgacccggcagtttctgtttcctgtgtttctcctgcggtgcagagactaccaaacgtgcccatcaagggtacaattcttggtccggcacatccacagttaactgaatttagcaaagctgaaaagcttggtgattcaattagcgatcatgtacataggaaaagtgattcttcaagaaacagttaccatggtccttctaaagataggccagctaataaattcggaagtcatggacggggagaaagttccacaactgatctgaggaataatatcgatcatggccaacaacctgagattgcttcgcagctgcaacctgcgattgtacctgatgatatgccagcttcactcgattatgagtctcagcgtgcaaaaatgaaggagttggctgcagaacgtgcaaaaaagttgaaagctgaggaagaggaacggataaagaaccaaaaagcaaaagcgctcgcaaagttggaagaattgaacaggcgatcatcagtacttcagaagaaatcaaatgatataaaagtagaaacttatgatgcacatgataagcaacatgctggacttgatgtgactgctaaacttgacacttcaactgaaccacatgatgttattgcgcctgataggcttactgatcttctgcctcctaatgatcccaatcatactatggttcatatacaggcccagtctacagcacaatcacatgctttagatggtggcaaagaccctgatgctcatgcaacctcgtctttggtcaagaacactcacagcaacatggagcctgttgtgcagaagagtatctcgcagttgcatgacatcactgtggtaaaggccaagcaagggtacaggaaaagacatgtgtcagaagagaaaatttctgatgagaaggcaagtgcttcaataaccactagaaatattacgaaaaatgttgatgttctcatcgacacagtgacggctgttgttgcaccacatgatgatccacctactcagaacaagaagggaacccgacatttgagaagtaagaaaaagttagatgatgctccagttacttctaaacatccacctgtggtgttgaatgagccgaatacagtgaaagtctctaccgagccaaagacacatactggtggtgttatcatcagcagctctattgttcccactgaaggtactattgtaactgttggaagtataactgttggtggaatttcacttaaacctatgaatcaggagcgggttaaatcaccagatggaacaaataatactgaaagtagccaaccaagacctcagcaaacgagaaaatctggaaagcatcagcatgttcttcggcctgttgagaagccacatgggaatgatggtatcttgtgtgcaccagttaagccaccagtgccgaatgagcactctgatggagccatgccgactgcagcagtagctgacctcactaaaccagtagggaaagccataaatgatggggagaatgtgacaagaacaaagagggctgaaatggaaagatacgttcctaagcctatgtccaaagaactgcaacaacaaaatccaagtgatgataaggaagcagttgataagcccagtggtgctaaatcacatcctgcagccgaacccaagaaaactagcaaagcacatgggggtaaatctaatccttcttggcgcaagaggaatccagatgaatcagctttggtggcaccaaattctgttgagcaagcagacgtctcttatgaatcaaaggaggttcagaacttcacctatcagaagcagcctgttgaacttggcaagcaagatacacagttaaaattcagtgtagatgctgctgctgaaaatagctcagctccagttcaaacagttccgctatctgtcggtggcgcaaaacaacatagtgcagctaacagacaaaggcgacagcatgttaaggctcaaagaaatgaagcaagtggctactcaaatgagagcaaaggtagcgagggcaagaatgatgttgtctatcaatcagcaacacccgtcatggattcgaactcatccaatcacaggaatgtgccaagatctgatgtgaaaaacagcggcgtagtttcacactctagagcctggaagccgaaaaccaattcccatcctcaggacagctcagacggcaagattgctgttgacgggcaagtggattcccatggtggtaggcttgagatgaatacgtccaaaggatctgatacaattacccatctagtgaccagtagtgaaccgacgaaaaggagtgatggcaaagaggtctcacacagcaaacatgagaacctggcacgggaagatggtaaccagaagggtgagactgaacaggagcaggctaatcctacactacgtcgccaaggccagcccaatgcaaggtaccacaggggaggtgggtcacacaggggaagggggggttatgacactgggaggccaaaccatgtcacaaatgtggagaggcggaagggtggcagccatcttgaataccagccagtcggaccccaaaacaaagctgcagacttccaacagagcctgggcatggaagaacgaaccgaggggcctcctgcttctggacaagcgttcaggcagcgtggacacaacagggggctacgcccagcaggccgctttgtccagcgaaaccctgcttctacgcctaccactaattctcaccaaaatgaataatcttccgcggctgccacatccactgagcttcaggaactcgcgcttgtggtggtgtttcacaacagataggtttggatgcgcggcaggtgtccttctacgactaaactctactggtggtgagcattaggatcctgtaatgataatagtctttgtcccaagggcacctggaccctgtgattgtgggaatttgcctttgttgggatgcaatgttggaacgtgtactaacagagttgttgtgtttgagaacttggtttaaatgttagcctgtgatgctaatgagaacagaaagtgttggtttttgcccaacttcctggcctcagtggataatatgctggcatcaccatagcacgctggcgttttatattgttgtcgatggtgttcatggcaatttgctttggatcgactggattggatcgccgaaataatcaaatcgtatgtggttattttgataaacggggtggtgatcatcttggccctgtttactgtttagcaagctgtttaaatccatagcaaggtcaatgctaaaagctgttatgtttcaaatttattccttccattccaaacggctcatatttcgatgagttaaacttcatatataatgtaatacttgttcgaataaaaactgtaaatgagtcgagaactgtt

SEQ ID NO: 2712 - DNA, 1415 bp, Zea Mays
ctccttctccttcgcgtccgccgccacctcgcagctcgtcttggaccggatcatggcgccgacgtcggtggaggtggcgccgctgacctccggccggctctcccacagcagcgggcctctcaactgcggcgggtcgctctccgacagcccgcccgtctcgccggagatcgacgacaccaagttctgcagagcggtgagtctgagcacgccgaagccgcagccgtacgcccgcggcgggagcaagacggtggggcggtggctcaaggaccgcagggagaggaggaaggaggaggcgcgggcgcacaacgcgcaggtgcacgccgccgtctccgtggcggccgtggccgcggccatcgccgcagtggcggcgggcaagggtgcgcgcacggacatggcggtggcgtcggccgcgacgctggtggccgcgcagtgcgtggaggccgcggaggccctgggcgccgagcgcgagcagctggcggccgccgtggcgtcggccgtcagcgtcaggacccctagcgacgtcgccaccgtcacggccgccgccgccacagcgctacgtggcgcggcgacgctcagggccagggcgctgaaggaggcgtggaacgtcgcggcggtgacccctgtggagaagggcgcgatgaccggaggcggcgggcatcacctgcacggcggcggctacaagcacgatggccagcagcagcggcagcggctcctcagggaggtggagagcagcaacagcagcagcagctgcttgagcgacgagctggtgctgggcgaggagaacaacttcctaggcatctgcacgcaggagctgctcgcgcgcggcaccgagctgctcaagcgcacccgcaaagggtcgttgcattggaaggtcgtctctgtgtacatcaaccgcgcggggctggtgatgctgaagatgaagagtcggcacgtcggtggcaccatcacgaagaagaagaagagcgtggtggtggacgtgtgccgggacgtggcagcgtggcccgggcggcacctgctggacagcggcgagcaccggcgctacttcggcctgcgcaccgcggagcagcgggtaatcgagttcgagtgcggcagccagcgcgagcatgaggtgtggaccaagggcgtcgcgcgcctcctggccgacgcccggaagcgctgagcgtctggtactgacagtgacaggtacccgggtcgccatgtaatgtaaagttaggtcgctgtaaagagcatgcatgcaaatgcagatgcagagatgatgttgtgtgatggcatcccgtcatcatgcatggtgattggggagttactgactatagaggagttaatgttgcctctaatcagttgaacttgctgaatgtacatttcacatcaccggacgtttcgatccatttatttttagaggaattgaaatttcgtac

SEQ ID NO: 2713 - DNA, 1418 bp, Zea Mays
atcctctccacgtactagcttctactttgttctatcaaccatccttatctctatatgtgttcctatcttcatctcagatcttgctcgtcacgtatctcctctcaatgtatggacgcttggacgtcgtcctcctccattcggacttcagcggggacaccgtctctatagtttttccccagacgtcaccagctgcttccacaccacgacatctctgttccattagtccaccctggacgttgccattgtcaagccatcgtcttcgaccttgctgtgcaggccgttgtgctgtctctgccggtctgctcgtcgtggcatggtcgtggaacctcctcagcgtcgtgcgcgtactccctctgcaccgagcacccactacaactcaccggtgctgaatctgctctcgcctggacgtcgtcgtctctgacttcagcagcagcagccccgcgatctccacatcacgtgtgcgatccgatctgcgcagccctaatgtgtcgacgtcgtctccattttgggcagccccggccacgacgtcgtccatctcggactccaagatacgcatcgggcgacactccagagtcagatcctgctacacagtaatcggttccaactcaatttgatggtccggatcccgcaaaaacttcctcaacatagagacatgaaataccgggtgtacccctgccatggaatccggcaattgcaagcgataagccaagctgccaacctgggccaagatacagaacggtccaatgtatctcaggctaagcttcccggagacactgatgaggacatcacttctatacatacaatgaatggactgataacacgatcgcgtgcacgacagctaaatctccaggtacgttctaccctagtcaattgtgtttaagagcttacacttggggccatggatgttttgatgattaggaacctttgagagaaccatcaaggacttgggaaaggccaaggtgttgaggaggagcagcaagggcacccacaacaggaaggagatcaagtccgactcggctggggtctaggaccagtctgcactaaaatgaacgcccaatatgcatccggactttgattgcgacaaacttgatattgttggaaagataaagagattatctaaccaacccaactggttccaccttaaaattcatccagagtcaacgggaatcgtcgaaacaattcagtgttcagattctgttttggtgctgtgacaccttctgttgggccattgggccgtgtatcgcgtcggagcccattaggggtgagtctaggggtcacgcatgccctaatactctatttattcagcagccaccgccacattagatttgggttttgcttagatcaattctgtcatcgaacagtgtcgccgtcatcggtttgtgagaccccatcccgtaatcaatacaattttggttgtg

SEQ ID NO: 2714 - DNA, 2316 bp, Zea Mays
agcttctactttgttctatcaaccatccttatctctatatgtgttcctatcttcatctcagatcttgctcgtcacgtatctcctctcaatgtatggacgcttggacgtcgtcctcctccattcggacttcagcggggacaccgtctctatagtttttccccagacgtcaccagctgcttccacaccacgacatctctgttccattagtccaccctggacgttgccattgtcaagccatcgtcttcgaccttgctgtgcaggccgttgtgctgtctctgccggtctgctcgtcgtggcatggtcgtggaacctcctcagcgtcgtgcgcgtactccctctgcaccgagcacccactacaactcaccggtgctgaatctgctctcgcctggacgtcgtcgtctctgacttcagcagcagcagccccgcgatctccacatcacgtgtgcgatccgatctgcgcagccctaatgtgtcgacgtcgtctccattttgggcagccccggccacgacgtcgtccatctcggtgagcccccctgttatctctgcttgcttgcatcccttatgttcgatgaagtgactgaatcgatgaaggaaacatgtttcagttcggtgctcttgtaacaccccgttgctctcacacaatgggtgttaccaaaaaacctcttcccacaaattagaaagcataaaaaatggagacagaaagaaaaaattcagcagcacctcccttgaaggttacataacgagaggaacacagagtttatacataatgcaaaagaaagttagtccgcagtgtataattaagatgcaaaggtagaaataaacattcaacacaaaatttaattcagccaaccaaaaatacgaccaccataaagactagaacataatagaccactagcacaccctatttcataataatcaacctcattgacttaaaacccctgtttaacatcattacaaagcagtggtataattatttaggggtgtagtgagcgtgctgctacttccctcctttcccccaagcaaagtttaagtccctgcatcaaacaatagaagagtgagatgacacatctcagcaagtaaaatgatcaaacaacaattggacaacgtaaataaaccgtattttaacaaccacgaagttcacaactcccttcttgaatattaaaatgcagcaagtatacaaggtaccaaatacccagttccaaaaaaacacaaagaggagatccacaatatccacgtaatcatgacaggttccacgttttgcccatgaatgcacatggctacaaatgcagtaatgacttctaccttcatacctctaaggatatgaagctgcatcatacccctcctcgggcaatgtatgatgcttattgtaccggtacggtcggaccatatgatcgcgacgaaacttccgtgcaaataatgacggatgcactatgcatgacaccaacatgagaccacccatctaacatgtgttaaatatatacttccacttcctcaaaataagaatcaacacatgtaatatgctcgaacaacgccctcaacatatgtaaatagtagaacatgaataacttcaagcaataatactcaaaatggaatacgaggatgaacacatttgacaaggatatgaatcaagaacaggacacataaatcgaccaacggtataaaccatcactattttacttgccttcaccagaaatttggacaaatccctaagtacgatccgaaagtccaccacctatttttgacacacatcttagtgcacaaattcacataacaaacgctcataaacaacgccgcacctacgcacaattccaaacccatcgcgagcgacaactctccccatcacccaccaaactgcagtggcgctgcttgacaatttcatatctttaaaattatgacagcagcgatatcaaacaaaaactccagaagcatctacataaaattccccacaagttttgtatacaaaagataattaaattccaacatctagatgaccccaaatagcacacaagatacatcctacgttcagtttttggacagcaacctagctgagttcaaaatgcgatatctcctaaaatatacttctgaatcgaacgcataagtactccttggaaagatatgacaaagctctacatgattttcacagtgattaccactaattacctccgcaaaatttccagaaactactaatactactggtgttcgtccaccaacaaaaattctggacagcacctctaccgaatcgcatagatgaacggataaccaaatgaattgtagcacaaataaaaagataaccacaagatcacctcgagttcttcc

SEQ ID NO: 2715 - DNA, 1293 bp, Zea Mays
atcggatcgagataaatggcccaaacctactctcacgtctgtgctcccgaccccggcgtacaagtcaaaaaaagttctactgcttcactgaggtatgcctcctaaaactccaatccccaataacacaagacacggaagaaaagaggaaaaataaacttcaacttcttttcagaaaattgggtatcacactctacccccttaaaaaaagaattcgacctcgaatttcgacgctattatcggaacaataaaagaaagattagcgaagaccaagaaactcacccataacaaaaagtttggggtacttctgccgcatcagctcctcaagttcccaagtagcctcgcgctcagactgattagtccacaagaccttaacatacttaattgatctccttctcatgatacgctccaaggactccaagatacgcatcgggcgacactccagagtcagatcctgctacacagtaatcggttccaactcaatttgatggtccggatcccgcaaaaacttcctcaacatagagacatgaaataccgggtgtacccctgccatggaatccggcaattgcaagcgataagccaagctgccaacctgggccaagatacagaacggtccaatgtatctcaggctaagcttcccggagacactgatgaggacatcacttctatacatacaatgaatggactgataacacgatcgcgtgcacgacagctaaatctccaggtacgttctaccctagtcaattgtgtttaagagcttacacttggggccatggatgttttgatgattaggaacctttgagagaaccatcaaggacttgggaaaggccaaggtgttgaggaggagcagcaagggcacccacaacaggaaggagatcaagtccgactcggctggggtctaggaccagtctgcactaaaatgaacgcccaatatgcatccggactttgattgcgacaaacttgatattgttggaaagataaagagattatctaaccaacccaactggttccaccttaaaattcatccagagtcaacgggaatcgtcgaaacaattcagtgttcagattctgttttggtgctgtgacaccttctgttgggccattgggccgtgtatcgcgtcggagcccattaggggtgagtctaggggtcacgcatgccctaatactctatttattcagcagccaccgccacattagatttgggttttgcttagatcaattctgtcatcgaacagtgtcgccgtcatcggtttgtgagaccccatcccgtaatcaatacaattttggttgtgtttc

SEQ ID NO: 2716 - DNA, 1642 bp, Zea Mays
atatagagtttaatttttatagatagataaataaagagttaaatataaagttaaaaataacgagttccttgaagatgctcagttaatttgctaaaatagagcaactccaaaaggctcttatattctttctgatggatatgaataagatttatgtaaaaaaaatatcctctaacaacttacttaaatggttgtacaaatgtagtcatcttctattctggttttctcgctaccaaaagatagaaaaaataaatgactctagagtgaaaacaagctatagaaaagcatttggagattgagaagatatagaaagtggattttatgtaaatgactctctaaatgagataatttagagagtggactttagaaagactcttggagatgctctaatagtttaactattagctagactgtttgtatatctttagctaattttagcaactaactattagctctaagagcatctccaagagactagtcaaatatcttttcctaatttgaagtaaaaaagattctagtgaaaaatagcgttcactaatctctttagttaatctctagatataatttttttatctattccagatttgttgctagttaaacatggagagtgaatatgactattcagaatgtgcataagatatagaaaggttgtccgagacaaaaaaaaatgataatgtttctacatataactctgcgaatgataacttaaaattagtttgggaactccatttttaagagattcatatttttaagggaaaataaacaaatttttctttacggcccgtccgtttgattggaatcagctaaattagaatttaatttttagacggatccgtttggcaagctataaaatcaaaaactaacttttcatccaatttttaggcccgaattagaagcttctaaaactttttacccctaaaacgaagaaacatattcctctcccagacaccgagcgttgcactgcttccttcctctgactcgcctcctccccgaccactatgccgccacctccaccctagtcctctcttagtcgcccgacacttcggcttaatgcagggtggaggacgcgagatctgctgttgcatatggagaagggtaagaagttagggagggcgtacatttcttggaatgatgacatatttgtggagtactacaacaagggtgacagatgccaaaatgggtggaagtctcatgtctacaacggttgttatcaagaatgaccgagaaaagtgcaatatagatatcacaaaagactaaatcatgtccaggatcaatacttttgacaagctccacactattatcaatggtatgctagaaacaagtgactttggttaggcttggaacaagagcaagatattcgttgatagtgattctgcattattattactattcgcgtgatttatgttgcatgataaattgtaggggtaaaactagtctctaatctattgcacatgcaatgactcagcaatacacatgtgcatagcaaggcacatgtgtatgttggtgtgtacgagttgatgggtattgtgtacaagttgatgtggttacttccctccaaatatgtaaattatataattatccaaacttgatattgaatttaattaatggaaaataattccattagcatccaaacaaaaaattgaat

SEQ ID NO: 2717 - DNA, 1185 bp, Zea Mays
cggacctccccacccgggactcctcacatcgatctatcgacgccgcctctcccaaccctagcagccaatcaacagatcggcgcaggctgcaacgagctcctccccacccaagcttgcaaggcggtcatatcaagcggcaccgtggcatgcattcatgtgggggacgagtcctctacgccgaagtgagccttcgtccctgccatggttgtggtgccgaaggaccccgccaaggcgcttttcttaagcaagaggcgttgggagcatcgagcgcgatgccatagatgacgcagccatcgacggaggggcacgacacgaagccagagatggtggacgggaacgacggcagcggtgccatggtaggcgttcacatgggggactagtcctatgcgccgaagcatgcctctgttcctgtcatggctgcagtggcgaaggaacccgttgaggtgcttgtctccgacaagaggcgatgggagcacggcggcatggatgacttcgaccacgagtttgacagaaagactgcaaggtcagatatgatgtgtgtatgctttctacctttcagcatctgattgatagagctatcatgactgagaggaagcgccgggaggtggaacactggaagcgcaagattggtggaccacaagccaggagcagcagtcgtccccgtttctcaggcaatccacaccagcaattcaagcagactcaccctcaaggacaccagcatcaacaccagcatcaacgttagcatcaacaatagttctagaggcaattccattagaagcagcagcagtaccgccagcacaaccaaccaggaggaagtcaatacaagaggcagagcagtcaggcacctagccttcctacaccagcaaccaatcggaacaactaagcagtgctagcgtacggaggaggccgaggatgtttccactgtggggaacaaggccactgggtgtctcattgcccgaaaaaagcagctcagcagtagtcaatttccaacaccccaaacaagacaaggagcaccacaacaagcatcgggaggttgtggccaggcctacaaccatggaaaggtcaacaacttggaggccgaagcaatccaggatgcactagacgtggcagtaggtatgtttcagttgaatctcatccagcaaaagtactatttgatactggtgccacacattcttttgtttctac

SEQ ID NO: 2718 - DNA, 5944 bp, Zea Mays
aaaaaatcgtagctgctttcccctaccctttccgttctcggaggacgagggcgcgacggcacgcggcgaaaacgacgcggccgcgtcgccaaaaccgtcgcctcgcttcctccctcccatgacgggctcgaaacccgcgcccgccgcctcgcagaaccctagcgcggtcccgcatcgtcgtcctcctcctcctcctcctcctcctcctccgccgccggtgacagcggttgcgagggtgcgcgaagaaggcgagctctcctccggcgccgacgacgacgagactctgcaaactcagctaggtgccgcatccattcttgggaagtttgtggaggctggatctcaagtgccatcggcaagtctcctcggtaaaggcagtaacaccttgattgtctcaaatgctctgaatcataaagcgtctgctccaagttacaagaagatcatgagggtgaatcaggggcaattcaaacctggcactaaccggaatctttcatggcagaagcctgtgtcaagtgataaccttctgataactttctcagatgatgatagtggggcagactctgggaagacagggcgagataaagttaggaaggctagctctcaaggtacacagagaacagggaacagtatgcaaactaggatcatgagagaggaagtatctcagcagaaaaaccttggttcaaaagtaggtcctgcacacttgcctgcttttccattcacacatagaaatgttggggccggcagggcatcaggtaatacctttttcaggaaagagctgcctgtccgccaagttaatcctctaaagtctaaacagaaagttcaaaatggggtaggagtacattctgaagatcataggttagaaatcttgcgccataagatagctgctaaagaaaatgaactaaaaggtcaaaaaagacctttgtccgctgttgctacaaagaatgcagatttttcttccaatcagccaaggctgccatctgaaaagataaggcttgaagcttccagcattggtgaatattcacgctttaatagtctgtctgaacatagtggaggaccaaataaaaggttgaagctcaatcagcagtacaaccaattttgtagtgacctgacaccattggcacctattggttctatatcaggaaaaaccaatgtgcaatcttcagaagtgacaaatcggtctgaaaatggaattactatgaaccttaatgttaatgaaacagatacaacagacacaacagaacttgcagatcaaatacaacaaggtggggcaactaagagcctacgtcaccacaaagattcaggaggtgctgagaaccatgttatgcttgagtcacatgatgggcttgcagcacaaccaccatttactgacacacaaactataccagaagatacaagtgcgttggcccctgtgacgtcagcccaagctaggcaacaggtactggctgttggtacttcacctgtgttagacggaacaccacaattgcaacctggaaaggagaatgacgaatgtttgaacagcagtggccagataggcgtagagacacagaacacaatattgttctctctacttgagatggaagaattacaagacaaggaattggaggatgctcaggagcatagacaaaaatgtgaagctgaagaaagagaagctcttagagcttatcgcaaagcacaaagagctttacttgaggcaaatgaaagatgtgcaattcttcgtagaaaaagggagatttgctcttcacaagtccatggtttaattgcagagaattcttctttggtgcagtctttgagtattcggaatcctgaagatggccttgcaatgccatcactgctcaattctcagattcatgcagttagtcagattcctgaaaatcagggtggtagacacaggctgtgtcctgaagaaccttctcagcagcaaattgataagcatgaagatgaagcacgtccacactattgtgataagcttgctgccagcacagctgatcccagctctgtgagtgctgtcaatgctgacagcatcctttcagattatatggaggatgatcttctgttcccgactagacaggcaagatcagaatgtgctctggatgttgagaatcaaatggaagaaactatacatgtatatgcagaggaaaacagacaagtttctggtgacggtggtgaggattatgaacttttagaagcttctttgaggtctagattggtggaaaggtttgggaagaaatcatgtttgaatggcaccattgatgaaggtactgaaggacttgctgttgggaaagtagctgcagaacatggcaagcagtctgcatatgttggacatcagttacaggaagcagagcagaatattatgacaactactcttgaaggtacaatggagctggaaaatgatggtgctgaaaaaactgttggcctctctaattcttgtagtggtccttcaatgggcaactgtgatcctgaggacaacatttcctctctcaaagagttatgcatgccattggttatggacagtcttatttttccttcttcagctccactaaatgctgctagacaaatcaagcgggcatttcctgggatttgcaaggagctttcagattacaaaaatgaccatctgaccagtgatgcagtgtctgaagttacaggaagtgtacaagatatgatacacgaccttgttggagaaaatatgaagatgctcccaactacccaaaatgataataatatggtgcacagtgtgattgatcccttctggcccttttgcatgtttgagcttcgaggaaaatgcaatgacgaagagtgccagtggcagcattttgagcatcatgattggagaaagctagagcttacaaaacactctatgatctctgtttcaggccagatcccttatggtttgtctcagtatattcttccagtgccagtgtatcgtgttggttcaaatcttattaaagctgatctgaacttgacacagtcagtgttggctagcagtttatggcaatattggcaaagggggttttgtgcttcttttcctttacctttatctgttcaaagagttcttccatcagatgcaccattctttcaggctggtgatggccggattgctgattttgataggaacagacaactactaaaatttcgaatgctggatagcaggaaggtgggtagagcacactgtattgcagttatcatcacatcacagaagtggcatacatattggagtctggttctttacactaaacttattcttgaagttttttgctctttctattcttgcataatggcatattgattatgttatattggtacttgttaacactgcactcttttcttgtggttccaatgaaaaatgctctgattttgacaatttccttctgcactggaccaagaatttacagacatttaaagtatacatttcatagtagttgtaagttggaacatgatgatatgacatttttggtttgaatgaatatatttacttcattgatatctgatctgcttgcattttgattattgctgtgtaacttcatatcgtgtagaataagattgtacagggttctgttgatattgaattcttcttggaggcagcccttgatttatattgtggaaaagtaaacaagcctgacagaatcaaggctctttcatttctggcgcggtccattgaggctgatccaagtacagttatcctgtgggtgttttatctccatatttactatcaaaaggatgaaggacttggaaaagatgacatgttttctgatgcggtgcaacacaatgtttattcttatgaattatggcttatgtatataaatagtaggttacgcgttgatgatcgattggatgcttataacgatgctttgagcatgctctgccaaatgacagctgagactgacaaggatctacaagaaagaagtgctttcatactagacattttcttacagatgatttacttcctgtgcatgtctggaaatatagacaaggcagtttctaggattattggaattcttccaactgcaatgcctgataattctggaaccttccagaggaaattattgatcagctggagtttcagaaagctttacctcgtgctttaatatggccttctattgatcccagtgtagacaacagagataagattacagatcttctaaattttgctgcttgtaagatggctgaagatattagtgagtgtgttaaaaacggggatccatcttacctgatgttatcacaattcctcgctgttaaccacattagttgtctagcggccattggaggcttaaaatcttctgttgatatgctggtgacctacatgaaggagtacccaatgtgtcctcagattcttctgatctcagctcggttagacagaaagcatggtacatgtccaggtctgaaaagctttgatgagttgatcttgaattggcctaaagaggcacaaggaattcaatatatgtggaatcaatatgttgaacatgctctggccactgatgccgagttagctgagaaggtactgacttgctggtttgaagaacatggaaaggactgtgatatccaaagcaatgctgctatttgtatagaactgagcagtgaagaacctggaacatcatcacttgtttcacctcaggcagttggttctggtccatctatatcagaagatctcgtctttcggttactaaacctctcactgtataagatactggagaacaacctacaggaagcacaaatggctgcgagtaaagcattgaaattggctcatggggagtggtacgagcactgtataagagaacatgctgcaattcatgcactggagctggagaaatcatcatcttcgacagatgctcaaactcgggctacattcagtttaatcattggctaccttgctgatcattgcaacttgcccacgagggagctgctgtcacgaaggttttgccagaatattaagaagcataggcttaggcagcttatagatgatactattggttctgttcctgcagattcttctctgataaactctgtccttgaagtgtgctttggcccatccctccttccaaaaagcattagcgatgtgaagtacctggttgattttgttgaaacagtcatggaggctcttcctgcaaactatcgcctgggcttggctgttggtggattcgtagctaagcacttcacaggttatggcgcagcctccactgggaccaggttctgggcaagctctgttctgatcaatgccatctttcgagctgtacctgtcgcaccggaatcagtatggctagaaggtgcaggcctcctggagaaactgcatgccacagagattttgaagaggttctatcagcaggcggcatcggtctatcccttctccttcaagctgtggcacgcccatctgaattactgcaaagccagtgggagcaacactgagagcatcctggagagtgcgaggcagcgtggcatcgagctgaatctgacaccaacatagtgtgtcccttggatccaagctgcatgatgttttgccagtcggagatgttggtagtgttgtgttaactggagatggcgtgtagatatatcggtgatcatggtggtgtgagatcatttttgttctttaggtgcaggtttagtgggacatagtcgtcggtatcttacagcatgtgtttctgatggagtgatatggttagtaagcagtggtgaaggatacaggcatacgggcactggggcatataccatacttttggactagacgggctagagactgattttggagtccgttatgtttccattttccgttctcttggttttctctgtcgtcaatgtattataatcatgatgatgaatggatggagaaatgagatgagatttttttgagttcactcttgcagtttcggttattatatttttgtgctgtcttcgaatctgatttggtcgacggcatgtttggaagtaaagtattttaaaatcaggttttggaatacta

SEQ ID NO: 2719 - DNA, 5281 bp, Zea Mays
aaaaatcgtagctgctttcccctaccctttccgttctcggaggacgagggcgcgacggcacgcggcgaaaacgacgcggccgcgtcgccaaaaccgtcgcctcgcttcctccctcccatgacgggctcgaaacccgcgcccgccgcctcgcagaaccctagcgcggtcccgcatcgtcgtcctcctcctcctcctcctcctcctcctccgccgccggtgacagcggttgcgagggtgcgcgaagaaggcgagctctcctccggcgccgacgacgacgagactctgcaaactcagctaggtgccgcatccattcttgggaagtttgtggaggctggatctcaagtgccatcggcaagtctcctcggtaaaggcagtaacaccttgattgtctcaaatgctctgaatcataaagcgtctgctccaagttacaagaagatcatgagggtgaatcaggggcaattcaaacctggcactaaccggaatctttcatggcagaagcctgtgtcaagtgataaccttctgataactttctcagatgatgatagtggggcagactctgggaagacagggcgagataaagttaggaaggctagctctcaaggtacacagagaacagggaacagtatgcaaactaggatcatgagagaggaagtatctcagcagaaaaaccttggttcaaaagtaggtcctgcacacttgcctgcttttccattcacacatagaaatgttggggccggcagggcatcaggtaatacctttttcaggaaagagctgcctgtccgccaagttaatcctctaaagtctaaacagaaagttcaaaatggggtaggagtacattctgaagatcataggttagaaatcttgcgccataagatagctgctaaagaaaatgaactaaaaggtcaaaaaagacctttgtccgctgttgctacaaagaatgcagatttttcttccaatcagccaaggctgccatctgaaaagataaggcttgaagcttccagcattggtgaatattcacgctttaatagtctgtctgaacatagtggaggaccaaataaaaggttgaagctcaatcagcagtacaaccaattttgtagtgacctgacaccattggcacctattggttctatatcaggaaaaaccaatgtgcaatcttcagaagtgacaaatcggtctgaaaatggaattactatgaaccttaatgttaatgaaacagatacaacagacacaacagaacttgcagatcaaatacaacaaggtggggcaactaagagcctacgtcaccacaaagattcaggaggtgctgagaaccatgttatgcttgagtcacatgatgggcttgcagcacaaccaccatttactgacacacaaactataccagaagatacaagtgcgttggcccctgtgacgtcagcccaagctaggcaacaggtactggctgttggtacttcacctgtgttagacggaacaccacaattgcaacctggaaaggagaatgacgaatgtttgaacagcagtggccagataggcgtagagacacagaacacaatattgttctctctacttgagatggaagaattacaagacaaggaattggaggatgctcaggagcatagacaaaaatgtgaagctgaagaaagagaagctcttagagcttatcgcaaagcacaaagagctttacttgaggcaaatgaaagatgtgcaattcttcgtagaaaaagggagatttgctcttcacaagtccatggtttaattgcagagaattcttctttggtgcagtctttgagtattcggaatcctgaagatggccttgcaatgccatcactgctcaattctcagattcatgcagttagtcagattcctgaaaatcagggtggtagacacaggctgtgtcctgaagaaccttctcagcagcaaattgataagcatgaagatgaagcacgtccacactattgtgataagcttgctgccagcacagctgatcccagctctgtgagtgctgtcaatgctgacagcatcctttcagattatatggaggatgatcttctgttcccgactagacaggcaagatcagaatgtgctctggatgttgagaatcaaatggaagaaactatacatgtatatgcagaggaaaacagacaagtttctggtgacggtggtgaggattatgaacttttagaagcttctttgaggtctagattggtggaaaggtttgggaagaaatcatgtttgaatggcaccattgatgaaggtactgaaggacttgctgttgggaaagtagctgcagaacatggcaagcagtctgcatatgttggacatcagttacaggaagcagagcagaatattatgacaactactcttgaaggtacaatggagctggaaaatgatggtgctgaaaaaactgttggcctctctaattcttgtagtggtccttcaatgggcaactgtgatcctgaggacaacatttcctctctcaaagagttatgcatgccattggttatggacagtcttatttttccttcttcagctccactaaatgctgctagacaaatcaagcgggcatttcctgggatttgcaaggagctttcagattacaaaaatgaccatctgaccagtgatgcagtgtctgaagttacaggaagtgtacaagatatgatacacgaccttgttggagaaaatatgaagatgctcccaactacccaaaatgataataatatggtgcacagtgtgattgatcccttctggcccttttgcatgtttgagcttcgaggaaaatgcaatgacgaagagtgccagtggcagcattttgagcatcatgattggagaaagctagagcttacaaaacactctatgatctctgtttcaggccagatcccttatggtttgtctcagtatattcttccagtgccagtgtatcgtgttggttcaaatcttattaaagctgatctgaacttgacacagtcagtgttggctagcagtttatggcaatattggcaaagggggttttgtgcttcttttcctttacctttatctgttcaaagagttcttccatcagatgcaccattctttcaggctggtgatggccggattgctgattttgataggaacagacaactactaaaatttcgaatgctggatagcaggaagggttctgttgatattgaattcttcttggaggcagcccttgatttatattgtggaaaagtaaacaagcctgacagaatcaaggctctttcatttctggcgcggtccattgaggctgatccaagtacagttatcctgtgggtgttttatctccatatttactatcaaaaggatgaaggacttggaaaagatgacatgttttctgatgcggaaccttccagaggaaattattgatcagctggagtttcagaaagctttacctcgtgctttaatatggccttctattgatcccagtgtagacaacagagataagattacagatcttctaaattttgctgcttgtaagatggctgaagatattagtgagtgtgttaaaaacggggatccatcttacctgatgttatcacaattcctcgctgttaaccacattagttgtctagcggccattggaggcttaaaatcttctgttgatatgctggtgacctacatgaaggagtacccaatgtgtcctcagattcttctgatctcagctcggttagacagaaagcatggtacatgtccaggtctgaaaagctttgatgagttgatcttgaattggcctaaagaggcacaaggaattcaatatatgtggaatcaatatgttgaacatgctctggccactgatgccgagttagctgagaaggtactgacttgctggtttgaagaacatggaaaggactgtgatatccaaagcaatgctgctatttgtatagaactgagcagtgaagaacctggaacatcatcacttgtttcacctcaggcagttggttctggtccatctatatcagaagatctcgtctttcggttactaaacctctcactgtataagatactggagaacaacctacaggaagcacaaatggctgcgagtaaagcattgaaattggctcatggggagtggtacgagcactgtataagagaacatgctgcaattcatgcactggagctggagaaatcatcatcttcgacagatgctcaaactcgggctacattcagtttaatcattggctaccttgctgatcattgcaacttgcccacgagggagctgctgtcacgaaggttttgccagaatattaagaagcataggcttaggcagcttatagatgatactattggttctgttcctgcagattcttctctgataaactctgtccttgaagtgtgctttggcccatccctccttccaaaaagcattagcgatgtgaagtacctggttgattttgttgaaacagtcatggaggctcttcctgcaaactatcgcctgggcttggctgttggtggattcgtagctaagcacttcacaggttatggcgcagcctccactgggaccaggttctgggcaagctctgttctgatcaatgccatctttcgagctgtacctgtcgcaccggaatcagtatggctagaaggtgcaggcctcctggagaaactgcatgccacagagattttgaagaggttctatcagcaggcggcatcggtctatcccttctccttcaagctgtggcacgcccatctgaattactgcaaagccagtgggagcaacactgagagcatcctggagagtgcgaggcagcgtggcatcgagctgaatctgacaccaacatagtgtgtcccttggatccaagctgcatgatgttttgccagtcggagatgttggtagtgttgtgttaactggagatggcgtgtagatatatcggtgatcatggtggtgtgagatcatttttgttctttaggtgcaggtttagtgggacatagtcgtcggtatcttacagcatgtgtttctgatggagtgatatggttagtaagcagtggtgaaggatacaggcatacgggcactggggcatataccatacttttggactagacgggctagagactgattttggagtccgttatgtttccattttccgttctcttggttttctctgtcgtcaatgtattataatcatgatgatgaatggatggagaaatgagatgagatttttttgagttcactcttgcagtttcggttattatatttttgtgctgtcttcgaatctgatttggtcgacggcatgtttggaagtaaagtattttaaaatcaggttttggaatacta

SEQ ID NO: 2720 - DNA, 5296 bp, Zea Mays
aaaaatcgtagctgctttcccctaccctttccgttctcggaggacgagggcgcgacggcacgcggcgaaaacgacgcggccgcgtcgccaaaaccgtcgcctcgcttcctccctcccatgacgggctcgaaacccgcgcccgccgcctcgcagaaccctagcgcggtcccgcatcgtcgtcctcctcctcctcctcctcctcctcctccgccgccggtgacagcggttgcgagggtgcgcgaagaaggcgagctctcctccggcgccgacgacgacgagactctgcaaactcagctaggtgccgcatccattcttgggaagtttgtggaggctggatctcaagtgccatcggcaagtctcctcggtaaaggcagtaacaccttgattgtctcaaatgctctgaatcataaagcgtctgctccaagttacaagaagatcatgagggtgaatcaggggcaattcaaacctggcactaaccggaatctttcatggcagaagcctgtgtcaagtgataaccttctgataactttctcagatgatgatagtggggcagactctgggaagacagggcgagataaagttaggaaggctagctctcaaggtacacagagaacagggaacagtatgcaaactaggatcatgagagaggaagtatctcagcagaaaaaccttggttcaaaagtaggtcctgcacacttgcctgcttttccattcacacatagaaatgttggggccggcagggcatcaggtaatacctttttcaggaaagagctgcctgtccgccaagttaatcctctaaagtctaaacagaaagttcaaaatggggtaggagtacattctgaagatcataggttagaaatcttgcgccataagatagctgctaaagaaaatgaactaaaaggtcaaaaaagacctttgtccgctgttgctacaaagaatgcagatttttcttccaatcagccaaggctgccatctgaaaagataaggcttgaagcttccagcattggtgaatattcacgctttaatagtctgtctgaacatagtggaggaccaaataaaaggttgaagctcaatcagcagtacaaccaattttgtagtgacctgacaccattggcacctattggttctatatcaggaaaaaccaatgtgcaatcttcagaagtgacaaatcggtctgaaaatggaattactatgaaccttaatgttaatgaaacagatacaacagacacaacagaacttgcagatcaaatacaacaaggtggggcaactaagagcctacgtcaccacaaagattcaggaggtgctgagaaccatgttatgcttgagtcacatgatgggcttgcagcacaaccaccatttactgacacacaaactataccagaagatacaagtgcgttggcccctgtgacgtcagcccaagctaggcaacaggtactggctgttggtacttcacctgtgttagacggaacaccacaattgcaacctggaaaggagaatgacgaatgtttgaacagcagtggccagataggcgtagagacacagaacacaatattgttctctctacttgagatggaagaattacaagacaaggaattggaggatgctcaggagcatagacaaaaatgtgaagctgaagaaagagaagctcttagagcttatcgcaaagcacaaagagctttacttgaggcaaatgaaagatgtgcaattcttcgtagaaaaagggagatttgctcttcacaagtccatggtttaattgcagagaattcttctttggtgcagtctttgagtattcggaatcctgaagatggccttgcaatgccatcactgctcaattctcagattcatgcagttagtcagattcctgaaaatcagggtggtagacacaggctgtgtcctgaagaaccttctcagcagcaaattgataagcatgaagatgaagcacgtccacactattgtgataagcttgctgccagcacagctgatcccagctctgtgagtgctgtcaatgctgacagcatcctttcagattatatggaggatgatcttctgttcccgactagacaggcaagatcagaatgtgctctggatgttgagaatcaaatggaagaaactatacatgtatatgcagaggaaaacagacaagtttctggtgacggtggtgaggattatgaacttttagaagcttctttgaggtctagattggtggaaaggtttgggaagaaatcatgtttgaatggcaccattgatgaaggtactgaaggacttgctgttgggaaagtagctgcagaacatggcaagcagtctgcatatgttggacatcagttacaggaagcagagcagaatattatgacaactactcttgaaggtacaatggagctggaaaatgatggtgctgaaaaaactgttggcctctctaattcttgtagtggtccttcaatgggcaactgtgatcctgaggacaacatttcctctctcaaagagttatgcatgccattggttatggacagtcttatttttccttcttcagctccactaaatgctgctagacaaatcaagcgggcatttcctgggatttgcaaggagctttcagattacaaaaatgaccatctgaccagtgatgcagtgtctgaagttacaggaagtgtacaagatatgatacacgaccttgttggagaaaatatgaagatgctcccaactacccaaaatgataataatatggtgcacagtgtgattgatcccttctggcccttttgcatgtttgagcttcgaggaaaatgcaatgacgaagagtgccagtggcagcattttgagcatcatgattggagaaagctagagcttacaaaacactctatgatctctgtttcaggccagatcccttatggtttgtctcagtatattcttccagtgccagtgtatcgtgttggttcaaatcttattaaagctgatctgaacttgacacagtcagtgttggctagcagtttatggcaatattggcaaagggggttttgtgcttcttttcctttacctttatctgttcaaagagttcttccatcagatgcaccattctttcaggctggtgatggccggattgctgattttgataggaacagacaactactaaaatttcgaatgctggatagcaggaagaataagattgtacagggttctgttgatattgaattcttcttggaggcagcccttgatttatattgtggaaaagtaaacaagcctgacagaatcaaggctctttcatttctggcgcggtccattgaggctgatccaagtacagttatcctgtgggtgttttatctccatatttactatcaaaaggatgaaggacttggaaaagatgacatgttttctgatgcggaaccttccagaggaaattattgatcagctggagtttcagaaagctttacctcgtgctttaatatggccttctattgatcccagtgtagacaacagagataagattacagatcttctaaattttgctgcttgtaagatggctgaagatattagtgagtgtgttaaaaacggggatccatcttacctgatgttatcacaattcctcgctgttaaccacattagttgtctagcggccattggaggcttaaaatcttctgttgatatgctggtgacctacatgaaggagtacccaatgtgtcctcagattcttctgatctcagctcggttagacagaaagcatggtacatgtccaggtctgaaaagctttgatgagttgatcttgaattggcctaaagaggcacaaggaattcaatatatgtggaatcaatatgttgaacatgctctggccactgatgccgagttagctgagaaggtactgacttgctggtttgaagaacatggaaaggactgtgatatccaaagcaatgctgctatttgtatagaactgagcagtgaagaacctggaacatcatcacttgtttcacctcaggcagttggttctggtccatctatatcagaagatctcgtctttcggttactaaacctctcactgtataagatactggagaacaacctacaggaagcacaaatggctgcgagtaaagcattgaaattggctcatggggagtggtacgagcactgtataagagaacatgctgcaattcatgcactggagctggagaaatcatcatcttcgacagatgctcaaactcgggctacattcagtttaatcattggctaccttgctgatcattgcaacttgcccacgagggagctgctgtcacgaaggttttgccagaatattaagaagcataggcttaggcagcttatagatgatactattggttctgttcctgcagattcttctctgataaactctgtccttgaagtgtgctttggcccatccctccttccaaaaagcattagcgatgtgaagtacctggttgattttgttgaaacagtcatggaggctcttcctgcaaactatcgcctgggcttggctgttggtggattcgtagctaagcacttcacaggttatggcgcagcctccactgggaccaggttctgggcaagctctgttctgatcaatgccatctttcgagctgtacctgtcgcaccggaatcagtatggctagaaggtgcaggcctcctggagaaactgcatgccacagagattttgaagaggttctatcagcaggcggcatcggtctatcccttctccttcaagctgtggcacgcccatctgaattactgcaaagccagtgggagcaacactgagagcatcctggagagtgcgaggcagcgtggcatcgagctgaatctgacaccaacatagtgtgtcccttggatccaagctgcatgatgttttgccagtcggagatgttggtagtgttgtgttaactggagatggcgtgtagatatatcggtgatcatggtggtgtgagatcatttttgttctttaggtgcaggtttagtgggacatagtcgtcggtatcttacagcatgtgtttctgatggagtgatatggttagtaagcagtggtgaaggatacaggcatacgggcactggggcatataccatacttttggactagacgggctagagactgattttggagtccgttatgtttccattttccgttctcttggttttctctgtcgtcaatgtattataatcatgatgatgaatggatggagaaatgagatgagatttttttgagttcactcttgcagtttcggttattatatttttgtgctgtcttcgaatctgatttggtcgacggcatgtttggaagtaaagtattttaaaatcaggttttggaatacta

SEQ ID NO: 2721 - DNA, 6026 bp, Zea Mays
aaaaatcgtagctgctttcccctaccctttccgttctcggaggacgagggcgcgacggcacgcggcgaaaacgacgcggccgcgtcgccaaaaccgtcgcctcgcttcctccctcccatgacgggctcgaaacccgcgcccgccgcctcgcagaaccctagcgcggtcccgcatcgtcgtcctcctcctcctcctcctcctcctcctccgccgccggtgacagcggttgcgagggtgcgcgaagaaggcgagctctcctccggcgccgacgacgacgagactctgcaaactcagctaggtgccgcatccattcttgggaagtttgtggaggctggatctcaagtgccatcggcaagtctcctcggtaaaggcagtaacaccttgattgtctcaaatgctctgaatcataaagcgtctgctccaagttacaagaagatcatgagggtgaatcaggggcaattcaaacctggcactaaccggaatctttcatggcagaagcctgtgtcaagtgataaccttctgataactttctcagatgatgatagtggggcagactctgggaagacagggcgagataaagttaggaaggctagctctcaaggtacacagagaacagggaacagtatgcaaactaggatcatgagagaggaagtatctcagcagaaaaaccttggttcaaaagtaggtcctgcacacttgcctgcttttccattcacacatagaaatgttggggccggcagggcatcaggtaatacctttttcaggaaagagctgcctgtccgccaagttaatcctctaaagtctaaacagaaagttcaaaatggggtaggagtacattctgaagatcataggttagaaatcttgcgccataagatagctgctaaagaaaatgaactaaaaggtcaaaaaagacctttgtccgctgttgctacaaagaatgcagatttttcttccaatcagccaaggctgccatctgaaaagataaggcttgaagcttccagcattggtgaatattcacgctttaatagtctgtctgaacatagtggaggaccaaataaaaggttgaagctcaatcagcagtacaaccaattttgtagtgacctgacaccattggcacctattggttctatatcaggaaaaaccaatgtgcaatcttcagaagtgacaaatcggtctgaaaatggaattactatgaaccttaatgttaatgaaacagatacaacagacacaacagaacttgcagatcaaatacaacaaggtggggcaactaagagcctacgtcaccacaaagattcaggaggtgctgagaaccatgttatgcttgagtcacatgatgggcttgcagcacaaccaccatttactgacacacaaactataccagaagatacaagtgcgttggcccctgtgacgtcagcccaagctaggcaacaggtactggctgttggtacttcacctgtgttagacggaacaccacaattgcaacctggaaaggagaatgacgaatgtttgaacagcagtggccagataggcgtagagacacagaacacaatattgttctctctacttgagatggaagaattacaagacaaggaattggaggatgctcaggagcatagacaaaaatgtgaagctgaagaaagagaagctcttagagcttatcgcaaagcacaaagagctttacttgaggcaaatgaaagatgtgcaattcttcgtagaaaaagggagatttgctcttcacaagtccatggtttaattgcagagaattcttctttggtgcagtctttgagtattcggaatcctgaagatggccttgcaatgccatcactgctcaattctcagattcatgcagttagtcagattcctgaaaatcagggtggtagacacaggctgtgtcctgaagaaccttctcagcagcaaattgataagcatgaagatgaagcacgtccacactattgtgataagcttgctgccagcacagctgatcccagctctgtgagtgctgtcaatgctgacagcatcctttcagattatatggaggatgatcttctgttcccgactagacaggcaagatcagaatgtgctctggatgttgagaatcaaatggaagaaactatacatgtatatgcagaggaaaacagacaagtttctggtgacggtggtgaggattatgaacttttagaagcttctttgaggtctagattggtggaaaggtttgggaagaaatcatgtttgaatggcaccattgatgaaggtactgaaggacttgctgttgggaaagtagctgcagaacatggcaagcagtctgcatatgttggacatcagttacaggaagcagagcagaatattatgacaactactcttgaaggtacaatggagctggaaaatgatggtgctgaaaaaactgttggcctctctaattcttgtagtggtccttcaatgggcaactgtgatcctgaggacaacatttcctctctcaaagagttatgcatgccattggttatggacagtcttatttttccttcttcagctccactaaatgctgctagacaaatcaagcgggcatttcctgggatttgcaaggagctttcagattacaaaaatgaccatctgaccagtgatgcagtgtctgaagttacaggaagtgtacaagatatgatacacgaccttgttggagaaaatatgaagatgctcccaactacccaaaatgataataatatggtgcacagtgtgattgatcccttctggcccttttgcatgtttgagcttcgaggaaaatgcaatgacgaagagtgccagtggcagcattttgagcatcatgattggagaaagctagagcttacaaaacactctatgatctctgtttcaggccagatcccttatggtttgtctcagtatattcttccagtgccagtgtatcgtgttggttcaaatcttattaaagctgatctgaacttgacacagtcagtgttggctagcagtttatggcaatattggcaaagggggttttgtgcttcttttcctttacctttatctgttcaaagagttcttccatcagatgcaccattctttcaggctggtgatggccggattgctgattttgataggaacagacaactactaaaatttcgaatgctggatagcaggaagaataagattgtacagggttctgttgatattgaattcttcttggaggcagcccttgatttatattgtggaaaagtaaacaagcctgacagaatcaaggctctttcatttctggcgcggtccattgaggctgatccaagtacagttatcctgtgggtgttttatctccatatttactatcaaaaggatgaaggacttggaaaagatgacatgttttctgatgcggtaaactatttactggttgctctcttgccatttagttcaagccttaaacattttatgttggaatgcattagctataaacattttttttcttttttatttttattattacactgcttgttctaatgtatcagttgcggaccttattcacgcaaaagctaaattttggtcatttggtatggcttgtttgcttatggttgcacccctatagtgccagattgtgctttcagctttttaggacatgaaaaaactatagatgagatttagggcattttatatttgtggtttacattcaattgatgcatgattgctttataatttgtagatgctattgtataattatcaacaaaccttatactttgttttctttctaggtgcaacacaatgtttattcttatgaattatggcttatgtatataaatagtaggttacgcgttgatgatcgattggatgcttataacgatgctttgagcatgctctgccaaatgacagctgagactgacaaggatctacaagaaagaagtgctttcatactagacattttcttacagatgatttacttcctgtgcatgtctggaaatatagacaaggcagtttctaggattattggaattcttccaactgcaatgcctgataattctggtgacaagttgcttgctgatgtcatttcttgcttgaccatgtccgacagatgcatattttggatttcgtgcctatatgtcttaatttacaggaaccttccagaggaaattattgatcagctggagtttcagaaagctttacctcgtgctttaatatggccttctattgatcccagtgtagacaacagagataagattacagatcttctaaattttgctgcttgtaagatggctgaagatattagtgagtgtgttaaaaacggggatccatcttacctgatgttatcacaattcctcgctgttaaccacattagttgtctagcggccattggaggcttaaaatcttctgttgatatgctggtgacctacatgaaggagtacccaatgtgtcctcagattcttctgatctcagctcggttagacagaaagcatggtacatgtccaggtctgaaaagctttgatgagttgatcttgaattggcctaaagaggcacaaggaattcaatatatgtggaatcaatatgttgaacatgctctggccactgatgccgagttagctgagaaggtactgacttgctggtttgaagaacatggaaaggactgtgatatccaaagcaatgctgctatttgtatagaactgagcagtgaagaacctggaacatcatcacttgtttcacctcaggcagttggttctggtccatctatatcagaagatctcgtctttcggttactaaacctctcactgtataagatactggagaacaacctacaggaagcacaaatggctgcgagtaaagcattgaaattggctcatggggagtggtacgagcactgtataagagaacatgctgcaattcatgcactggagctggagaaatcatcatcttcgacagatgctcaaactcgggctacattcagtttaatcattggctaccttgctgatcattgcaacttgcccacgagggagctgctgtcacgaaggttttgccagaatattaagaagcataggcttaggcagcttatagatgatactattggttctgttcctgcagattcttctctgataaactctgtccttgaagtgtgctttggcccatccctccttccaaaaagcattagcgatgtgaagtacctggttgattttgttgaaacagtcatggaggctcttcctgcaaactatcgcctgggcttggctgttggtggattcgtagctaagcacttcacaggttatggcgcagcctccactgggaccaggttctgggcaagctctgttctgatcaatgccatctttcgagctgtacctgtcgcaccggaatcagtatggctagaaggtgcaggcctcctggagaaactgcatgccacagagattttgaagaggttctatcagcaggcggcatcggtctatcccttctccttcaagctgtggcacgcccatctgaattactgcaaagccagtgggagcaacactgagagcatcctggagagtgcgaggcagcgtggcatcgagctgaatctgacaccaacatagtgtgtcccttggatccaagctgcatgatgttttgccagtcggagatgttggtagtgttgtgttaactggagatggcgtgtagatatatcggtgatcatggtggtgtgagatcatttttgttctttaggtgcaggtttagtgggacatagtcgtcggtatcttacagcatgtgtttctgatggagtgatatggttagtaagcagtggtgaaggatacaggcatacgggcactggggcatataccatacttttggactagacgggctagagactgattttggagtccgttatgtttccattttccgttctcttggttttctctgtcgtcaatgtattataatcatgatgatgaatggatggagaaatgagatgagatttttttgagttcactcttgcagtttcggttattatatttttgtgctgtcttcgaatctgatttggtcgacggcatgtttggaagtaaagtattttaaaatcaggttttggaatacta

SEQ ID NO: 2722 - DNA, 5869 bp, Zea Mays
aaaaatcgtagctgctttcccctaccctttccgttctcggaggacgagggcgcgacggcacgcggcgaaaacgacgcggccgcgtcgccaaaaccgtcgcctcgcttcctccctcccatgacgggctcgaaacccgcgcccgccgcctcgcagaaccctagcgcggtcccgcatcgtcgtcctcctcctcctcctcctcctcctcctccgccgccggtgacagcggttgcgagggtgcgcgaagaaggcgagctctcctccggcgccgacgacgacgagactctgcaaactcagctaggtgccgcatccattcttgggaagtttgtggaggctggatctcaagtgccatcggcaagtctcctcggtaaaggcagtaacaccttgattgtctcaaatgctctgaatcataaagcgtctgctccaagttacaagaagatcatgagggtgaatcaggggcaattcaaacctggcactaaccggaatctttcatggcagaagcctgtgtcaagtgataaccttctgataactttctcagatgatgatagtggggcagactctgggaagacagggcgagataaagttaggaaggctagctctcaaggtacacagagaacagggaacagtatgcaaactaggatcatgagagaggaagtatctcagcagaaaaaccttggttcaaaagtaggtcctgcacacttgcctgcttttccattcacacatagaaatgttggggccggcagggcatcaggtaatacctttttcaggaaagagctgcctgtccgccaagttaatcctctaaagtctaaacagaaagttcaaaatggggtaggagtacattctgaagatcataggttagaaatcttgcgccataagatagctgctaaagaaaatgaactaaaaggtcaaaaaagacctttgtccgctgttgctacaaagaatgcagatttttcttccaatcagccaaggctgccatctgaaaagataaggcttgaagcttccagcattggtgaatattcacgctttaatagtctgtctgaacatagtggaggaccaaataaaaggttgaagctcaatcagcagtacaaccaattttgtagtgacctgacaccattggcacctattggttctatatcaggaaaaaccaatgtgcaatcttcagaagtgacaaatcggtctgaaaatggaattactatgaaccttaatgttaatgaaacagatacaacagacacaacagaacttgcagatcaaatacaacaaggtggggcaactaagagcctacgtcaccacaaagattcaggaggtgctgagaaccatgttatgcttgagtcacatgatgggcttgcagcacaaccaccatttactgacacacaaactataccagaagatacaagtgcgttggcccctgtgacgtcagcccaagctaggcaacaggtactggctgttggtacttcacctgtgttagacggaacaccacaattgcaacctggaaaggagaatgacgaatgtttgaacagcagtggccagataggcgtagagacacagaacacaatattgttctctctacttgagatggaagaattacaagacaaggaattggaggatgctcaggagcatagacaaaaatgtgaagctgaagaaagagaagctcttagagcttatcgcaaagcacaaagagctttacttgaggcaaatgaaagatgtgcaattcttcgtagaaaaagggagatttgctcttcacaagtccatggtttaattgcagagaattcttctttggtgcagtctttgagtattcggaatcctgaagatggccttgcaatgccatcactgctcaattctcagattcatgcagttagtcagattcctgaaaatcagggtggtagacacaggctgtgtcctgaagaaccttctcagcagcaaattgataagcatgaagatgaagcacgtccacactattgtgataagcttgctgccagcacagctgatcccagctctgtgagtgctgtcaatgctgacagcatcctttcagattatatggaggatgatcttctgttcccgactagacaggcaagatcagaatgtgctctggatgttgagaatcaaatggaagaaactatacatgtatatgcagaggaaaacagacaagtttctggtgacggtggtgaggattatgaacttttagaagcttctttgaggtctagattggtggaaaggtttgggaagaaatcatgtttgaatggcaccattgatgaaggtactgaaggacttgctgttgggaaagtagctgcagaacatggcaagcagtctgcatatgttggacatcagttacaggaagcagagcagaatattatgacaactactcttgaaggtacaatggagctggaaaatgatggtgctgaaaaaactgttggcctctctaattcttgtagtggtccttcaatgggcaactgtgatcctgaggacaacatttcctctctcaaagagttatgcatgccattggttatggacagtcttatttttccttcttcagctccactaaatgctgctagacaaatcaagcgggcatttcctgggatttgcaaggagctttcagattacaaaaatgaccatctgaccagtgatgcagtgtctgaagttacaggaagtgtacaagatatgatacacgaccttgttggagaaaatatgaagatgctcccaactacccaaaatgataataatatggtgcacagtgtgattgatcccttctggcccttttgcatgtttgagcttcgaggaaaatgcaatgacgaagagtgccagtggcagcattttgagcatcatgattggagaaagctagagcttacaaaacactctatgatctctgtttcaggccagatcccttatggtttgtctcagtatattcttccagtgccagtgtatcgtgttggttcaaatcttattaaagctgatctgaacttgacacagtcagtgttggctagcagtttatggcaatattggcaaagggggttttgtgcttcttttcctttacctttatctgttcaaagagttcttccatcagatgcaccattctttcaggctggtgatggccggattgctgattttgataggaacagacaactactaaaatttcgaatgctggatagcaggaaggtgggtagagcacactgtattgcagttatcatcacatcacagaagtggcatacatattggagtctggttctttacactaaacttattcttgaagttttttgctctttctattcttgcataatggcatattgattatgttatattggtacttgttaacactgcactcttttcttgtggttccaatgaaaaatgctctgattttgacaatttccttctgcactggaccaagaatttacagacatttaaagtatacatttcatagtagttaataagattgtacagggttctgttgatattgaattcttcttggaggcagcccttgatttatattgtggaaaagtaaacaagcctgacagaatcaaggctctttcatttctggcgcggtccattgaggctgatccaagtacagttatcctgtgggtgttttatctccatatttactatcaaaaggatgaaggacttggaaaagatgacatgttttctgatgcggttacgcgttgatgatcgattggatgcttataacgatgctttgagcatgctctgccaaatgacagctgagactgacaaggatctacaagaaagaagtgctttcatactagacattttcttacagatgatttacttcctgtgcatgtctggaaatatagacaaggcagtttctaggattattggaattcttccaactgcaatgcctgataattctggtgacaagttgcttgctgatgtcatttcttgcttgaccatgtccgacagatgcatattttggatttcgtgcctatatgtcttaatttacaggaaccttccagaggaaattattgatcagctggagtttcagaaagctttacctcgtgctttaatatggccttctattgatcccagtgtagacaacagagataagattacagatcttctaaattttgctgcttgtaagatggctgaagatattagtgagtgtgttaaaaacggggatccatcttacctgatgttatcacaattcctcgctgttaaccacattagttgtctagcggccattggaggcttaaaatcttctgttgatatgctggtgacctacatgaaggagtacccaatgtgtcctcagattcttctgatctcagctcggttagacagaaagcatggtacatgtccaggtctgaaaagctttgatgagttgatcttgaattggcctaaagaggcacaaggaattcaatatatgtggaatcaatatgttgaacatgctctggccactgatgccgagttagctgagaaggtactgacttgctggtttgaagaacatggaaaggactgtgatatccaaagcaatgctgctatttgtatagaactgagcagtgaagaacctggaacatcatcacttgtttcacctcaggcagttggttctggtccatctatatcagaagatctcgtctttcggttactaaacctctcactgtataagatactggagaacaacctacaggaagcacaaatggctgcgagtaaagcattgaaattggctcatggggagtggtacgagcactgtataagagaacatgctgcaattcatgcactggagctggagaaatcatcatcttcgacagatgctcaaactcgggctacattcagtttaatcattggctaccttgctgatcattgcaacttgcccacgagggagctgctgtcacgaaggttttgccagaatattaagaagcataggcttaggcagcttatagatgatactattggttctgttcctgcagattcttctctgataaactctgtccttgaagtgtgctttggcccatccctccttccaaaaagcattagcgatgtgaagtacctggttgattttgttgaaacagtcatggaggctcttcctgcaaactatcgcctgggcttggctgttggtggattcgtagctaagcacttcacaggttatggcgcagcctccactgggaccaggttctgggcaagctctgttctgatcaatgccatctttcgagctgtacctgtcgcaccggaatcagtatggctagaaggtgcaggcctcctggagaaactgcatgccacagagattttgaagaggttctatcagcaggcggcatcggtctatcccttctccttcaagctgtggcacgcccatctgaattactgcaaagccagtgggagcaacactgagagcatcctggagagtgcgaggcagcgtggcatcgagctgaatctgacaccaacatagtgtgtcccttggatccaagctgcatgatgttttgccagtcggagatgttggtagtgttgtgttaactggagatggcgtgtagatatatcggtgatcatggtggtgtgagatcatttttgttctttaggtgcaggtttagtgggacatagtcgtcggtatcttacagcatgtgtttctgatggagtgatatggttagtaagcagtggtgaaggatacaggcatacgggcactggggcatataccatacttttggactagacgggctagagactgattttggagtccgttatgtttccattttccgttctcttggttttctctgtcgtcaatgtattataatcatgatgatgaatggatggagaaatgagatgagatttttttgagttcactcttgcagtttcggttattatatttttgtgctgtcttcgaatctgatttggtcgacggcatgtttggaagtaaagtattttaaaatcaggttttggaatacta

SEQ ID NO: 2723 - DNA, 6405 bp, Zea Mays
aaaaatcgtagctgctttcccctaccctttccgttctcggaggacgagggcgcgacggcacgcggcgaaaacgacgcggccgcgtcgccaaaaccgtcgcctcgcttcctccctcccatgacgggctcgaaacccgcgcccgccgcctcgcagaaccctagcgcggtcccgcatcgtcgtcctcctcctcctcctcctcctcctcctccgccgccggtgacagcggttgcgagggtgcgcgaagaaggcgagctctcctccggcgccgacgacgacgagactctgcaaactcagctaggtgccgcatccattcttgggaagtttgtggaggctggatctcaagtgccatcggcaagtctcctcggtaaaggcagtaacaccttgattgtctcaaatgctctgaatcataaagcgtctgctccaagttacaagaagatcatgagggtgaatcaggggcaattcaaacctggcactaaccggaatctttcatggcagaagcctgtgtcaagtgataaccttctgataactttctcagatgatgatagtggggcagactctgggaagacagggcgagataaagttaggaaggctagctctcaaggtacacagagaacagggaacagtatgcaaactaggatcatgagagaggaagtatctcagcagaaaaaccttggttcaaaagtaggtcctgcacacttgcctgcttttccattcacacatagaaatgttggggccggcagggcatcaggtaatacctttttcaggaaagagctgcctgtccgccaagttaatcctctaaagtctaaacagaaagttcaaaatggggtaggagtacattctgaagatcataggttagaaatcttgcgccataagatagctgctaaagaaaatgaactaaaaggtcaaaaaagacctttgtccgctgttgctacaaagaatgcagatttttcttccaatcagccaaggctgccatctgaaaagataaggcttgaagcttccagcattggtgaatattcacgctttaatagtctgtctgaacatagtggaggaccaaataaaaggttgaagctcaatcagcagtacaaccaattttgtagtgacctgacaccattggcacctattggttctatatcaggaaaaaccaatgtgcaatcttcagaagtgacaaatcggtctgaaaatggaattactatgaaccttaatgttaatgaaacagatacaacagacacaacagaacttgcagatcaaatacaacaaggtggggcaactaagagcctacgtcaccacaaagattcaggaggtgctgagaaccatgttatgcttgagtcacatgatgggcttgcagcacaaccaccatttactgacacacaaactataccagaagatacaagtgcgttggcccctgtgacgtcagcccaagctaggcaacaggtactggctgttggtacttcacctgtgttagacggaacaccacaattgcaacctggaaaggagaatgacgaatgtttgaacagcagtggccagataggcgtagagacacagaacacaatattgttctctctacttgagatggaagaattacaagacaaggaattggaggatgctcaggagcatagacaaaaatgtgaagctgaagaaagagaagctcttagagcttatcgcaaagcacaaagagctttacttgaggcaaatgaaagatgtgcaattcttcgtagaaaaagggagatttgctcttcacaagtccatggtttaattgcagagaattcttctttggtgcagtctttgagtattcggaatcctgaagatggccttgcaatgccatcactgctcaattctcagattcatgcagttagtcagattcctgaaaatcagggtggtagacacaggctgtgtcctgaagaaccttctcagcagcaaattgataagcatgaagatgaagcacgtccacactattgtgataagcttgctgccagcacagctgatcccagctctgtgagtgctgtcaatgctgacagcatcctttcagattatatggaggatgatcttctgttcccgactagacaggcaagatcagaatgtgctctggatgttgagaatcaaatggaagaaactatacatgtatatgcagaggaaaacagacaagtttctggtgacggtggtgaggattatgaacttttagaagcttctttgaggtctagattggtggaaaggtttgggaagaaatcatgtttgaatggcaccattgatgaaggtactgaaggacttgctgttgggaaagtagctgcagaacatggcaagcagtctgcatatgttggacatcagttacaggaagcagagcagaatattatgacaactactcttgaaggtacaatggagctggaaaatgatggtgctgaaaaaactgttggcctctctaattcttgtagtggtccttcaatgggcaactgtgatcctgaggacaacatttcctctctcaaagagttatgcatgccattggttatggacagtcttatttttccttcttcagctccactaaatgctgctagacaaatcaagcgggcatttcctgggatttgcaaggagctttcagattacaaaaatgaccatctgaccagtgatgcagtgtctgaagttacaggaagtgtacaagatatgatacacgaccttgttggagaaaatatgaagatgctcccaactacccaaaatgataataatatggtgcacagtgtgattgatcccttctggcccttttgcatgtttgagcttcgaggaaaatgcaatgacgaagagtgccagtggcagcattttgagcatcatgattggagaaagctagagcttacaaaacactctatgatctctgtttcaggccagatcccttatggtttgtctcagtatattcttccagtgccagtgtatcgtgttggttcaaatcttattaaagctgatctgaacttgacacagtcagtgttggctagcagtttatggcaatattggcaaagggggttttgtgcttcttttcctttacctttatctgttcaaagagttcttccatcagatgcaccattctttcaggctggtgatggccggattgctgattttgataggaacagacaactactaaaatttcgaatgctggatagcaggaaggtgggtagagcacactgtattgcagttatcatcacatcacagaagtggcatacatattggagtctggttctttacactaaacttattcttgaagttttttgctctttctattcttgcataatggcatattgattatgttatattggtacttgttaacactgcactcttttcttgtggttccaatgaaaaatgctctgattttgacaatttccttctgcactggaccaagaatttacagacatttaaagtatacatttcatagtagttgtaagttggaacatgatgatatgacatttttggtttgaatgaatatatttacttcattgatatctgatctgcttgcattttgattattgctgtgtaacttcatatcgtgtagaataagattgtacagggttctgttgatattgaattcttcttggaggcagcccttgatttatattgtggaaaagtaaacaagcctgacagaatcaaggctctttcatttctggcgcggtccattgaggctgatccaagtacagttatcctgtgggtgttttatctccatatttactatcaaaaggatgaaggacttggaaaagatgacatgttttctgatgcggtaaactatttactggttgctctcttgccatttagttcaagccttaaacattttatgttggaatgcattagctataaacattttttttcttttttatttttattattacactgcttgttctaatgtatcagttgcggaccttattcacgcaaaagctaaattttggtcatttggtatggcttgtttgcttatggttgcacccctatagtgccagattgtgctttcagctttttaggacatgaaaaaactatagatgagatttagggcattttatatttgtggtttacattcaattgatgcatgattgctttataatttgtagatgctattgtataattatcaacaaaccttatactttgttttctttctaggtgcaacacaatgtttattcttatgaattatggcttatgtatataaatagtaggttacgcgttgatgatcgattggatgcttataacgatgctttgagcatgctctgccaaatgacagctgagactgacaaggatctacaagaaagaagtgctttcatactagacattttcttacagatgatttacttcctgtgcatgtctggaaatatagacaaggcagtttctaggattattggaattcttccaactgcaatgcctgataattctggtgacaagttgcttgctgatgtcatttcttgcttgaccatgtccgacagatgcatattttggatttcgtgcctatatgtcttaatttacaggaaccttccagaggaaattattgatcagctggagtttcagaaagctttacctcgtgctttaatatggccttctattgatcccagtgtagacaacagagataagattacagatcttctaaattttgctgcttgtaagatggctgaagatattagtgagtgtgttaaaaacggggatccatcttacctgatgttatcacaattcctcgctgttaaccacattagttgtctagcggccattggaggcttaaaatcttctgttgatatgctggtgacctacatgaaggagtacccaatgtgtcctcagattcttctgatctcagctcggttagacagaaagcatggtacatgtccaggtctgaaaagctttgatgagttgatcttgaattggcctaaagaggcacaaggaattcaatatatgtggaatcaatatgttgaacatgctctggccactgatgccgagttagctgagaaggtactgacttgctggtttgaagaacatggaaaggactgtgatatccaaagcaatgctgctatttgtatagaactgagcagtgaagaacctggaacatcatcacttgtttcacctcaggcagttggttctggtccatctatatcagaagatctcgtctttcggttactaaacctctcactgtataagatactggagaacaacctacaggaagcacaaatggctgcgagtaaagcattgaaattggctcatggggagtggtacgagcactgtataagagaacatgctgcaattcatgcactggagctggagaaatcatcatcttcgacagatgctcaaactcgggctacattcagtttaatcattggctaccttgctgatcattgcaacttgcccacgagggagctgctgtcacgaaggttttgccagaatattaagaagcataggcttaggcagcttatagatgatactattggttctgttcctgcagattcttctctgataaactctgtccttgaagtgtgctttggcccatccctccttccaaaaagcattagcgatgtgaagtacctggttgattttgttgaaacagtcatggaggctcttcctgcaaactatcgcctgggcttggctgttggtggattcgtagctaagcacttcacaggttatggcgcagcctccactgggaccaggttctgggcaagctctgttctgatcaatgccatctttcgagctgtacctgtcgcaccggaatcagtatggctagaaggtgcaggcctcctggagaaactgcatgccacagagattttgaagaggttctatcagcaggcggcatcggtctatcccttctccttcaagctgtggcacgcccatctgaattactgcaaagccagtgggagcaacactgagagcatcctggagagtgcgaggcagcgtggcatcgagctgaatctgacaccaacatagtgtgtcccttggatccaagctgcatgatgttttgccagtcggagatgttggtagtgttgtgttaactggagatggcgtgtagatatatcggtgatcatggtggtgtgagatcatttttgttctttaggtgcaggtttagtgggacatagtcgtcggtatcttacagcatgtgtttctgatggagtgatatggttagtaagcagtggtgaaggatacaggcatacgggcactggggcatataccatacttttggactagacgggctagagactgattttggagtccgttatgtttccattttccgttctcttggttttctctgtcgtcaatgtattataatcatgatgatgaatggatggagaaatgagatgagatttttttgagttcactcttgcagtttcggttattatatttttgtgctgtcttcgaatctgatttggtcgacggcatgtttggaagtaaagtattttaaaatcaggttttggaatacta

SEQ ID NO: 2724 - DNA, 5675 bp, Zea Mays
aaaaatcgtagctgctttcccctaccctttccgttctcggaggacgagggcgcgacggcacgcggcgaaaacgacgcggccgcgtcgccaaaaccgtcgcctcgcttcctccctcccatgacgggctcgaaacccgcgcccgccgcctcgcagaaccctagcgcggtcccgcatcgtcgtcctcctcctcctcctcctcctcctcctccgccgccggtgacagcggttgcgagggtgcgcgaagaaggcgagctctcctccggcgccgacgacgacgagactctgcaaactcagctaggtgccgcatccattcttgggaagtttgtggaggctggatctcaagtgccatcggcaagtctcctcggtaaaggcagtaacaccttgattgtctcaaatgctctgaatcataaagcgtctgctccaagttacaagaagatcatgagggtgaatcaggggcaattcaaacctggcactaaccggaatctttcatggcagaagcctgtgtcaagtgataaccttctgataactttctcagatgatgatagtggggcagactctgggaagacagggcgagataaagttaggaaggctagctctcaaggtacacagagaacagggaacagtatgcaaactaggatcatgagagaggaagtatctcagcagaaaaaccttggttcaaaagtaggtcctgcacacttgcctgcttttccattcacacatagaaatgttggggccggcagggcatcaggtaatacctttttcaggaaagagctgcctgtccgccaagttaatcctctaaagtctaaacagaaagttcaaaatggggtaggagtacattctgaagatcataggttagaaatcttgcgccataagatagctgctaaagaaaatgaactaaaaggtcaaaaaagacctttgtccgctgttgctacaaagaatgcagatttttcttccaatcagccaaggctgccatctgaaaagataaggcttgaagcttccagcattggtgaatattcacgctttaatagtctgtctgaacatagtggaggaccaaataaaaggttgaagctcaatcagcagtacaaccaattttgtagtgacctgacaccattggcacctattggttctatatcaggaaaaaccaatgtgcaatcttcagaagtgacaaatcggtctgaaaatggaattactatgaaccttaatgttaatgaaacagatacaacagacacaacagaacttgcagatcaaatacaacaaggtggggcaactaagagcctacgtcaccacaaagattcaggaggtgctgagaaccatgttatgcttgagtcacatgatgggcttgcagcacaaccaccatttactgacacacaaactataccagaagatacaagtgcgttggcccctgtgacgtcagcccaagctaggcaacaggtactggctgttggtacttcacctgtgttagacggaacaccacaattgcaacctggaaaggagaatgacgaatgtttgaacagcagtggccagataggcgtagagacacagaacacaatattgttctctctacttgagatggaagaattacaagacaaggaattggaggatgctcaggagcatagacaaaaatgtgaagctgaagaaagagaagctcttagagcttatcgcaaagcacaaagagctttacttgaggcaaatgaaagatgtgcaattcttcgtagaaaaagggagatttgctcttcacaagtccatggtttaattgcagagaattcttctttggtgcagtctttgagtattcggaatcctgaagatggccttgcaatgccatcactgctcaattctcagattcatgcagttagtcagattcctgaaaatcagggtggtagacacaggctgtgtcctgaagaaccttctcagcagcaaattgataagcatgaagatgaagcacgtccacactattgtgataagcttgctgccagcacagctgatcccagctctgtgagtgctgtcaatgctgacagcatcctttcagattatatggaggatgatcttctgttcccgactagacaggcaagatcagaatgtgctctggatgttgagaatcaaatggaagaaactatacatgtatatgcagaggaaaacagacaagtttctggtgacggtggtgaggattatgaacttttagaagcttctttgaggtctagattggtggaaaggtttgggaagaaatcatgtttgaatggcaccattgatgaaggtactgaaggacttgctgttgggaaagtagctgcagaacatggcaagcagtctgcatatgttggacatcagttacaggaagcagagcagaatattatgacaactactcttgaaggtacaatggagctggaaaatgatggtgctgaaaaaactgttggcctctctaattcttgtagtggtccttcaatgggcaactgtgatcctgaggacaacatttcctctctcaaagagttatgcatgccattggttatggacagtcttatttttccttcttcagctccactaaatgctgctagacaaatcaagcgggcatttcctgggatttgcaaggagctttcagattacaaaaatgaccatctgaccagtgatgcagtgtctgaagttacaggaagtgtacaagatatgatacacgaccttgttggagaaaatatgaagatgctcccaactacccaaaatgataataatatggtgcacagtgtgattgatcccttctggcccttttgcatgtttgagcttcgaggaaaatgcaatgacgaagagtgccagtggcagcattttgagcatcatgattggagaaagctagagcttacaaaacactctatgatctctgtttcaggccagatcccttatggtttgtctcagtatattcttccagtgccagtgtatcgtgttggttcaaatcttattaaagctgatctgaacttgacacagtcagtgttggctagcagtttatggcaatattggcaaagggggttttgtgcttcttttcctttacctttatctgttcaaagagttcttccatcagatgcaccattctttcaggctggtgatggccggattgctgattttgataggaacagacaactactaaaatttcgaatgctggatagcaggaaggtgggtagagcacactgtattgcagttatcatcacatcacagaagtggcatacatattggagtctggttctttacactaaacttattcttgaagttttttgctctttctattcttgcataatggcatattgattatgttatattggtacttgttaacactgcactcttttcttgtggttccaatgaaaaatgctctgattttgacaatttccttctgcactggaccaagaatttacagacatttaaagtatacatttcatagtagttgtaagttggaacatgatgatatgacatttttggtttgaatgaatatatttacttcattgatatctgatctgcttgcattttgattattgctgtgtaacttcatatcgtgtagaataagattgtacagggttctgttgatattgaattcttcttggaggcagcccttgatttatattgtggaaaagtaaacaagcctgacagaatcaaggctctttcatttctggcgcggtccattgaggctgatccaagtacagttatcctgtgggtgttttatctccatatttactatcaaaaggatgaaggacttggaaaagatgacatgttttctgatgcggaaccttccagaggaaattattgatcagctggagtttcagaaagctttacctcgtgctttaatatggccttctattgatcccagtgtagacaacagagataagattacagatcttctaaattttgctgcttgtaagatggctgaagatattagtgagtgtgttaaaaacggggatccatcttacctgatgttatcacaattcctcgctgttaaccacattagttgtctagcggccattggaggcttaaaatcttctgttgatatgctggtgacctacatgaaggagtacccaatgtgtcctcagattcttctgatctcagctcggttagacagaaagcatggtacatgtccaggtctgaaaagctttgatgagttgatcttgaattggcctaaagaggcacaaggaattcaatatatgtggaatcaatatgttgaacatgctctggccactgatgccgagttagctgagaaggtactgacttgctggtttgaagaacatggaaaggactgtgatatccaaagcaatgctgctatttgtatagaactgagcagtgaagaacctggaacatcatcacttgtttcacctcaggcagttggttctggtccatctatatcagaagatctcgtctttcggttactaaacctctcactgtataagatactggagaacaacctacaggaagcacaaatggctgcgagtaaagcattgaaattggctcatggggagtggtacgagcactgtataagagaacatgctgcaattcatgcactggagctggagaaatcatcatcttcgacagatgctcaaactcgggctacattcagtttaatcattggctaccttgctgatcattgcaacttgcccacgagggagctgctgtcacgaaggttttgccagaatattaagaagcataggcttaggcagcttatagatgatactattggttctgttcctgcagattcttctctgataaactctgtccttgaagtgtgctttggcccatccctccttccaaaaagcattagcgatgtgaagtacctggttgattttgttgaaacagtcatggaggctcttcctgcaaactatcgcctgggcttggctgttggtggattcgtagctaagcacttcacaggttatggcgcagcctccactgggaccaggttctgggcaagctctgttctgatcaatgccatctttcgagctgtacctgtcgcaccggaatcagtatggctagaaggtgcaggcctcctggagaaactgcatgccacagagattttgaagaggttctatcagcaggcggcatcggtctatcccttctccttcaagctgtggcacgcccatctgaattactgcaaagccagtgggagcaacactgagagcatcctggagagtgcgaggcagcgtggcatcgagctgaatctgacaccaacatagtgtgtcccttggatccaagctgcatgatgttttgccagtcggagatgttggtagtgttgtgttaactggagatggcgtgtagatatatcggtgatcatggtggtgtgagatcatttttgttctttaggtgcaggtttagtgggacatagtcgtcggtatcttacagcatgtgtttctgatggagtgatatggttagtaagcagtggtgaaggatacaggcatacgggcactggggcatataccatacttttggactagacgggctagagactgattttggagtccgttatgtttccattttccgttctcttggttttctctgtcgtcaatgtattataatcatgatgatgaatggatggagaaatgagatgagatttttttgagttcactcttgcagtttcggttattatatttttgtgctgtcttcgaatctgatttggtcgacggcatgtttggaagtaaagtattttaaaatcaggttttggaatacta

SEQ ID NO: 2725 - DNA, 5649 bp, Zea Mays
aaaaatcgtagctgctttcccctaccctttccgttctcggaggacgagggcgcgacggcacgcggcgaaaacgacgcggccgcgtcgccaaaaccgtcgcctcgcttcctccctcccatgacgggctcgaaacccgcgcccgccgcctcgcagaaccctagcgcggtcccgcatcgtcgtcctcctcctcctcctcctcctcctcctccgccgccggtgacagcggttgcgagggtgcgcgaagaaggcgagctctcctccggcgccgacgacgacgagactctgcaaactcagctaggtgccgcatccattcttgggaagtttgtggaggctggatctcaagtgccatcggcaagtctcctcggtaaaggcagtaacaccttgattgtctcaaatgctctgaatcataaagcgtctgctccaagttacaagaagatcatgagggtgaatcaggggcaattcaaacctggcactaaccggaatctttcatggcagaagcctgtgtcaagtgataaccttctgataactttctcagatgatgatagtggggcagactctgggaagacagggcgagataaagttaggaaggctagctctcaaggtacacagagaacagggaacagtatgcaaactaggatcatgagagaggaagtatctcagcagaaaaaccttggttcaaaagtaggtcctgcacacttgcctgcttttccattcacacatagaaatgttggggccggcagggcatcaggtaatacctttttcaggaaagagctgcctgtccgccaagttaatcctctaaagtctaaacagaaagttcaaaatggggtaggagtacattctgaagatcataggttagaaatcttgcgccataagatagctgctaaagaaaatgaactaaaaggtcaaaaaagacctttgtccgctgttgctacaaagaatgcagatttttcttccaatcagccaaggctgccatctgaaaagataaggcttgaagcttccagcattggtgaatattcacgctttaatagtctgtctgaacatagtggaggaccaaataaaaggttgaagctcaatcagcagtacaaccaattttgtagtgacctgacaccattggcacctattggttctatatcaggaaaaaccaatgtgcaatcttcagaagtgacaaatcggtctgaaaatggaattactatgaaccttaatgttaatgaaacagatacaacagacacaacagaacttgcagatcaaatacaacaaggtggggcaactaagagcctacgtcaccacaaagattcaggaggtgctgagaaccatgttatgcttgagtcacatgatgggcttgcagcacaaccaccatttactgacacacaaactataccagaagatacaagtgcgttggcccctgtgacgtcagcccaagctaggcaacaggtactggctgttggtacttcacctgtgttagacggaacaccacaattgcaacctggaaaggagaatgacgaatgtttgaacagcagtggccagataggcgtagagacacagaacacaatattgttctctctacttgagatggaagaattacaagacaaggaattggaggatgctcaggagcatagacaaaaatgtgaagctgaagaaagagaagctcttagagcttatcgcaaagcacaaagagctttacttgaggcaaatgaaagatgtgcaattcttcgtagaaaaagggagatttgctcttcacaagtccatggtttaattgcagagaattcttctttggtgcagtctttgagtattcggaatcctgaagatggccttgcaatgccatcactgctcaattctcagattcatgcagttagtcagattcctgaaaatcagggtggtagacacaggctgtgtcctgaagaaccttctcagcagcaaattgataagcatgaagatgaagcacgtccacactattgtgataagcttgctgccagcacagctgatcccagctctgtgagtgctgtcaatgctgacagcatcctttcagattatatggaggatgatcttctgttcccgactagacaggcaagatcagaatgtgctctggatgttgagaatcaaatggaagaaactatacatgtatatgcagaggaaaacagacaagtttctggtgacggtggtgaggattatgaacttttagaagcttctttgaggtctagattggtggaaaggtttgggaagaaatcatgtttgaatggcaccattgatgaaggtactgaaggacttgctgttgggaaagtagctgcagaacatggcaagcagtctgcatatgttggacatcagttacaggaagcagagcagaatattatgacaactactcttgaaggtacaatggagctggaaaatgatggtgctgaaaaaactgttggcctctctaattcttgtagtggtccttcaatgggcaactgtgatcctgaggacaacatttcctctctcaaagagttatgcatgccattggttatggacagtcttatttttccttcttcagctccactaaatgctgctagacaaatcaagcgggcatttcctgggatttgcaaggagctttcagattacaaaaatgaccatctgaccagtgatgcagtgtctgaagttacaggaagtgtacaagatatgatacacgaccttgttggagaaaatatgaagatgctcccaactacccaaaatgataataatatggtgcacagtgtgattgatcccttctggcccttttgcatgtttgagcttcgaggaaaatgcaatgacgaagagtgccagtggcagcattttgagcatcatgattggagaaagctagagcttacaaaacactctatgatctctgtttcaggccagatcccttatggtttgtctcagtatattcttccagtgccagtgtatcgtgttggttcaaatcttattaaagctgatctgaacttgacacagtcagtgttggctagcagtttatggcaatattggcaaagggggttttgtgcttcttttcctttacctttatctgttcaaagagttcttccatcagatgcaccattctttcaggctggtgatggccggattgctgattttgataggaacagacaactactaaaatttcgaatgctggatagcaggaagattgtacagggttctgttgatattgaattcttcttggaggcagcccttgatttatattgtggaaaagtaaacaagcctgacagaatcaaggctctttcatttctggcgcggtccattgaggctgatccaagtacagttatcctgtgggtgttttatctccatatttactatcaaaaggatgaaggacttggaaaagatgacatgttttctgatgcggtgcaacacaatgtttattcttatgaattatggcttatgtatataaatagtaggttacgcgttgatgatcgattggatgcttataacgatgctttgagcatgctctgccaaatgacagctgagactgacaaggatctacaagaaagaagtgctttcatactagacattttcttacagatgatttacttcctgtgcatgtctggaaatatagacaaggcagtttctaggattattggaattcttccaactgcaatgcctgataattctggtgacaagttgcttgctgatgtcatttcttgcttgaccatgtccgacagatgcatattttggatttcgtgcctatatgtcttaatttacaggaaccttccagaggaaattattgatcagctggagtttcagaaagctttacctcgtgctttaatatggccttctattgatcccagtgtagacaacagagataagattacagatcttctaaattttgctgcttgtaagatggctgaagatattagtgagtgtgttaaaaacggggatccatcttacctgatgttatcacaattcctcgctgttaaccacattagttgtctagcggccattggaggcttaaaatcttctgttgatatgctggtgacctacatgaaggagtacccaatgtgtcctcagattcttctgatctcagctcggttagacagaaagcatggtacatgtccaggtctgaaaagctttgatgagttgatcttgaattggcctaaagaggcacaaggaattcaatatatgtggaatcaatatgttgaacatgctctggccactgatgccgagttagctgagaaggtactgacttgctggtttgaagaacatggaaaggactgtgatatccaaagcaatgctgctatttgtatagaactgagcagtgaagaacctggaacatcatcacttgtttcacctcaggcagttggttctggtccatctatatcagaagatctcgtctttcggttactaaacctctcactgtataagatactggagaacaacctacaggaagcacaaatggctgcgagtaaagcattgaaattggctcatggggagtggtacgagcactgtataagagaacatgctgcaattcatgcactggagctggagaaatcatcatcttcgacagatgctcaaactcgggctacattcagtttaatcattggctaccttgctgatcattgcaacttgcccacgagggagctgctgtcacgaaggttttgccagaatattaagaagcataggcttaggcagcttatagatgatactattggttctgttcctgcagattcttctctgataaactctgtccttgaagtgtgctttggcccatccctccttccaaaaagcattagcgatgtgaagtacctggttgattttgttgaaacagtcatggaggctcttcctgcaaactatcgcctgggcttggctgttggtggattcgtagctaagcacttcacaggttatggcgcagcctccactgggaccaggttctgggcaagctctgttctgatcaatgccatctttcgagctgtacctgtcgcaccggaatcagtatggctagaaggtgcaggcctcctggagaaactgcatgccacagagattttgaagaggttctatcagcaggcggcatcggtctatcccttctccttcaagctgtggcacgcccatctgaattactgcaaagccagtgggagcaacactgagagcatcctggagagtgcgaggcagcgtggcatcgagctgaatctgacaccaacatagtgtgtcccttggatccaagctgcatgatgttttgccagtcggagatgttggtagtgttgtgttaactggagatggcgtgtagatatatcggtgatcatggtggtgtgagatcatttttgttctttaggtgcaggtttagtgggacatagtcgtcggtatcttacagcatgtgtttctgatggagtgatatggttagtaagcagtggtgaaggatacaggcatacgggcactggggcatataccatacttttggactagacgggctagagactgattttggagtccgttatgtttccattttccgttctcttggttttctctgtcgtcaatgtattataatcatgatgatgaatggatggagaaatgagatgagatttttttgagttcactcttgcagtttcggttattatatttttgtgctgtcttcgaatctgatttggtcgacggcatgtttggaagtaaagtattttaaaatcaggttttggaatacta

SEQ ID NO: 2726 - DNA, 5615 bp, Zea Mays
ctcggaggacgagggcgcgacggcacgcggcgaaaacgacgcggccgcgtcgccaaaaccgtcgcctcgcttcctccctcccatgacgggctcgaaacccgcgcccgccgcctcgcagaaccctagcgcggtcccgcatcgtcgtcctcctcctcctcctcctcctcctcctccgccgccggtgacagcggttgcgagggtgcgcgaagaaggcgagctctcctccggcgccgacgacgacgagactctgcaaactcagctaggtgccgcatccattcttgggaagtttgtggaggctggatctcaagtgccatcggcaagtctcctcggtaaaggcagtaacaccttgattgtctcaaatgctctgaatcataaagcgtctgctccaagttacaagaagatcatgagggtgaatcaggggcaattcaaacctggcactaaccggaatctttcatggcagaagcctgtgtcaagtgataaccttctgataactttctcagatgatgatagtggggcagactctgggaagacagggcgagataaagttaggaaggctagctctcaaggtacacagagaacagggaacagtatgcaaactaggatcatgagagaggaagtatctcagcagaaaaaccttggttcaaaagtaggtcctgcacacttgcctgcttttccattcacacatagaaatgttggggccggcagggcatcaggtaatacctttttcaggaaagagctgcctgtccgccaagttaatcctctaaagtctaaacagaaagttcaaaatggggtaggagtacattctgaagatcataggttagaaatcttgcgccataagatagctgctaaagaaaatgaactaaaaggtcaaaaaagacctttgtccgctgttgctacaaagaatgcagatttttcttccaatcagccaaggctgccatctgaaaagataaggcttgaagcttccagcattggtgaatattcacgctttaatagtctgtctgaacatagtggaggaccaaataaaaggttgaagctcaatcagcagtacaaccaattttgtagtgacctgacaccattggcacctattggttctatatcaggaaaaaccaatgtgcaatcttcagaagtgacaaatcggtctgaaaatggaattactatgaaccttaatgttaatgaaacagatacaacagacacaacagaacttgcagatcaaatacaacaaggtggggcaactaagagcctacgtcaccacaaagattcaggaggtgctgagaaccatgttatgcttgagtcacatgatgggcttgcagcacaaccaccatttactgacacacaaactataccagaagatacaagtgcgttggcccctgtgacgtcagcccaagctaggcaacaggtactggctgttggtacttcacctgtgttagacggaacaccacaattgcaacctggaaaggagaatgacgaatgtttgaacagcagtggccagataggcgtagagacacagaacacaatattgttctctctacttgagatggaagaattacaagacaaggaattggaggatgctcaggagcatagacaaaaatgtgaagctgaagaaagagaagctcttagagcttatcgcaaagcacaaagagctttacttgaggcaaatgaaagatgtgcaattcttcgtagaaaaagggagatttgctcttcacaagtccatggtttaattgcagagaattcttctttggtgcagtctttgagtattcggaatcctgaagatggccttgcaatgccatcactgctcaattctcagattcatgcagttagtcagattcctgaaaatcagggtggtagacacaggctgtgtcctgaagaaccttctcagcagcaaattgataagcatgaagatgaagcacgtccacactattgtgataagcttgctgccagcacagctgatcccagctctgtgagtgctgtcaatgctgacagcatcctttcagattatatggaggatgatcttctgttcccgactagacaggcaagatcagaatgtgctctggatgttgagaatcaaatggaagaaactatacatgtatatgcagaggaaaacagacaagtttctggtgacggtggtgaggattatgaacttttagaagcttctttgaggtctagattggtggaaaggtttgggaagaaatcatgtttgaatggcaccattgatgaaggtactgaaggacttgctgttgggaaagtagctgcagaacatggcaagcagtctgcatatgttggacatcagttacaggaagcagagcagaatattatgacaactactcttgaaggtacaatggagctggaaaatgatggtgctgaaaaaactgttggcctctctaattcttgtagtggtccttcaatgggcaactgtgatcctgaggacaacatttcctctctcaaagagttatgcatgccattggttatggacagtcttatttttccttcttcagctccactaaatgctgctagacaaatcaagcgggcatttcctgggatttgcaaggagctttcagattacaaaaatgaccatctgaccagtgatgcagtgtctgaagttacaggaagtgtacaagatatgatacacgaccttgttggagaaaatatgaagatgctcccaactacccaaaatgataataatatggtgcacagtgtgattgatcccttctggcccttttgcatgtttgagcttcgaggaaaatgcaatgacgaagagtgccagtggcagcattttgagcatcatgattggagaaagctagagcttacaaaacactctatgatctctgtttcagatcccttatggtttgtctcagtatattcttccagtgccagtgtatcgtgttggttcaaatcttattaaagctgatctgaacttgacacagtcagtgttggctagcagtttatggcaatattggcaaagggggttttgtgcttcttttcctttacctttatctgttcaaagagttcttccatcagatgcaccattctttcaggctggtgatggccggattgctgattttgataggaacagacaactactaaaatttcgaatgctggatagcaggaagaataagattgtacagggttctgttgatattgaattcttcttggaggcagcccttgatttatattgtggaaaagtaaacaagcctgacagaatcaaggctctttcatttctggcgcggtccattgaggctgatccaagtacagttatcctgtgggtgttttatctccatatttactatcaaaaggatgaaggacttggaaaagatgacatgttttctgatgcggtgcaacacaatgtttattcttatgaattatggcttatgtatataaatagtaggttacgcgttgatgatcgattggatgcttataacgatgctttgagcatgctctgccaaatgacagctgagactgacaaggatctacaagaaagaagtgctttcatactagacattttcttacagatgatttacttcctgtgcatgtctggaaatatagacaaggcagtttctaggattattggaattcttccaactgcaatgcctgataattctggtgacaagttgcttgctgatgtcatttcttgcttgaccatgtccgacagatgcatattttggatttcgtgcctatatgtcttaatttacaggaaccttccagaggaaattattgatcagctggagtttcagaaagctttacctcgtgctttaatatggccttctattgatcccagtgtagacaacagagataagattacagatcttctaaattttgctgcttgtaagatggctgaagatattagtgagtgtgttaaaaacggggatccatcttacctgatgttatcacaattcctcgctgttaaccacattagttgtctagcggccattggaggcttaaaatcttctgttgatatgctggtgacctacatgaaggagtacccaatgtgtcctcagattcttctgatctcagctcggttagacagaaagcatggtacatgtccaggtctgaaaagctttgatgagttgatcttgaattggcctaaagaggcacaaggaattcaatatatgtggaatcaatatgttgaacatgctctggccactgatgccgagttagctgagaaggtactgacttgctggtttgaagaacatggaaaggactgtgatatccaaagcaatgctgctatttgtatagaactgagcagtgaagaacctggaacatcatcacttgtttcacctcaggcagttggttctggtccatctatatcagaagatctcgtctttcggttactaaacctctcactgtataagatactggagaacaacctacaggaagcacaaatggctgcgagtaaagcattgaaattggctcatggggagtggtacgagcactgtataagagaacatgctgcaattcatgcactggagctggagaaatcatcatcttcgacagatgctcaaactcgggctacattcagtttaatcattggctaccttgctgatcattgcaacttgcccacgagggagctgctgtcacgaaggttttgccagaatattaagaagcataggcttaggcagcttatagatgatactattggttctgttcctgcagattcttctctgataaactctgtccttgaagtgtgctttggcccatccctccttccaaaaagcattagcgatgtgaagtacctggttgattttgttgaaacagtcatggaggctcttcctgcaaactatcgcctgggcttggctgttggtggattcgtagctaagcacttcacaggttatggcgcagcctccactgggaccaggttctgggcaagctctgttctgatcaatgccatctttcgagctgtacctgtcgcaccggaatcagtatggctagaaggtgcaggcctcctggagaaactgcatgccacagagattttgaagaggttctatcagcaggcggcatcggtctatcccttctccttcaagctgtggcacgcccatctgaattactgcaaagccagtgggagcaacactgagagcatcctggagagtgcgaggcagcgtggcatcgagctgaatctgacaccaacatagtgtgtcccttggatccaagctgcatgatgttttgccagtcggagatgttggtagtgttgtgttaactggagatggcgtgtagatatatcggtgatcatggtggtgtgagatcatttttgttctttaggtgcaggtttagtgggacatagtcgtcggtatcttacagcatgtgtttctgatggagtgatatggttagtaagcagtggtgaaggatacaggcatacgggcactggggcatataccatacttttggactagacgggctagagactgattttggagtccgttatgtttccattttccgttctcttggttttctctgtcgtcaatgtattataatcatgatgatgaatggatggagaaatgagatgagatttttttgagttcactcttgcagtttcggttattatatttttgtgctgtcttcgaatctgatttggtcgacggcatgtttggaagtaaagtattttaaaatcaggttttggaatacta

SEQ ID NO: 2727 - DNA, 1556 bp, Zea Mays
tgttaaaaacaaaaaattcaggtttatgtaccggtgacagcgaccgcgacaggtcctctcccccggaccgcacccgctgtagccgccatgtcgtccgccgccgccacagcctttgccggagtctccgtcgccaccccgaacctcaccactccatttcgcggtcgcgtgcgccttccgctacgcggggtctccgctgccccacgccgcgccgtcgcttcgatggccgtgtccgcccccaggtccggcgccgccgcctcgttcctggagcgccgcgagtccgagcgcgctctccacttcgtcaagtaccagggcctcggcaatgacttcattatggtggacaacagggattcgtcggtgccgaaggtgacgccggaggaggccgcgaagctgtgcgaccgaaacttcggcattggtgccgacggcgtcatcttcgtcatgccaggggtcaatgatgccgactacaccatgaggatcttcaactctgacggcagcgagccagagatgtgtggtaatggagtccgttgctttgctcggtttataggcgaacttgaaaatctgcaggggacacatagcttcactattcatactggtgctgggaagatcattcctgaaatacaaagtgatgggcaggtaaaggttgatatgggagagcccatcctttctggagcagacatccccacaaaactggtagctaccaagaacaaagctgttatccaagctgagttggcagttgagggcttaacatggcatgtcacatgtgttagcatgggcaacccccactgtgtcacatttggggcaaacgagttaaagaccttgcagatcgacgatttaaaactcagcgaaattgggcctaaatttgagcatcatgaaatgtttcctgctcgcacaaacacagagtttgtacaggttttgtctcgctcacacctcaaaatgcgagtctgggaacgtggtgctggagcaactcttacctgtggtactggtgcttgtgcggtggttgttgcagctgttcttgagggtcgagctgagcggaaatgtgtagttgatttgcctggcgggccattggaaattgagtggagggaggatgacaatcatgtttacatgactggtcctgcagaggccgtcttttatggatctgttgttcactaggtactggggagtggggaccaagatagaagggttggctgccactcaaagcttgtgagattggttacaatatccatgaaactgaatgttctggtgccagtacactcgtttagatattttaaattatggttgcttgatttgggtagcagtagaggcttccttttgaagcattctagtgttgtccaccttttgtactcctttagtctgtcaggtttgaactacattgttagcatgtctttccaaccattttctgtttcttttctttgcaagttaacgtcaatgcagcttcagtattgttttctacagatttatcttgatgcactgcagaatgaatgggcttactagtttgctggacacttcttaggtttcaacttgaagggtttatacatctgtttttgtttccaacatttgaa

SEQ ID NO: 2728 - DNA, 1715 bp, Zea Mays
tgttaaaaacaaaaaattcaggtttatgtaccggtgacagcgaccgcgacaggtcctctcccccggaccgcacccgctgtagccgccatgtcgtccgccgccgccacagcctttgccggagtctccgtcgccaccccgaacctcaccactccatttcgcggtcgcgtgcgccttccgctacgcggggtctccgctgccccacgccgcgccgtcgcttcgatggccgtgtccgcccccaggtccggcgccgccgcctcgttcctggagcgccgcgagtccgagcgcgctctccacttcgtcaagtaccagggcctcggcaatgacttcattatggtggacaacagggattcgtcggtgccgaaggtgacgccggaggaggccgcgaagctgtgcgaccgaaacttcggcattggtgccgacggcgtcatcttcgtcatgccaggggtcaatgatgccgactacaccatgaggatcttcaactctgacggcagcgagccagagatgtgtggtaatggagtccgttgctttgctcggtttataggcgaacttgaaaatctgcaggggacacatagcttcactattcatactggtgctgggaagatcattcctgaaatacaaagtgatgggcaggtaaaggttgatatgggagagcccatcctttctggagcagacatccccacaaaactggtagctaccaagaacaaagctgttatccaagctgagttggcagttgagggcttaacatggcatgtcacatgtgttagcatgggcaacccccactgtgtcacatttggggcaaacgagttaaagatcgacgatttaaaactcagcgaaattgggcctaaatttgagcatcatgaaatgtttcctgctcgcacaaacacagagtttgtacaggttttgtctcgctcacacctcaaaatgcgagtctgggaacgtggtgctggagcaactcttacctgtggtactggtgcttgtgcggtggttgttgcagctgttcttgagggtcgagctgagcggaaatgtgtagttgatttgcctggcgggccattggaaattgagtggagggaggatgacaatcatgtttacatgactggtcctgcagaggccgtcttttatggatctgttgttcactaggtactggggagtggggaccaagatagaagggttggctgccactcaaagcttgtgagattggttacaatatccatgaaactgaatgttctggtgccagtacactcgtttagatattttaaattatggttgcttgatttgggtagcagtagaggcttccttttgaagcattctagtgttgtccaccttttgtactcctttagtctgtcaggtttgaactacattgttagcatgtctttccaaccattttctgtttcttttctttgcaagttaacgtcaatgcagcttcagtattgttttctacagatttatcttgatgcactgcagaatgaatgggcttactagtttgctggtatgaatgttgcctatttcctggaaatcgttgtcatctaaagtgcttctgacaaaagacagcatgggttattggttatgactcactgctaatttcacctgcaacaattaataaagtgtcacattctgtgcttatataatttctgtgttttgcttttactaactccaggacacttcttaggtttcaacttgaagggtttatacatctgtttttgtttccaacatttgaa

SEQ ID NO: 2729 - DNA, 1253 bp, Zea Mays
tgttaaaaacaaaaaattcaggtttatgtaccggtgacagcgaccgcgacaggtcctctcccccggaccgcacccgctgtagccgccatgtcgtccgccgccgccacagcctttgccggagtctccgtcgccaccccgaacctcaccactccatttcgcggtcgcgtgcgccttccgctacgcggggtctccgctgccccacgccgcgccgtcgcttcgatggccgtgtccgcccccaggtccggcgccgccgcctcgttcctggagcgccgcgagtccgagcgcgctctccacttcgtcaagtaccagggcctcggcaatgacttcattatggtggacaacagggattcgtcggtgccgaaggtgacgccggaggaggccgcgaagctgtgcgaccgaaacttcggcattggtgccgacggcgtcatcttcgtcatgccaggggtcaatgatgccgactacaccatgaggatcttcaactctgacggcagcgagccagagatgtgtggtaatggagtccgttgctttgctcggtttataggcgaacttgaaaatctgcaggggacacatagcttcactattcatactggtgctgggaagatcattcctgaaatacaaagtgatgggcaggtaaaggttgatatgggagagcccatcctttctggagcagacatccccacaaaactggtagctaccaagaacaaagctgttatccaagctgagttggcagttgagggcttaacatggcatgtcacatgtgttagcatgggcaacccccactgtgtcacatttggggcaaacgagttaaagaccttgcagatcgacgatttaaaactcagcgaaattgggcctaaatttgagcatcatgaaatgtttcctgctcgcacaaacacagagtttgtacaggttttgtctcgctcacacctcaaaatgcgagtctgggaacgtggtgctggagcaactcttacctgtggtactggtgcttgtgcggtggttgttgcagctgttcttgagggtcgagctgagcggaaatgtgtagttgatttgcctggcgggccattggaaattgagtggagggaggatgacaatcatgtttacatgactggtcctgcagaggccgtcttttatggatctgttgttcactagatttatcttgatgcactgcagaatgaatgggcttactagtttgctggacacttcttaggtttcaacttgaagggtttatacatctgtttttgtttccaacatttgaa

SEQ ID NO: 2730 - DNA, 1087 bp, Zea Mays
cagctattccgccccgtgaggtggacaacagggattcgtcggtgccgaaggtgacgccggaggaggccgcgaagctgtgcgaccgaaacttcggcattggtgccgacggcgtcatcttcgtcatgccaggggtcaatgatgccgactacaccatgaggatcttcaactctgacggcagcgagccagagatgtgtggtaatggagtccgttgctttgctcggtttataggcgaacttgaaaatctgcaggggacacatagcttcactattcatactggtgctgggaagatcattcctgaaatacaaagtgatgggcaggtaaaggttgatatgggagagcccatcctttctggagcagacatccccacaaaactggtagctaccaagaacaaagctgttatccaagctgagttggcagttgagggcttaacatggcatgtcacatgtgttagcatgggcaacccccactgtgtcacatttggggcaaacgagttaaagaccttgcagatcgacgatttaaaactcagcgaaattgggcctaaatttgagcatcatgaaatgtttcctgctcgcacaaacacagagtttgtacaggttttgtctcgctcacacctcaaaatgcgagtctgggaacgtggtgctggagcaactcttacctgtggtactggtgcttgtgcggtggttgttgcagctgttcttgagggtcgagctgagcggaaatgtgtagttgatttgcctggcgggccattggaaattgagtggagggaggatgacaatcatgtttacatgactggtcctgcagaggccgtcttttatggatctgttgttcactagaatgaatgggcttactagtttgctggtatgaatgttgcctatttcctggaaatcgttgtcatctaaagtgcttctgacaaaagacagcatgggttattggttatgactcactgctaatttcacctgcaacaattaataaagtgtcacattctgtgcttatataatttctgtgttttgcttttactaactccaggacacttcttaggtttcaacttgaagggtttatacatctgtttttgtttccaacatttgaa

SEQ ID NO: 2731 - DNA, 2325 bp, Zea Mays
cgagccgagctggctcgctcttttcacgagccagaaaaacaggctcggctcgggctcgttcggagcgtcgagccggtccgagccgagccgagctgctgcgagcccgagctagctcgtcgagctcgagctttttttccggccctagctacagctaaggccaggccactgggcctttcgtgttgggccatccgagactggaaagtggggcccacgaggcgtatcgatcaagcaccgtccactctcacatcaaaggcggaggtgagctccttcggctctgcgcctttgcagttgcggataacggggaggaggcggagcgaccaacggcacaggcaccatggcgatgcgagcagctacagcggcggcgacaggcttcttctctccatccaccgtccctccgaggcgcttctcgtccgttacaccgccggcgtcactctgcaccgcgcgctgcatccagcgtcaccgtctccgcgccttcccaagcttggaaatacctctagaggaactcaacccatccgtcgatctacttaggagaactgcggaggccgttggcgatttcaggaaaacgccaatctatattgttggtacggattgcacagccaagcgcaacatcgccaagctgcttgcgaattccataatataccgctacctcagcagtgaggaactgcttgaggatgttcttggtggcaaggacgccctcagagccttcaaggaatctgatgagaagggttatcttgaagtcgagaccgaagggttaaagcagctcacgtccatgggtagccttgtactgtgctgtggagatggcgccgttatgaactcaaccaatctagggctgctgaggcatggtgtctccatttggattgatgttcctcttgaaatggcagcaaatgacatgttgaagagcacgggaacacaagctactacagatccagactctttttctcaggcgatgagcaagctccgtcagcggtatgatgaactgaaagagcgctatggggtttctgatattactgtttcagtacaaagtaaagatagatcctcaaaccgcctgtccttcccgttgagttataattagtgctcatttgggttgagttatagttagtgctcatttggagccacctgactaaattttagtcccgttagatcaaatgtttgaatactagttagaatttttaaatatagtataattacaaaattaattacacagataaagactaaagataaggactaaacggtaagatgagtcaattaggcctgattagactattattcgtccatgtgatgctacaataaacatttgctaatcatggagtcattaggcttaatgaatttgtctcgtcgtttagtcttcatctatggaattagttttatagttagaccatatttaatacttgtaattggcattcaaacattcaatatgacacagactttagttaggggaacaaacacccctttagtaaatggtgaatataatcgggtgaactttttctgagatgcctcaacacctttcagatgtggcttctcagcgggggtacagtagcattgacttggtgacgcttgaggacatggtccttgaaatcgtgaggcaaatcgagaagctgatccgtgcaaaggagatgatggaagctgcagggaagccattctaaacaagatacacatacacaatagttctgctccggcatacctattttctggccagttaccagacctccgatgcttcgctgttcaagaaaccgattgcagttgcctacggctcaaagcacaagcgcgtgaaatctaaggaactgaatctggttgttccactcgaatatgcttatattgtattgcaagatcacttgccaattgatagtgcaaaaaatgcattttgtagtttggattctctagtattgactttaatccatatgtattgaagtagattggagtgtaacttaaactaatttacacactaatttaccttaacatatgtggattaggattaatactagagtgtccaaacaaagccttacgtgttaatctgccatggttgaattttgcaatggcagtttttcctatgcatggcctggccgccgaattagtagaatttagtgcaagaaggaaaaaaaaaatccgggaacacttttacaatcaacatgttgcaatgctaaacgaaggcttttacaccgagagattgacttgatcaatttacacggggagagaggtttcacgtgtttttgttatcagagataaagagggacgagaaaaactagcaaaaagtgtgtatgccagtgattacatgagtttcaatagcatataggtgctgtttggttcaagaaatgtaacgcaaagggt

SEQ ID NO: 2732 - DNA, 2971 bp, Zea Mays
cgagccgagctggctcgctcttttcacgagccagaaaaacaggctcggctcgggctcgttcggagcgtcgagccggtccgagccgagccgagctgctgcgagcccgagctagctcgtcgagctcgagctttttttccggccctagctacagctaaggccaggccactgggcctttcgtgttgggccatccgagactggaaagtggggcccacgaggcgtatcgatcaagcaccgtccactctcacatcaaaggcggaggtgagctccttcggctctgcgcctttgcagttgcggataacggggaggaggcggagcgaccaacggcacaggcaccatggcgatgcgagcagctacagcggcggcgacaggcttcttctctccatccaccgtccctccgaggcgcttctcgtccgttacaccgccggcgtcactctgcaccgcgcgctgcatccagcgtcaccgtctccgcgccttcccaagcttggaaatacctctagaggaactcaacccatccgtcgatctacttgtaggctccacccttctccctccccctgttcctgtcatattttatcttcctgttattgtttttaaataatcgttgccctacttatggacggattttgcatggttttcttggttgcaatctaatgcagaggagaactgcggaggccgttggcgatttcaggaaaacgccaatctatattgttggtatgcttgtcagcttcctttggaattttttttccaggggatagggggattaaaaggcctcagcaaaccaatcgttagccacaacaatcaaatctagacacattttaaatttcgtaacacaacaaactaaccgacattaatcttagcagcccaaaagtaagaaaactgctcgtaaaaaatgggcttgttcttgatccaaccaacattttttagccaaccttaggcatagcccaggtcttggttatgacaatctttcgggaatagatatcaatatgtgatgtgatctttgctgtcattataattgttgtaatggacatcggacagaatattttaagttgccaagatacaaatgtcaggtcagtatgcatccaaacagcacaagagaaaacaactgatattggtgtgaggacactgtggaattctaaaactcatcagtttctttgaccaccacaatttacagcaaagaatttcttctggatgagagtacgagacagaagacaagttgccaaacattttctagtacggattgcacagccaagcgcaacatcgccaagctgcttgcgaattccataatataccgctacctcagcagtgaggaactgcttgaggatgttcttggtggcaaggacgccctcagagccttcaaggaatctgatgagaagggttatcttgaagtcgagaccgaagggttaaagcagctcacgtccatgggtagccttgtactgtgctgtggagatggcgccgttatgaactcaaccaatctagggctgctgaggcatggtgtctccatttggattgatgttcctcttgaaatggcagcaaatgacatgttgaagagcacgggaacacaagctactacagatccagactctttttctcaggcgatgagcaagctccgtcagcggtatgatgaactgaaagagcgctatggggtttctgatattactgtttcagtacaaagtaaagatagatcctcaaaccgcctgtccttcccgttgagttataattagtgctcatttgggttgagttatagttagtgctcatttggagccacctgactaaattttagtcccgttagatcaaatgtttgaatactagttagaatttttaaatatagtataattacaaaattaattacacagataaagactaaagataaggactaaacggtaagatgagtcaattaggcctgattagactattattcgtccatgtgatgctacaataaacatttgctaatcatggagtcattaggcttaatgaatttgtctcgtcgtttagtcttcatctatggaattagttttatagttagaccatatttaatacttgtaattggcattcaaacattcaatatgacacagactttagttaggggaacaaacacccctttagtaaatggtgaatataatcgggtgaactttttctgagatgcctcaacacctttcagatgtggcttctcagcgggggtacagtagcattgacttggtgacgcttgaggacatggtccttgaaatcgtgaggcaaatcgagaagctgatccgtgcaaaggagatgatggaagctgcagggaagccattctaaacaagatacacatacacaatagttctgctccggcatacctattttctggccagttaccagacctccgatgcttcgctgttcaagaaaccgattgcagttgcctacggctcaaagcacaagcgcgtgaaatctaaggaactgaatctggttgttccactcgaatatgcttatattgtattgcaagatcacttgccaattgatagtgcaaaaaatgcattttgtagtttggattctctagtattgactttaatccatatgtattgaagtagattggagtgtaacttaaactaatttacacactaatttaccttaacatatgtggattaggattaatactagagtgtccaaacaaagccttacgtgttaatctgccatggttgaattttgcaatggcagtttttcctatgcatggcctggccgccgaattagtagaatttagtgcaagaaggaaaaaaaaaatccgggaacacttttacaatcaacatgttgcaatgctaaacgaaggcttttacaccgagagattgacttgatcaatttacacggggagagaggtttcacgtgtttttgttatcagagataaagagggacgagaaaaactagcaaaaagtgtgtatgccagtgattacatgagtttcaatagcatataggtgctgtttggttcaagaaatgtaacgcaaagggt

SEQ ID NO: 2733 - DNA, 2357 bp, Zea Mays
cgagccgagctggctcgctcttttcacgagccagaaaaacaggctcggctcgggctcgttcggagcgtcgagccggtccgagccgagccgagctgctgcgagcccgagctagctcgtcgagctcgagctttttttccggccctagctacagctaaggccaggccactgggcctttcgtgttgggccatccgagactggaaagtggggcccacgaggcgtatcgatcaagcaccgtccactctcacatcaaaggcggaggtgagctccttcggctctgcgcctttgcagttgcggataacggggaggaggcggagcgaccaacggcacaggcaccatggcgatgcgagcagctacagcggcggcgacaggcttcttctctccatccaccgtccctccgaggcgcttctcgtccgttacaccgccggcgtcactctgcaccgcgcgctgcatccagcgtcaccgtctccgcgccttcccaagcttggaaatacctctagaggaactcaacccatccgtcgatctacttaggagaactgcggaggccgttggcgatttcaggaaaacgccaatctatattgttggtatgcttgtcagcttcctttggaattttttttccaggggatagggggattaaaaggcctcagcaaaccaatcgttagccacaacaatcaaatctagacacattttaaatttcgtaacacaacaaactaaccgacattaatcttagcagcccaaaagtaagaaaactgctcgtaaaaaatgggcttgttcttgatccaaccaacattttttagccaaccttaggcatagcccaggtcttggttatgacaatctttcgggaatagatatcaatatgtgatgtgatctttgctgtcattataattgttgtaatggacatcggacagaatattttaagttgccaagatacaaatgtcaggtcagtatgcatccaaacagcacaagagaaaacaactgatattggtgtgaggacactgtggaattctaaaactcatcagtttctttgaccaccacaatttacagcaaagaatttcttctggatgagagtacgagacagaagacaagttgccaaacattttctagtacggattgcacagccaagcgcaacatcgccaagctgcttgcgaattccataatataccgctacctcagcagtgaggaactgcttgaggatgttcttggtggcaaggacgccctcagagccttcaaggaatctgatgagaagggttatcttgaagtcgagaccgaagggttaaagcagctcacgtccatgggtagccttgtactgtgctgtggagatggcgccgttatgaactcaaccaatctagggctgctgaggcatggtgtctccatttggattgatgttcctcttgaaatggcagcaaatgacatgttgaagagcacgggaacacaagctactacagatccagactctttttctcaggcgatgagcaagctccgtcagcggtatgatgaactgaaagagcgctatggggtttctgatattactgtttcagtacaaaatgtggcttctcagcgggggtacagtagcattgacttggtgacgcttgaggacatggtccttgaaatcgtgaggcaaatcgagaagctgatccgtgcaaaggagatgatggaagctgcagggaagccattctaaacaagatacacatacacaatagttctgctccggcatacctattttctggccagttaccagacctccgatgcttcgctgttcaagaaaccgattgcagttgcctacggctcaaagcacaagcgcgtgaaatctaaggaactgaatctggttgttccactcgaatatgcttatattgtattgcaagatcacttgccaattgatagtgcaaaaaatgcattttgtagtttggattctctagtattgactttaatccatatgtattgaagtagattggagtgtaacttaaactaatttacacactaatttaccttaacatatgtggattaggattaatactagagtgtccaaacaaagccttacgtgttaatctgccatggttgaattttgcaatggcagtttttcctatgcatggcctggccgccgaattagtagaatttagtgcaagaaggaaaaaaaaaatccgggaacacttttacaatcaacatgttgcaatgctaaacgaaggcttttacaccgagagattgacttgatcaatttacacggggagagaggtttcacgtgtttttgttatcagagataaagagggacgagaaaaactagcaaaaagtgtgtatgccagtgattacatgagtttcaatagcatataggtgctgtttggttcaagaaatgtaacgcaaagggt

SEQ ID NO: 2734 - DNA, 1245 bp, Zea Mays
ggatgagagtacgagacagaagacaagttgccaaacattttctagtacggattgcacagccaagcgcaacatcgccaagctgcttgcgaattccataatataccgctacctcagcagtgaggaactgcttgaggatgttcttggtggcaaggacgccctcagagccttcaaggaatctgatgagaagggttatcttgaagtcgagaccgaagggttaaagcagctcacgtccatgggtagccttgtactgtgctgtggagatggcgccgttatgaactcaaccaatctcaaatgacatgttgaagagcacgggaacacaagctactacagatccagactctttttctcaggcgatgagcaagctccgtcagcggtatgatgaactgaaagagcgctatggggtttctgatattactgtttcagtacaaaatgtggcttctcagcgggggtacagtagcattgacttggtgacgcttgaggacatggtccttgaaatcgtgaggcaaatcgagaagctgatccgtgcaaaggagatgatggaagctgcagggaagccattctaaacaagatacacatacacaatagttctgctccggcatacctattttctggccagttaccagacctccgatgcttcgctgttcaagaaaccgattgcagttgcctacggctcaaagcacaagcgcgtgaaatctaaggaactgaatctggttgttccactcgaatatgcttatattgtattgcaagatcacttgccaattgatagtgcaaaaaatgcattttgtagtttggattctctagtattgactttaatccatatgtattgaagtagattggagtgtaacttaaactaatttacacactaatttaccttaacatatgtggattaggattaatactagagtgtccaaacaaagccttacgtgttaatctgccatggttgaattttgcaatggcagtttttcctatgcatggcctggccgccgaattagtagaatttagtgcaagaaggaaaaaaaaaatccgggaacacttttacaatcaacatgttgcaatgctaaacgaaggcttttacaccgagagattgacttgatcaatttacacggggagagaggtttcacgtgtttttgttatcagagataaagagggacgagaaaaactagcaaaaagtgtgtatgccagtgattacatgagtttcaatagcatataggtgctgtttggttcaagaaatgtaacgcaaagggt

SEQ ID NO: 2735 - DNA, 2091 bp, Zea Mays
cccatccctcctcccgcagcctctctgtctctcgctcattataatcacactgacacgacggtcccagcactcatcggacggtccaaaccagccgtgaacccatctccaccgtccgccctagggtaaccctcctcaaccccgatcattcactatatatataattctctctcttctcccacctccaaccctagccgcactgcgctcatttctgcatccccctcccgccgcgccgcctcaccgccgccggagaagatgggtcgcgtgatccgcgcgcagcgtaagggtgcggggtccgtgttcaagtcccacacccaccaccgcaagggccccgcccgcttccgctccctcgacttcggcgagcgcaacgggtacctcaagggcgtcgtcactttccgccacccattcaggtacaagcaccagaaggagctctttgtcgcagccgagggcatgtacacgggccagttcgtctactgcggtcgccgcgccaccctctccatcggcaacgtgctgcccctccgcgggatccctgagggtgccgtcgtctgcaacgtcgagcaccacgtcggtgaccgcggtgtcttcgccagggcctctggggactacgccattgtgatcagccacaaccctgacaacggcacatcgaggtctgaacacgatcacgaaccctcctatttcattgatttgtaatttcgtatgatgagatctggtgtagccgtggagtaattatatcactgaatatgatatgttatggatttatggcactattattgacaaatgatttagctctattgataagacttttacttatccgcgctagattttgtttttaaataatataaaatgggtcgatttgtgcagtactatggtagatatcatttgtttgatgttttttttggcatacgtgattcggttttacaatcatagaggttctagtttacttaaggtctttgcagtgaggtaaaatttttagtttttatgtagatatttatagctgatttgttgcaaggtgctgcagattatcaaataaacaccttacgtatgcatgttctgcaatggctacattgtatatgacgtgattattattgtgctgctttacacatctccatcatatatcctgatgacattgtaacctgtttctcatattgtgatgtcagtcggattattacattttacagctgaatataatttcagttggagtgtttttctgattgaataccttgtatgtatcctaatctgtctgcctactcttaatgccttgttgatgtcctaatgtagttgcctacttggatgtctttcatttatcagtgtatccaagtgaccttttgttatttgtctgcattcttaattctgttctgttctttcaggattaagctgccctctggcgccaagaagattgtccccagcagctgccgtgctatgattgggcaggttgctggtggaggcaggactgagaagccgatgctcaaggctggtaacgcgtaccacaagtaccgtgtgaagaggaacagctggcccaaggtgcgtggtgtggccatgaaccctgtggagcatccccacggaggaggtaaccaccaacacatcggtcacgcctctactgtccgccgagacgctccccctggccagaaggttggtctcattgccgctaggaggactggaaggctcaggggtcaagctgctgccacagcctccaaggctgacaaggccacctagagttattgtcgttgtttatctgtctactgtgctttagattgttaaaggacatgtgtttcagaacggatgtgttgttgcctcgtactatggtgaaacattgtctcagtttttgtggtcgctgtcaggattttgcattatgcctaaagatgtttactttggatatttttgtgttaaaatggtactgtattggatatgcctcccttgcttcgttttattttggcctttgtagaattgttgagcggttgtctctttgcgtgggatcgtgtaatttctgagttgctggaacgttggcaatacatggtttccgtcgaaacttcattagcgctgactgctgagagggcactgggcagtatggtgatgtctacaagagattagtttgac

SEQ ID NO: 2736 - DNA, 3751 bp, Zea Mays
tattatttgatttcctcgcctcgccctccctccactcctaccgcttccgccgccgcccgcctccacccctgccctccctccgccccacgcgcctgcgcatcgtcgatcggcgcccgggccgcgcgctccctccgcccttgcgcccccgtggactgaggcctcccgctccgctcaggccgtacgccgcggggtttgccactccgcgttcaacgactcaatatgtcgctcgatgttactcaagtactcttaagcgcgcaatctgctgatggcgcagtaaggaagcatgctgaagaaagcctcaagcagttccaggagcagaacctccctggattcttgctctctctctcaagtgagttggccaatgaagagaaacctgaggagagccgcaggttagctggcttgattcttaagaatgcactggatgcaaaggagcagcacaggaagaatgagcttttccagagatggctggcactggatgctggtgccaaagcacaaattaaaggattgctgctgcaaactctcacatctcctgttgcaagtgccagatccactgcttcccaagttattgccaaggttgccggtattgagattccgcagaagcaatggccagaacttataggatcattgcttgcaaacatacatcaggtccagccaaatgtcaagcaagcgacgcttgagacacttggctatttatgtgaggaagtttctccagatgctgttgaccaagaccaagtcaataaaatacttacagctgttgttcagggtatgaatgcttctgaggcaaactctgatgtcaggcttgcagctacacgggcattgtataatgctttgggctttgctcaggttaatttctcgaatgacatggagcgtgactatatcatgagagtagtttgtgaagcgacacagtctccagatgtgaagataaggcaggctgcttttgagtgtttggtggctatctcgtctacttattatgataagctggcaacatacatgcgggatatatttaatataactgcaaaagctgtgaagagagataaggagtcagttgcgctccaggctattgaattctggagttccatatgtgatgaggaaatcgacattctggatgagtacagcagtgaatttacagctgattctgatgttccttgctactactttatcaagcaggctcttcctgccttagtgccgatgttgttagaaactctcctcaagcaagaggaagaccaagacttggatgaaggtgcttggaatcttgcaatggctgggggaacttgtctgggcctggtggcaaggaccgttggtgatgacattgttcctctcgtaatgccttttgtggaggagaacataaccaagtctgagtggagacaaagagaggctgcaacatatgcctttggctctatcttggagggcccatcagctgataaactggctcctcttgttaatgttgcattgggcttcatgctgtccgcgctgatgaaggatccaagtaaccatgtgaaggacacaactgcttggacccttgggagaatctttgagtttcttcatggttcagcgcttgaaactcctcctatcattacggccgagaattgtcagcaaatacttactgtgttgcttcacagcatgaaggatgtcccaaatgtggctgaaaaggcctgtggagccctctattttcttgcacaaggctatgttgattctgggtctgcatcgccactatcccctttctttcaagatattgttcagaaccttcttatggtcactcacagggaggatgctggggaatctcggctacaaacagcagcatatgagaccctaaatgaagttgtcaggtgctccactgaggagacggctgctattgttatgcagttagtacctgtgatcatggtggaactccatcagacacttgaagctgaaaagttgtcaactgatgagagggagaagaggagcgaactgcagggcctcctttgtggttgcttgcaggtcattattcaaaagttgggagggatggagtcaactaagtactctttcttgcagtatgctgatcagatgatggaactgtttttgagagttttcgcatgtcgaaatgccacagtgcatgaggaggctatgcttgctattggtgcattggcatatgcagctggtccaaactttgcaaaatacatggcacagttttatcagtatttggagatgggtcttcagaactttgaggagtatcaggtgtgtgccattaccgtgggcgttgttggtgacctctgtagagcactggaagacaaaattttgcccttctgtgatggcatcatgactcaactcctgaaggacctgtccagtaaccagttgcacagatcagtgaaaccaccaatattttcgtgctttggtgatattgcactggcaattggggaaaactttgagaagtatttgatctatgcgatgcctatgctccaaagtgctgctgatttgtctgcccataccactgcaactgatgatgagatgctcgactacaccaatcagctaaggagtggaatcttggaagcctactctggtatcctgcaaggatttaagagttcacctaagacacaactactgatgtcatatgctccacatattattcagttccttgatgctctgtacaatggaaaggatatggatgatgctgtgatgaagactgcaataggtgtcttgggagatctggcagacacattgggtgtccatgctggccctttgatcaatcaatccacctcaacccaggcatttttagaggaatgcttggcatcagatgatcctttggtgaaagaatctgccgattgggcgaggatagcaatcagccgtgcagtttcgggttgatgccagagtcttgagtctgcacttgcattcatctacatatcatcatgcctgggtctttgattgcatcatgtccagacatgctcttgggagaaatccaacatttttacagcagagtctgagggtcctcactaactcatgcatcactacatgtgtcaacccgcccttcttgcttctgcgagaaaagagggttcaagctggccgtctgctaactttttctaaaggcatctgcaaccttcatttcttattggaggtgagatgtgagcttctattgtcgcatgacatgctgaccagtttccttggcatgtcaagcgtatgatctgtggcctatcatttccccttgcattcatctcatgcattgaacattggtcggatggtcacttgggacaacaggtccagttgcttgctgctgctccagtaagcaagagcgggctcaaacgcattgtcacaggattatttttgtatcgatcagggtggccaagtccatgctgatagtaggatgttaatttcctagcattcttttcctttcatccacttgcattgtctttgcatttcattcttggtcggattgttttgtaagagttattttagggcaaaactttgtcctgtctggtctgctaccgcacgctatttgtaagtcaagttcatgcgtgcattggtttatttacgggtgctattggagcagcgggtgtttgtgcttttttccatcttgtttttggtaatatacatacatgctgctccatttcggattatcaggagctgggcgggtgaagagacagttttataggtctttggagttgtttttgccggggcagaggcagttgagttggctgtgatatcttttgtgatttatgaagaaacaaagtgaattgagaataatatggtgaaatgtaaatggtcttcatttcacgcttgg

SEQ ID NO: 2737 - DNA, 364 bp, Zea Mays
cccaagtcaggcctcagcttcacctagtccttgggatggcgtgcatggacttgccgggcgcaacaggtgtgcggagcgttcggaatttcttgccgacgtgctcagatcaccgcaaagccgctcctcaacatcgacggcctcactgatgccctgaaccgagaagccaggttacgaggaatttgaagcccaactttgggaagcacttggagttacaccaaaacggtcaagaacaggtaccgccaagaggaggatcaccatgaagatgagtccggagaggtctaggtcatcgtttcctagtcaacaatggttgtggaggatcgttgtcgtcatatggtgtattttatttagctattttgtatataaa

SEQ ID NO: 2738 - DNA, 1981 bp, Zea Mays
ataataatggcatgcactctcttacacaacttaattttgcaaaagatggctagagacccacttgagtgtgaggaaacaactattagtgagccatcatttgaagttatggaaggagaaattagtgagccaaaatttatcacagctgtatcaacgtctaacaagtggactggttttcgtaatattcttgctcaagggatgtacaatagctatagagcttctaggtctaaccaaggatgaatcaagccgtgagctcaacttcaacgcgtggaagaggaaaaagtgaaagggtgtggacttattttgaggatgaagcattgttgaaggcactctttgagctatcccttgatccaaagtggaaaagtgagggtagtttcaagaatggttatctttctgtcctcaaagctacacttgctgaaaaaattccaggttgtggcctcactgcagttccacatattgagtctagggtcagacactttagaacaaagtatggtgcaattgaggttatgctagcaaatagtgggttttcttgggatgagaacaggaagatggtacaatgtgagaagcaacaatatgaggaccattgtaagagacatcctgatgcaaagggcttatatggcatttcattcccacaccttgataccttagccgctatatatgggaaggacattgcgacaggaaaaggtgctgaaggtcttggtgatgctatttcaaacttggagaaagaaataactttggaagagagtcatgatcgagaagtggaagaagatagtatgtctagagaaacaccacgatgggcttcagataggaacttacttgattctacttcatcaacctctaagagaaggaagcgagacaaaggaaatgaagttcgcaagtcaagtgacccatttttggatatgttaggtgaatttcgtgatgatcttaagaacgcttcaaatcactttggaaaaatgactgaaatcatggagcgtgaagctaagctccaagaggaggctgcacataaggatccaatgcaagtcctacaacaaaaatctataactgagctgactaggttgggatttaccagtactgagcttgtcaaggcagcgagtgtgtttgtgaatgtgccaaaccagatgaccatgctttttgcacttccagagactctaaggagagggttcatactgaacatgctcgccaatgaggctcaaaagaattgagtgctgaagagatgatcagttctgataagctaatgttcatctgtgaagcatttgaagttggaacaattttacagcatggataatggtctgaaatttctggaatacaaaattttggaagtattttcttagcatattcaagtttgtgcagatttctggatgtgcaagttccataaatttttggaagtattttcttaacttcatgttcttcattagacatggtgatgcagcatggataatggtctgaaatatggaagtatttctgttatttttgttgcatgtattgtttactgctagacgtcagcatggtgcaattttcacatatcaggctgcagcatttccagatcgctagtaggtattctggccgacagccaacagtgttaccaaacgctgtaaagggagctaatcacgttttccacattaaccaaacaaaataaggcaacggttacaatgtactatcagatagcggtggtaacccactccattcctattaccatttcaggtactgaaccaaacagcaccttaattaaagcagctaattttgcaatgtatattgtagtagatggtgatgttttatgctggtgaatcaccggattgtaattgttgctgattgaaacagtaccaggcttcagattcccggcctcgttagtcttaaacacgccttacccatgagtacttttttgacataagctgtcctacttctgtaggttgagtttcttttacagagctttacaattgtcatatattgaaatctgttacttctcagttctgtccgtgctaatcaa

SEQ ID NO: 2739 - DNA, 2307 bp, Zea Mays
tgcctttccccactcgtatgtgctgctggtgtgctcgacgccagtataaatttggtgtacccggcggcataagctgcagcaacgcaaacgcaagcagctgctagcataggttacaacatacaagtgcagcacgcgagtgcagacagctagagaaagtccaagatgcctgctggaagaagcgcgccggcaaggggtgcagcagtggcagcaatgctgctgctgactatgcttgcacggctaccatgcctagaagcccaaagctcgcgccgacctactgtcctcactgtagacatgacaggcaagggagattacagaaccatacaggaggcgatcgacgccattcctgccgccgcaaacaactcgaccagcgcggccatcgtcacgatcaacgtcaaccctgggatatacacggagaaggtcgttgtcaacaaggctggagtctctctagtcgggaggagcgccacctcaaccatagttacctggagtggaccctggaaccagaaccaccagtctgagtttgctctctacgtacaggcaaccgactttgtcgccaagggcttaacatttcaggtgttattaaatcataatatactagttcgacaataataaaatatagcctaattaaaatagtcttgagaggaataactaacaacagtcaacacccaagaacctgagatcgagtgaaacgtcctttctgcctatataaatagttccatgttaagagaatgcagtgtattccacatccatgactcggagtgctaatggattacgatccaaatgttttttcataatttaatagagtcttaagtttaaaaataaatagaaatagagcacaataatattctggtctgatttttaaattttataatgtaaaatttacaacatattttcacatctacatgtatgtgtgcatgcagaacacgttagggagtaaggataatggcccggcggtggctgctaaagttgacgccgacaaggcggcgttctatgactgtagattcctatcgtatcaggacaccttgctggatgcaacagggcgccactactatcgtgggtgctacatagaaggcgccactgattttatattcggcacaggaaaagccttttttgagagatgggtagttcgtgtcaaaatttaggggttgcttcatattatttcataataacttaggtggataattaatttggatggatatttacataatggtaatgatggtaattcaactcaggattttgtagtttatattaaacattttttgataatgtgagaggtgagcattttagaataaagaatatgtataatcactaccggaatcgcgttcttttacactcggcaaaggctttgccgagtgtaacactcggcaaagaatactcggcaaagaacactcggcaaagatttcatcggcaaagggttctttgccgagactttgccgagtgtcaaaaagcactcggcaaagaaaaacactcggcaaattaagaatcgaaaaaattaaaaaaaacagcaaaacattttttaaattctaggaacaactctccaaccctaccctatattaccttactcgttgccctatcattcttcactattattttgaatcaaacttatatgttttgtaaatggtgagattcgaacttgcaacctctctctcgcgcatactctcctataccaccacactagtacaccaattatgtttatattacgtttccattccccatgtactataacaaatcgagagtaatttgattatttaaggcactaaatgagttcatttgaaaatgtgaccaactataaagttgcataactttttgagatgtaaaagttttattttaatagtttctacatccgagaccgtatataaaatttgaattttaaatttaaaaacttcacaccaaattttcaatgataagatgatttcaaatcaaaaaattgtcaactacaaagtttcattacatttcaagaactacaacttttattttggtggtttttccatccgagacagtttaaaaaattcaaatttcaaaattcaaacataattttgcataacaagatgatttcaaactaaaacattgtcaactacaaagtttcataactcttcaatacctacaactttcatgttggtggtttttcctttcgaagtcgttttcaaaattcaaattttaaattttttaaattcagacgtagttttcgttgacaatatgactacaaatgaaaaagttgtcaactataaacttctataacttctcaagatctacaaagtttatttgggttgtttggtaatttgtttatctcacatgatggttcgagcaatg

SEQ ID NO: 2740 - DNA, 3853 bp, Zea Mays
ccaaaccctagcacctcagcgcgcctcctacagcagccgcagccgtgtccagccgccgggagcgcccgcgcgccagggccacgcccagggcaagtcttcttctccagactccaaccgtccgagttcccttgcccacgtcgccccaaaacaggaattggcactcccgttgcctcgtccctcgcgtccagctccgctagaaccacccacaaccgcgcctcgcccagctccggccacccgcgctgcgcatcaccatgcagggagccgtgccgcgctgctcctcgtcgtgccgcgctgcatcctcgtggctgccttggctgggcaagcatgcccctgcagccccatccccgcgctcctcctcagcgcgcagcgcggcagccccggccgtgtcctggcctcccttgccgagttgtgttgtcgttgtagccttttcatcttctctccctgcaagcctgagcgcgccactgcgctggccgacgattcgcccagcaccggcgagcaccccagcggccacgcctcgtctcgttcctccctgctccctgcaacgcagaccgcgtggagcactggagcccccacgcgtgcgtgttattcttgcccagccggccatctctccaagcgccgtgaacagaggagagaggaaaacaaccgctcgtgcgaggtgttgaggaagatggaaccaagtgtctctttggtctgcaagaccttctgtggccatgtactgtatagtcctctgcgtggccccggcgcaacagcaatcttgccgttctcatgcctcgccgttgactagtctggtcgtccgctgtcgttgcgaggtgagcatcgtctacacgttggtaaccttgtttcactatgtcgcgcattttaaatagttaattatatttttgtttaactaacgttagtcatttagacttttcaattaaactaatttatagtagttaacttacgctttataaatccatgtcgacgtaattaacagtaactcaaatgtgttgccctaatatttgtttaatataaatgtgacgactatttagtttcatcgtgtttcgcgcgcgttgttcgcgtatgtcacgcgtgctgttcatgtgtcgtcgttcacgcgagtcgttattcacgtgctttaataaaatcatttcgccatagagctcatgttaaataattagttaattgtttagttgttggttattaaaataacaattccatcgagtctgatttataattctaatcatgcattagtagatacgattagtattaaatcaattgttttgctctaatgtttgtttaatataaatgcgacgtctacgtagtttttctcgcgtatcgcgtacggtttcccacatggttacgtgttgattcgtgcgtcattcgcgcgtgctgttcgcacgcgttgtcgcgtgccgttcacacgcattgtcacgcgcctttcgcgtgtgtcgctcgtctcgccacgcgttgctcacgcgtatctcgtgtgtcgatcacgtgggtcgcgcggcgtctgcgcgtgataataaattgtttttcgcttataaacactcatattaataaggttaattcgtcaagtcatatatgttagataattaacttaaggctcactcgattaatatttattagattaatattctaattagattaaatgtgtagtgttcaacttgggcttttataataaatattaacatggataatattaatttaactactttctatttatttaacattcgtttagtataaacatgtcacctgttcagttattctcgtctgtcacgggtgctgttccacgcacggtggcatgctgcttcacgcgtcgtgcacatgctgtctgcgcgttgttcgtgcgtgatgtgcccgtggtcgcgtgctgattcgtgcgcgttcgcgctcgtcgcgcgcgttttttcgtgtgtcgtcagcgtgctatgtcgcgcatgtccgcgcgtcgtttgcacgctgtcgtgctgtttcacgcgtcataaattcgtctcgcttagaatctcccattttaattaaattacttaattaattgacattgttggtgtagcacattaatcgaactaactgatgtataatatttatatttgacaatgtcgaattagatattatgattaatactcgtttagtgtgaacgcgataacctctcgaccgtagcctcgaccgtcgcgtttctttgtcctcgtgtgaccgtagtaacacactctattttattttgtgtattttattatgttttacttgaatggagtaatgttcttatgcatatatatggttgtttgtttgtgcctgtttgtattcgttgtgcgccgcgaataaactgcgatccatttctgagcttcgatgaatcgacggtcaagcttgggcgaccaaatgacccagttcttcgagttctacaaaattgaagaccctgagcatctgtttggtgaaggcaagtgtcctctgacctattatgtcccatttactttataattcatcaacccgcataccatgatcaacctaaggattgactagttttgtatttaccttgtccttgattaccttttgggttattatggttagcttcatgctattgctttaccttaatcaatgaacatgatgtgaacatttatgatacgatgttgtctctatgattatgatgttggactggtgatactttagggggctcaagcggtttctcgagtgcctctccgtaaggacctgttcgttggatgaccgcccgggaaaacagtgcaaccatgagggtggaatgggatgccctttagctgaataattagaggaactggggtgtagttcgcttagccgtcgtgccgtcaatggggctcggtgtatgcggctcgctccgccaagtttggttcaccccttggggaggagtgcggtacatttaggaaacctaacgggaggctacagccccggggaatctttgtaaaggcttcgttgtgaatccctggccattcacctcggtagtgaataagggtcttgcaagcccgggctagagaggaaatcacgacttgtgggtaaagtgcgcaacctctgcagagtgttatgaaactgatatatcagccgtgctcgcggttatgagcggccaagggagctccagtgattagtgatacttgatcagagatgttcggattgcaggtggcaatgagactgatggttctcggttttaactctggtaatggtaagtggtactcttttcgtttggaaaggagtacgtttgggttaataacgtgggttaactctaaaacttggctttctctacaagtaataataatctgaccaactaaaagcaactgcttgacttaccctccacataaagctagtccactacagccaaacaggacacttgctgagtatgttgatgtgtactcacccttgctctacacaccaacccccctttccacaatttgtcagcattgcaaccactccttaggagaagatgaagccgtgggaaggagacttccaggagttccaagactacgacgagttctaggtgtgggttagcggcaacccccagtcggctgcctgtgaaggccgcatttatctacgtttcattttcgcactttgattattgtaaagactatgttgatgtctcaaacatatgatgtaatcggactattatttccctttttaatattatttgagcattgtgtgatgatgtccatgttatgtaactgctgtgtacgtgaattgctgatcctggcacgtacactgttcgcattcggtttgccttctaaaaccgggtgtgacagtcatccactagctttcctagttaatcagccaaggacatcccatactacccttgtggtagcactattttcccgggtggtcgctccatgttcccattaacataatgatcttatcatgaagagta

SEQ ID NO: 2741 - DNA, 857 bp, Zea Mays
cttcgatcgacgtatgcttatgtttgggaccaagtggcagctccttttgccagagctaagagggcatatatggagtatgtgaacgagcttgacacgctctcggcctctacctaagtactcaacaattatatcttatcattatgaaatttgtttcattaaacttaacattgatttcttcatttatttcaggtcacatggcaaccatacaacgcacctgagttggatgggatgatctttagctcagtatgaaacatcgacgaggaaatcaataggatgcaatgtcctatgatatgtttctagtgtgttgagtggcacctaccgcacagggttgagaagcagtttggtaggaaccagatatggctagttgaagatattccaacttctagagagctgcacaaggtcttctaggggcaaaggtgtgggaaatgagagacgaaaggatggagggaagttacctccaatgtgtttcgaaggccctcttggtccagattttttttgaagaggcaattttttgaagaggtggtttttaactttccacttaggtcttacgataacaggagagaagattggccgaagtgcatgcatggtgaggattgcttggtgcagatgttcgtcgaggggggattgatggaggccggtgggtctttagatgttcttatgcacatgtaaatattaattctaatcctttgttctatatgattttgttgttgagtgaaactaactataagcatttatacaacattcattggtcaaggagaattatgggttcactcgttgggtagatcctcgtccaattttttcgcatgcagaatacatatcctacctacagaataggatatttgatctagagagggaag

SEQ ID NO: 2742 - DNA, 1214 bp, Zea Mays
tctacttgaatgatattagtgacaagattcatttgcagcaaaagttgcacgatggaccacgataactattattatcggtttctctgattcaattaagtgggaacccttggtagtgattcaattaagtgagaagtgagaaccctcattgtgctattttttgtttcaggtgatcattcctttcacaaagtatccttacacatcatagttatcaactctgtaagttgaggtttttaggatggtgttacattcctgaaattgtttgaatcctttatgggatttcttcatccttaatcacttgcagatattctttagtgataaaaccattagcttagagtatggaagagttgtgtccaacaaggtttatgacggatagtcttcgctgttatgttgcgtactcgatgcgttgcctttctcctaccattctttggtacataactaacgcattatgcttaaacgtggagtcaatatcttataaattctttttctatcactactcattgttttggttcctatttggcataaattgtctgaataccttataaatgtgttgtcctatattttttgttctagacattgtttggttcccctgcttccagaatttatatgacttgtgaattttaaataaagaaaagaaaggaaaattatgaatcctggattaccgattcatgccataacattgacttttgtgtagggttgttatctgtctttagccgaagaaacaatcctgagaaagaatggagagctccttggctaggagtaatgtttctaagtggaattacctagtttatgcgagaagcacattaatggattccactggtcctctgttagctggtaggagaagtagcaaacatggctcaagtgagatgggggactgcatattcagctcaatgagacattttcttcagttggtgaatcaattactaggagaatttgttagatattaagattaatagtaatatgtattaattcgtttttatataattgttgtgcaccaacattttatttgaaagagagaaataaatcctagcaaaattgactatgggagaagggatataggaacggaaatggaatatgggagagggaacaaactcatcggcctatgcgccttgattagaatgtctcctaaaagttttagttattgaaaatatgacaggacatttattgtaatatgtttattttctgaaatactaattttgatgtatagaatattgaca

SEQ ID NO: 2743 - DNA, 1215 bp, Zea Mays
caaattcaacagggctctctacatatgattcatttgcagcaaaagttgcacgatggaccacgataactattattatcggtttctctgattcaattaagtgggaacccttggtagtgattcaattaagtgagaagtgagaaccctcattgtgctattttttgtttcaggtgatcattcctttcacaaagtatccttacacatcatagttatcaactctgtaagttgaggtttttaggatggtgttacattcctgaaattgtttgaatcctttatgggatttcttcatccttaatcacttgcagatattctttagtgataaaaccattagcttagagtatggaagagttgtgtccaacaaggtttatgacggatagtcttcgctgttatgttgcgtactcgatgcgttgcctttctcctaccattctttggtacataactaacgcattatgcttaaacgtggagtcaatatcttataaattctttttctatcactactcattgttttggttcctatttggcataaattgtctgaataccttataaatgtgttgtcctatattttttgttctagacattgtttggttcccctgcttccagaatttatatgacttgtgaattttaaataaagaaaagaaaggaaaattatgaatcctggattaccgattcatgccataacattgacttttgtgtagggttgttatctgtctttagccgaagaaacaatcctgagaaagaatggagagctccttggctaggagtaatgtttctaagtggaattacctagtttatgcgagaagcacattaatggattccactggtcctctgttagctggtaggagaagtagcaaacatggctcaagtgagatgggggactgcatattcagctcaatgagacattttcttcagttggtgaatcaattactaggagaatttgttagatattaagattaatagtaatatgtattaattcgtttttatataattgttgtgcaccaacattttatttgaaagagagaaataaatcctagcaaaattgactatgggagaagggatataggaacggaaatggaatatgggagagggaacaaactcatcggcctatgcgccttgattagaatgtctcctaaaagttttagttattgaaaatatgacaggacatttattgtaatatgtttattttctgaaatactaattttgatgtatagaatattgaca

SEQ ID NO: 2744 - DNA, 2223 bp, Zea Mays
cacatctcaacggcttggattttttctcgatgcgttcaggaacattctagaacaccacagcccacccgctgacgcgctctttgctccctataaaatgtcacttccccgcattcgtcccactccctctcgaaaccctagtcctctgttacttctcccgccgccgccaatcccctcccgttctccatcatcgccaacgaccagggtaaccgcaccacaccctcgtacgtcgccttcaccgactccgagcgcctcatcggagatgcggccaagaaccaggtcgccatgaaccccatcaacaccgtctttgatgccaagcgtctcattggcaggaggtttagtgatgcctctgtccagagtgatattaagctgtggcccttcaaggtcattcctgggcccggtgagaagccaatgatagttgttcagcacaagggggaggagaaacagtttgcagccgaagagatctcctccatggttctcatcaagatgcgtgagatcgctgaagcttaccttggcagcacgatcaagaatgctgttgtcacggtccctgcctacttcaacgactcacagaggcaggccacgaaggatgctggggtgattgctggcctcaatgtgctgcgtatcatcaatgagccaaccgctgctgctattgcctatggtcttgacaagaaggcaaccagcgtcggtgagaagaatgtcctcatctttgaccttggaggtggtaccttcgatgtctccctccttactattgaggaaggtatctttgaggtcaaggccacagctggcgacacccatcttgggggtgaggactttgacaacaggatggtcaaccactttgtccaggagttcaagaggaagaacaagaaggatatcactggcaacccgagggctctccggaggctgaggacctcttgtgagagggccaagagaactctgtcttccactgcccagaccaccattgagattgactcgctgtacgagggcattgacttctactccaccatcacccgtgccagggtgcagcagctgctccaggacttcttcaacggcaaggagctgtgcaagaacatcaatcctgatgaggccgttgcctatggtgctgctgtccaggctgctatcctcagtggtgagggcaacgagaaggtgcaggacctgcttctgcttgacgtcactcctctctctctgggtctggagactgccggaggagtgatgaccgtccttatcccgaggaacaccaccatccccaccaagaaggagcaggtgttctccacctactcggacaaccagcctggtgtgttgatccaggtgtacgagggcgagaggacccggacccgcgacaacaacctgcttgggaagttcgagctctccggcatcccaccggctccccgtggtgtcccccagatcacggtctgcttcgacatcgacgccaacggcatcctgaacgtgtctgccgaggacaagacgacggggcagaagaacaagattaccatcaccaacgacaagggccgtctgtccaaggaggagatcgagaagatggtgcaggacgcggagaagtacaagtccgaggacgaggagcacaagaagaaggtggagtccaagaactcgctggagaactacgcctacaacatgcgcaacacgatcaaggacgagaagatcgcgtccaagctggctgccgacgacaagaagaagatcgaggacgccatcgacgcggccatcagctggctggacgccaaccagctcgccgaggcggacgagttcgatgacaagatgaaggagctggagagcctttgcaaccccatcatcgccaagatgtaccagggcgcgggtgccgacatgggaggctccggcggcatggacgaggacgctccggctggaagcggtggccctggccccaagatcgaggaggtggactaagcggtttgtgtcagtctcgtgtgtctgctgcagtggctggctggcccagtcgctgctcgatttatcgtcgtcgtcgcggtgtatccgcgttagaaccttttgttggtgaacaatattatcgtggcacgcgttttaagtaatacggtattctggttcggtttcgtattgctgtttcttttctgctttatttctattcttgtcttgtttcgcgtgcttagccgtcttattaaccgaaggctgaagcaaaatacggagtagaataaacaatgggtggggcaagaaattagtccgttaatgatttcgtaacgttcg

SEQ ID NO: 2745 - DNA, 2273 bp, Zea Mays
cacatctcaacggcttggattttttctcgatgcgttcaggaacattctagaacaccacagcccacccgctgacgcgctctttgctccctataaaatgtcacttccccgcattcgtcccactccctctcgaaaccctagtcctctgttacttctcccgccgccgccaatcccctcccgttctccgccaccgccaatcccctcccgtcctccgccacctctgctgagagcgagaagagatggccggcaagggtgatgggccggcaatcggcatcgatctcggcacgacctactcttgcgtcggtgtgtggcagcacgaccgtgtcgagatcatcgccaacgaccagggtaaccgcaccacaccctcgtacgtcgccttcaccgactccgagcgcctcatcggagatgcggccaagaaccaggtcgccatgaaccccatcaacaccgtctttgatgccaagcgtctcattggcaggaggtttagtgatgcctctgtccagagtgatattaagctgtggcccttcaaggtcattcctgggcccggtgagaagccaatgatagttgttcagcacaagggggaggagaaacagtttgcagccgaagagatctcctccatggttctcatcaagatgcgtgagatcgctgaagcttaccttggcagcacgatcaagaatgctgttgtcacggtccctgcctacttcaacgactcacagaggcaggccacgaaggatgctggggtgattgctggcctcaatgtgctgcgtatcatcaatgagccaaccgctgctgctattgcctatggtcttgacaagaaggcaaccagcgtcggtgagaagaatgtcctcatctttgaccttggaggtggtaccttcgatgtctccctccttactattgaggaaggtatctttgaggtcaaggccacagctggcgacacccatcttgggggtgaggactttgacaacaggatggtcaaccactttgtccaggagttcaagaggaagaacaagaaggataagagcagcgtccatgatgttgtccttgttggtggctccactaggatccccagggtgcagcagctgctccaggacttcttcaacggcaaggagctgtgcaagaacatcaatcctgatgaggccgttgcctatggtgctgctgtccaggctgctatcctcagtggtgagggcaacgagaaggtgcaggacctgcttctgcttgacgtcactcctctctctctgggtctggagactgccggaggagtgatgaccgtccttatcccgaggaacaccaccatccccaccaagaaggagcaggtgttctccacctactcggacaaccagcctggtgtgttgatccaggtgtacgagggcgagaggacccggacccgcgacaacaacctgcttgggaagttcgagctctccggcatcccaccggctccccgtggtgtcccccagatcacggtctgcttcgacatcgacgccaacggcatcctgaacgtgtctgccgaggacaagacgacggggcagaagaacaagattaccatcaccaacgacaagggccgtctgtccaaggaggagatcgagaagatggtgcaggacgcggagaagtacaagtccgaggacgaggagcacaagaagaaggtggagtccaagaactcgctggagaactacgcctacaacatgcgcaacacgatcaaggacgagaagatcgcgtccaagctggctgccgacgacaagaagaagatcgaggacgccatcgacgcggccatcagctggctggacgccaaccagctcgccgaggcggacgagttcgatgacaagatgaaggagctggagagcctttgcaaccccatcatcgccaagatgtaccagggcgcgggtgccgacatgggaggctccggcggcatggacgaggacgctccggctggaagcggtggccctggccccaagatcgaggaggtggactaagcggtttgtgtcagtctcgtgtgtctgctgcagtggctggctggcccagtcgctgctcgatttatcgtcgtcgtcgcggtgtatccgcgttagaaccttttgttggtgaacaatattatcgtggcacgcgttttaagtaatacggtattctggttcggtttcgtattgctgtttcttttctgctttatttctattcttgtcttgtttcgcgtgcttagccgtcttattaaccgaaggctgaagcaaaatacggagtagaataaacaatgggtggggcaagaaattagtccgttaatgatttcgtaacgttcg

SEQ ID NO: 2746 - DNA, 876 bp, Zea Mays
atccactcgagtatgtcgtgaccacaaaaacgaagaacgtcgagcaggtcgctgagtaagaaccgaagccgccattgttggttcgttcgtacaccatcgatggggtctcaatgtcgggtcatggggcttaactagatcgcgaggaaggtgattatggcctcgcctggtggaaattcatagtggagcaccagagattgctcgtcggaattctttctccatcgtggagccgatggcctccatggcaacattgctcccaccactatatctgggcttggattgaatgaagaggttccacccaacatggattcgaagacaaagttcagtgatgtcaagggagttgacgaagctaaagctgaacttgaggaaattgttcactacctacgagatcctaaggccgcacttgaagaaatcttatatcagtttgaggaaaaactccaagttgaaagagaggaagctgctaggaagcaggaagagttgcaagcacaactacaagctcaacaggtcgcacttgaagaaaaccaaagtttgctgcgccaggcccaagtggaagtgaaggggatgcataccaagtttgaagagaccaatgcactgctacgagttgtcctgaaacttcagaaagattgaggtagggatgcataccaagtctgaggatgatgcctttgcttaaggtttttctaccttgctagaacatatctatggttagaactttgtcagaactacgtgcaatctgtttgaatgcttcaaacctttgtggtggaacctttgtatgtttgaacctcttttgtggaagaactattgtgatggaattgtgtatgacttgtgatgagaatgttgtgtatgatggcttttctgtgtattatgattctgtgagctatc

SEQ ID NO: 2747 - DNA, 1625 bp, Zea Mays
ctcgcgtccgatcgatccccatccccttccattgcgtgctggagccctcctccgcgcgctttctctggtgacgccgtccatgtctcctcctctcttcctgcacactgattgagtcagggtcactgaaagtagcggaagagcccaagtagttcttcgccaccggtaccgcatcgatcatcatggtgttctcctcgctcccgatcttcctagaccctcccaattggggccagatgcagatgcagatgcagcagcagtcaccgctccagtgtctcctcggcagcggcggtggcagcgaccaccaccacctcatgcctcctccgtccggcctggcgccgctgccggggggtcctgctgacacagcggcgagcggtccggcgggaggcggctcgtccacctcggcctcagtgcaagccgcggcgggagcgggggcaggggcgcagcctcgccccgtggtgtcgatggcggagcgcgcccggctcgcgcgcgtgccgctgccggagcccggcacgctccgatgcccgcgctgtgactcgaccaacaccaagttctgctacttcaataactactcgctgtcgcagccgcgccacttctgcaaggcgtgccgccgctactggacccgtggcggcgcgctccgcaacgtgcccgtcggcggcgggtgcaggcgcaacaccaagcgctccagcaagaagtcgtcccgcggcggcggcgcgggcgccacggcggcaacctcctcgtcctcgaccacctccacctccaccacggccactaccaccaccaccacgagcgcggccatggcggcggccgaggccatcgccggcatgcaggcgcagctgccccacctcggcctcccgcccgcagcggccgccgcggcgcttgaggcctcgctggagggctaccaccactacctcccgctccagatgcagccgcagttcctgcagcaggctggcctgcacggctaccatttcgccgacgacggcaccggcgtcctcgcagctgacgggttcccgaggggcgtcgtcgcctcggggctgctcgcgcagctcgcggcggtgaagatggaggagcacggcagcaacggcggaggtgccatcgcggcgcatcatgagcagcagtcctactggcccggcagcaccggcggtggcggtgggtggccggtggagttcttgtcggggttcagctcatcctcgtcggggaatgtgttgtgagttgcatgtggccgcgtccaggtccacctgggcatgcatgatggggggcatgcatgcatggatgctgatgaagctgaactagctcaccatcctcaattagttctagggtttatgtggtgtttggaacttaattggcgtcgtcttcttcaattaggctggtgatgatcttgtgttggggtaaggtttttacatgttttttttcttatgagttttaagctggttaatgtcgtgcagttggtagttttgcatgtagtgggaagtgcatgtgttgactcatggaggttatatgtgtcaggttacttaactatactatgtttaattatatgagaacttggtgggcatagttgtactagtacaacccgtttctaaattgcagatgtgtgtttggatgttttattgttgatcgaaatgttggaaaag

SEQ ID NO: 2748 - DNA, 1837 bp, Zea Mays
ctcgcgtccgatcgatccccatccccttccattgcgtgctggagccctcctccgcgcgctttctctggtgacgccgtccatgtctcctcctctcttcctgcacactgattgaggtcttcattcttctctctctcttcacccatgacacatccatccagccacccccactagctctctagctagccatcctcctcatcaccctctccgcctctgtctcttgctgtcttgcggcactgttcttagctgcaggtagctccgtccagctcgacggttctctcttagcagctaaggaaggcgacataaattataaaaggcgccacttgagggcagggccaaggaaagttgtggtttccaactcctcacctcacacactctcttcttctctccttcgttctccctcgcaaagtcagggtcactgaaagtagcggaagagcccaagtagttcttcgccaccggtaccgcatcgatcatcatggtgttctcctcgctcccgatcttcctagaccctcccaattggggccagatgcagatgcagatgcagcagcagtcaccgctccagtgtctcctcggcagcggcggtggcagcgaccaccaccacctcatgcctcctccgtccggcctggcgccgctgccggggggtcctgctgacacagcggcgagcggtccggcgggaggcggctcgtccacctcggcctcagtgcaagccgcggcgggagcgggggcaggggcgcagcctcgccccgtggtgtcgatggcggagcgcgcccggctcgcgcgcgtgccgctgccggagcccggcacgctccgatgcccgcgctgtgactcgaccaacaccaagttctgctacttcaataactactcgctgtcgcagccgcgccacttctgcaaggcgtgccgccgctactggacccgtggcggcgcgctccgcaacgtgcccgtcggcggcgggtgcaggcgcaacaccaagcgctccagcaagaagtcgtcccgcggcggcggcgcgggcgccacggcggcaacctcctcgtcctcgaccacctccacctccaccacggccactaccaccaccaccacgagcgcggcgcttgaggcctcgctggagggctaccaccactacctcccgctccagatgcagccgcagttcctgcagcaggctggcctgcacggctaccatttcgccgacgacggcaccggcgtcctcgcagctgacgggttcccgaggggcgtcgtcgcctcggggctgctcgcgcagctcgcggcggtgaagatggaggagcacggcagcaacggcggaggtgccatcgcggcgcatcatgagcagcagtcctactggcccggcagcaccggcggtggcggtgggtggccggtggagttcttgtcggggttcagctcatcctcgtcggggaatgtgttgtgagttgcatgtggccgcgtccaggtccacctgggcatgcatgatggggggcatgcatgcatggatgctgatgaagctgaactagctcaccatcctcaattagttctagggtttatgtggtgtttggaacttaattggcgtcgtcttcttcaattaggctggtgatgatcttgtgttggggtaaggtttttacatgttttttttcttatgagttttaagctggttaatgtcgtgcagttggtagttttgcatgtagtgggaagtgcatgtgttgactcatggaggttatatgtgtcaggttacttaactatactatgtttaattatatgagaacttggtgggcatagttgtactagtacaacccgtttctaaattgcagatgtgtgtttggatgttttattgttgatcgaaatgttggaaaag

SEQ ID NO: 2749 - DNA, 2074 bp, Zea Mays
ctcgcgtccgatcgatccccatccccttccattgcgtgctggagccctcctccgcgcgctttctctggtgacgccgtccatgtctcctcctctcttcctgcacactgattgaggtcttcattcttctctctctcttcacccatgacacatccatccagccacccccactagctctctagctagccatcctcctcatcaccctctccgcctctgtctcttgctgtcttgcggcactgttcttagctgcaggtagctccgtccagctcgacggttctctcttagcagctaaggaaggcgacataaattataaaaggcgccacttgagggcagggccaaggaaagttgtggtttccaactcctcacctcacacactctcttcttctctccttcgttctccctcgcaaagtcagggtcactgaaagtagcggaagagcccaagtagttcttcgccaccggtaccgcatcgatcatcatggtgttctcctcgctcccgatcttcctagaccctcccaattggggccaggtaattggtttatccaatcatatactcttcgttccttacttttagtttcgtcatgcacaagcatgacgaactggtttctctctccgtttcctaattattattttagagtgaatccggcctttttccaatacgaacttcaaatctctggttgattgatcgctgtgattcgcaagtttgtttactacctatgctcatgccctggttgagcatagacacaaaggaagggcatcattatagatgcagatgcagatgcagcagcagtcaccgctccagtgtctcctcggcagcggcggtggcagcgaccaccaccacctcatgcctcctccgtccggcctggcgccgctgccggggggtcctgctgacacagcggcgagcggtccggcgggaggcggctcgtccacctcggcctcagtgcaagccgcggcgggagcgggggcaggggcgcagcctcgccccgtggtgtcgatggcggagcgcgcccggctcgcgcgcgtgccgctgccggagcccggcacgctccgatgcccgcgctgtgactcgaccaacaccaagttctgctacttcaataactactcgctgtcgcagccgcgccacttctgcaaggcgtgccgccgctactggacccgtggcggcgcgctccgcaacgtgcccgtcggcggcgggtgcaggcgcaacaccaagcgctccagcaagaagtcgtcccgcggcggcggcgcgggcgccacggcggcaacctcctcgtcctcgaccacctccacctccaccacggccactaccaccaccaccacgagcgcggcgcttgaggcctcgctggagggctaccaccactacctcccgctccagatgcagccgcagttcctgcagcaggctggcctgcacggctaccatttcgccgacgacggcaccggcgtcctcgcagctgacgggttcccgaggggcgtcgtcgcctcggggctgctcgcgcagctcgcggcggtgaagatggaggagcacggcagcaacggcggaggtgccatcgcggcgcatcatgagcagcagtcctactggcccggcagcaccggcggtggcggtgggtggccggtggagttcttgtcggggttcagctcatcctcgtcggggaatgtgttgtgagttgcatgtggccgcgtccaggtccacctgggcatgcatgatggggggcatgcatgcatggatgctgatgaagctgaactagctcaccatcctcaattagttctagggtttatgtggtgtttggaacttaattggcgtcgtcttcttcaattaggctggtgatgatcttgtgttggggtaaggtttttacatgttttttttcttatgagttttaagctggttaatgtcgtgcagttggtagttttgcatgtagtgggaagtgcatgtgttgactcatggaggttatatgtgtcaggttacttaactatactatgtttaattatatgagaacttggtgggcatagttgtactagtacaacccgtttctaaattgcagatgtgtgtttggatgttttattgttgatcgaaatgttggaaaag

SEQ ID NO: 2750 - DNA, 633 bp, Zea Mays
tattactgatcaagtccgccgctaaaactcctcattttttatagtaccatagtgaaaaaaaatgtacatagctatatgacgtctggagcagcatacatagtagactgtacacatctcatcattctgtgctaccttacgttcccagaaactgatggagcgatgggagcttcagcacacaagcatggaagaagccaaaccggacggacagatcagcatcagtaccgatagaacgtcgccatgaaagaactctggttcagcatgaacttttttggtagtactatccccaaaagaagacctcttttgatagtattatggcgaagatagattcatcatcatcatgcaaccgtgggttaaagaagtcccgattgttcaaggatatcggcctctgtaacaccaggtccgaaggcatcaagttgacgttcgagctcgtccaacatctgctcatgggagctgataccctcttgttgccgaaccaggaatctgctcattcgctcaaggagctgcaccgcctttctcctccccctctccgtgccattcagggccaggtcccgtagcgggaccatgatgccgcactcctgcgcccgggctagatgcacggactgcacggacagatgcagcatcacagccgcagca

SEQ ID NO: 2751 - DNA, 605 bp, Zea Mays
ctagagaggttcagaagtgcagtcacagcacgttcctgggtctgcagattagatgacgacaggagactcaatattaagggaatggcaccagcctaggcaatgcagatacgattgtttgcattccgctttgccaggagccggagctccgcagcagctgatctctgttcctcaggatctgcggagcataacttggagagaagagcgtcgatgttagcacgttcgctcgaagagcacgaagatgtaggtttgtcaggctgcgtcgagcgcttcggtggatcgatcccgttggcctcgcaccactgtgcaataaggcttctaagaacatagtttggtgtcagtgttgtgtttggcatcctctgttgagtatttggacaagtctggtgcccagaagctagccatttctcgatgaatgcccgctcatatgtctggaaaaaaaacacaaaccaaaaaaaaagatcttatattatgaattgaagttcgcttgtacttgagcacggaaaatagaatcagatgtatgcacctggccagtagcaacaataacggggtctttcatcagctcaagagaaattggacaccggaactcatcagggatgtttctgggtctt

SEQ ID NO: 2752 - DNA, 3208 bp, Zea Mays
tagagcgcgcacctgagagggagagagaggaggagcgcattcctctctgcctcgcacagtttggtttgtttcgctaaggggaggagagagaaacaaagggagataacccatggaggggaggagctccaattcccttctccgcatgcgcgagcgatctctcgtctcttccccgctttgctggaacaatggctgagagcaagcggtttgatacgaagagcacaggttgtcttgaaggcctcttcaacttccttgccctcaaccaacggttgcaaatgccgaagacgattgcctatcgaaggcacagcgaaggaagtgacaatacactcagaatgaaagtcccaaagcccaaaacttgcagtgaaaaagatgaaaacatcccgttgcagaaggaaactagcagtgaccctcaaattgataaggccaacatgttcgtatggaggacactcatgttcaagagaaaaacactcgggaaagacaaaaagaagagcagctcaccggccagctccccatcctcatcacgtctgctgcgctccagatcaatccatcactcgaaatgctttgattatgaggttcctgatgagttagctgcacattatcatgcaatgaacaactcgggctccattgaaatgggttcttgtcacagtgaaccgacaccattgccacatgagtgtccacaacatcccactgtccaagagccttgcagggcttgtggcagcatggatggcaaaggtagcatagatatggaggcacccagtgagacagcacctgggaatctcactgatgagagtgaggctctcgctacacaaaaaactcgtgatgctgcaacacatccttcgaaggagttcttggattttcttgaattatttaatgcacatagggagctatttttgaagattcttcatgacccttcattactaggaacacctgaacaacaagggcaagaagcttcatccagtggttctgtaccattgaacaaattggaatcatttccaagaccaggagggtcatcagggaaacgtaaccctatatttgatcggagtgacagtgagaaaaacatgccagaaatccaaaggtcaccatcaagacctacctctgacccggaagctgcaaaggtcatcagtacaagaatgcctactggtgttgacagctccgcagtttctcttgcagaatcaaggagcctgaagaaagctggaacagcttcaaaccgttttaaagctatccgtagaaagataaaagatgtcgtaagggagaaccggaaagagcttgctcggattaccaaggatggggttttccacaaactgccatatggccaaaaaatgactgggttgaccaggagctcctccatggagaagtttgtccaggaggagaaacaaatccgaaggacatattctattgcagaatcagtagacaagtattcaacactttatgagtcaatctctagggactcaagaatttctctagaaagattaaacataacaatggaaggcggtgcaaacttaaatgataagaagacgccaacgagcctcaaaagaataacctctcttccagagatgcggttgtgttcatctcaactagaggtcctgcctgaagtttcagcttctcggattgggtccaagatttggaatgtggaatctgaccgcttttcttcacgtggaactgatgccttcagtatctgtgcggaaggaaattcctatcctgatgatgtcacggaaaaatcagaaaatattcacattgaattaaattgtggaggcttcttggaagaagatttccgcagcatccttcgaactccatcttctcttggccggtctttctcccaccgccgcattaatagtttaccttccttcgatcggtcattctttcaagaccgtactggtagtttcacggagtgttctatagcagattcagagccacagttcgaaaacttgcagcttgaggacgaggactggttagtcaagccaccactgtccgcaggagcatatgctgccaatttcaatgatgaagaatggctggtcacaccactgaagcgctcccgtgtcatgaatggtattgaccatgaggatgaagagtggttagttaaggcgacgaaactgtctggtgccaaggatgctgatcttgaagctgaagagtggttagtcaagtcagggcagcctaacgatgctttggattcggacttccgcttcatacacgaattttctgaacaaggtgctgcagaacccttgcacatctatgtcagtgacaagaacgaggctgatttccagtatgtcaaggacatcctcaagaaatcagggttcagctgcggcgatgtcgactggtacgcgtccaatcagccagtgagccctgtggtctttgacgaggcagaatgctcgtgtcaggaggtcagcatggcaagcgatgaacctcacagcatcgtcaggcgcatgctcctgtttgatctcatcaacgaggtcctgctggacatctatgactcctcactcgtcatcggcccatggcactcacgcttcgacctgcgaaccagacccattcccatggggtaccatgtccttgaggaggtgtgggcgaaggtgagctgctacctgagcctgcattggaaggaaggccagacggtggaggacattgtggcacatgaccttatgagaaaggacggctggatgaacctggtatatgacgcggagtgcaccgcgttggacatggaggatctgatggtggaggaccttcttgatgacgttgtcattcagatagtgttagaatccattgatgaatgactatccggagcctctttttttaaccagcggcttgagcttcgcagtaatctgttcataaggctgaacagtgaagtgatatccgaaggaatgtactagatagatggatcgcttgtctgtctcgcattgtgcaacagtaactgtgtagatcattttaaaagattggcgattctatgaattgtcaaatgtggcagatgttggccatgcatacaaagttggaaacagaaggtaaacaatagataagaaatagcgaaacagatagcattatatacctgttaaattcaaccaaactgtcgtgagtttttattagtcaatactggtatatctaggttgtgtctcccctacaaatcctggtgttttgtactctattcatgagtctgtggaaggcacaattctgagtgtgaaaaacactactctgttatatatgtgtgactacggccatcttttca

SEQ ID NO: 2753 - DNA, 720 bp, Zea Mays
tgcatggcatgttataaaatagaaaactaaaatctaaagtagatgtctcttgtaattttcaatcttgtttgttaaatttgtattaatttgatacaatcaatttaaatttatctttaaatattgtacttctagcgggaacagattccccgcggggttccccacggggataaattccccgacggggacggggatgggagaaaaagctcccccgtgagcgttcgcgggaacggggacggggaatttttgtccccgcggggacggggatgggaagccattccccgacgggaaaatccccgttgccatccctaaccatgggtggtacgaaaatagaaatgcaaaattaccatagtaagaagaccggcgaccttcatgaccagaatcataccttactctagttctgctgcgcatttcttctggcctttttcgtgactcagcagcaagaacaacagctatttcccgaccaaagaaaacttggcgattcatgtgatactgggcttcagaggcatcgtaaggatcaacaaactctacaaaggcaaatcctcgaggctccccagagtaatagtcctttggaatgtaaacatcccgaacagggccaaacctttcaaaaggaactcgaagatcctccgctcttacaaagtttgagaagaaaattaaagtcaactactcaagtatcataggagtattcggttctttatttaaaacagtatgtcataaaatgaa

SEQ ID NO: 2754 - DNA, 1808 bp, Zea Mays
agaaaactaaaatctaaagtagatgtctcttgtaattttcaatcttgtttgttaaatttgtattaatttgatacaatcaatttaaatttatctttaaatattgtacttctagcgggaacagattccccgcggggttccccacggggataaattccccgacggggacggggatgggagaaaaagctcccccgtgagcgttcgcgggaacggggacggggaatttttgtccccgcggggacggggatgggaagccattccccgacgggaaaatccccgttgccatccctaaccatgggtggtacgaaaatagaaatgcaaaattaccatagtaagaagaccggcgaccttcatgaccagaatcataccttactctagttctgctgcgcatttcttctggcctttttcgtgactcagcagcaagaacaacagctatttcccgaccaaagaaaacttggcgattcatgtgatactgggcttcagaggcatcgtaaggatcaacaaactctacaaaggcaaatcctcgaggctcccatcaaattcaaatattcactgtgccctctatggttctcagcgaagcacagtcaacaacttacaaacattccatcagaagagaagcaagtgttgcaaaaagcagtaagatgcccaggctctagtgtccaagtttcttgtatacaactacgtaaggtgatcctcataaagagtatcttcataaaaatcgttcgcttcaagttccccaacatttgaaaaagtcacaaaagtacttgaaattgacttgactctcttttatcttctcatgtaccagccagtatatatgtctctcatcttctcttcatgaaattaattttctcaaagtatcaaatcttgtcttcatagaagaacttcattggacaagactctatcttgccaagcaaatgaattgttagtaatgttaaaaggcattctttgagaaacaaagagtatgcttatacttcaaactaacacaaccctgggaatcattaagaaaatataatccacatagtgcaatgatgaattggctatgggaaagcagagtacaagttcatactccatcatgttgttagatatcaattgatggtgcaagtcgattgcaaaaaaaataacatgagactcatcagagcttaagcgcaccaaacacattgcaaattagacattgcactgaaactgaagtatgcactagtgttcactttgttaaatataggatgtcagttctataattcatgcctctagaaaattagtttgacgattatgaccaagaggttgataggctagggacaacaccaattgaagaaaagcttgttcaacatcggttgagattgtttggacatgtccaacatcggttgagatcaaggctattaaggcgtccctaaagtgacgcttaagaggtaaggcgggcttggactcataaggcatcctgtcaccttgcccgcgagagtaaggtgtgagtgtgaggaggctctgcggcgcgcatggctccgggaaatgcacggcggcagcgcgggggagaggaggaggagagctgcgagagagggagagataggagagtggctgaggctagcagcgcgaagggctccggtagaagtgcggcggcggcgcaggggagagggagagaggacagctgcgctggcagctgagagtggagagcggctgaggctggcggtaggtttatcataaaactagtgtgttgggctggacagctggttgtgggcttttttctttttctgttttcctatttctctcttctactatgtcgaaatgggcctaatagactttacaattgtgctagattgctt

SEQ ID NO: 2755 - DNA, 1043 bp, Zea Mays
gcggggttccccacggggataaattccccgacggggacggggatgggagaaaaagctcccccgtgagcgttcgcgggaacggggacggggaatttttgtccccgcggggacggggatgggaagccattccccgacgggaaaatccccgttgccatccctaaccatgggtggtacgaaaatagaaatgcaaaattaccatagtaagaagaccggcgaccttcatgaccagaatcataccttactctagttctgctgcgcatttcttctggcctttttcgtgactcagcagcaagaacaacagctatttcccgaccaaagaaaacttggcgattcatgtgatactgggcttcagaggcatcgtaaggatcaacaaactctacaaaggcaaatcctcgaggctccctgcatatgttagtttcattagacagtacggagaggaaaaattcaaggaagtgacaaacaaatgaagatgcaaagtgttcacaatggtgtcttgttggcgttttaccatcaaattcaaatattcactgtgccctctatggttctcagcgaagcacagtcaacaacttacaaacattccatcagaagagaagcaagtgttgcaaaaagcagtaagatgcccaggctctagtgtccaagtttcttgtatacaactacgtaaggtgatcctcataaagagtatcttcataaaaatcgttcgcttcaagttccccaacatttgaaaaagtcacaaaagtacttgaaattgacttgactctcttttatcttctcatgtaccagccagtatatatgtctctcatcttctcttcatgaaattaattttctcaaagtatcaaatcttgtcttcatagaagaacttcattggacaagactccagagtaatagtcctttggaatgtaaacatcccgaacagggccaaacctttcaaaaggaactcgaagatcctccgctcttacaaagtttgagaagaaaattaaagtcaactactcaagtatcataggagtattcggttctttatttaaaacagtatgtcataaaatgaa

SEQ ID NO: 2756 - DNA, 1524 bp, Zea Mays
  misc_feature (1524)..(1524): n is a, c, g, or t
ctcggctctggcgtcatcatcgccaaaccgcacctcccggctcgcctgccaaggacgatacgcgggtcccactgaactcaagtgaagaaacaagcggggccggaaccagggccagcatggagcgcgtaaagcacgagaacttttgccgtgccgtcgcagaggacaacacagcgctcctcctctcagcagtgggaaacttcaggaaggaggccctgtgccgcatccgcaagggctccgacgcctcgagggtgctggaccaggagatgtccgtcaggctactccacctcgcttgcaagcacgacgcagtagagtgcgcgacgctgctcctagagggcggcagcgggatcacggcggcccccattgatgcaagggaccagctcacgcggacgccgctgcacgtcgcagctgagacccactcggccaggtgcatagagctgctactctccaagaacgcccgtactgatctcagggtggttgacgggagaccacttctcccgcttgagatcgcgctaatgagcaggagagttcaaactaactggtccgtggacaacccaattgaggatcttctgtcttttcttaaacaaagggatctcaatgcagtaaggctcctggcagagaaaaccagagtggttggggagcttgcttacagatacgccatggaaggatgtgtccctgcattgacaatgctgcttctggtggttgaagagaagatatcgtcacaggttagtgtggttatagagggtgtcagaacgaagcgttcaatctacaactccattgtggacgaggctttatcaacgggagatacttcagctcgtgatggacatgaaaggagaaaggccctgctctgtgagattcagctgcttaaccaatttggatcggcatcatggagggaccacaatgacaagagaacactaccccctctactgagagctgctaaggttggagatatgaatgttataaagatgctcctgatgggtaatgttgatgtcaatgaagccgactctgaaggaaacacagcacttcactggtgccttagtggtgcttcatgtaccaaggaaccaaggattgtgtggcttctgctcaagaatggcgcaagagttttccaggggaacaaattagggctcacaccagtacacagcgctgcagctaagggcaattacaaagctcttcagtcacttctgcttcatgcccaagattgtgttgatatacctaccaagaccaaagaaacgccattattttttgcagtgaagaatggttctgtggattgtgcaaaacttcttttgcgtttcggggctgataccaaagcccggaacctgagaaagcaaagacctattgatgtggcaacatcccaggacatgcgtttcatccttagctctgcgaatgtgttactattttcagggaaccataactcacctcaaaagaatcgtgtgatgagaaaggaaatttacaaagagcttggtgatgaatttgacgattttgacaaggattcctgtgatgaaagctacactgggcttaagacatcan

SEQ ID NO: 2757 - DNA, 3026 bp, Zea Mays
  misc_feature (3026)..(3026): n is a, c, g, or t
atggcagcacgcaccacggaacgcgacgagacgaggcaatgtggacgggcgttgctggttaattggttggttggttggttggtttgggttctggactctggagtttccgtggcgcggccggtcgcagtcgcagcggcccggttgcccgaaacggcaaagaggaaacgggtgacccggctggccgtgcgcaaggcgacaaggagggtttcaagcggggagggagagccggagagggaggcaaaagctgtgacgggtacgggagtgggtagagccaactcgccagagtgccagagacaagagagagggctggggggacagcgccacagcggcggcagaaaggagaggttgctgcccccgccgtgggtttcgtttggcctcggcgttttaccgtccttttggcatcggaaggtggttggagctcagctcgtctacatcgcggccttttcctgtgacgtttggtttggttttgatcgaaacctcgtcgtcgccattgctctgattgcttgccttttcctgtgccgcggtttacaccgatcgatttcggtggtgctgggttgcttttgcggccgtgttgacggagaggattaagtttcagctcaataatgtgggagcttcagcagcaccgggcagatgaattttctgctctgatcgccctctccatgtgcagcccctcccatcgcattctatttctagctttacttttgggtttgggttttggggttttccatggcttgctgagtttttactaggcaggttcacgcgctaatgacgtttcagtgcggttcgatgcgatcccaccatcatccatgctatttatgggattccttcggtggttgggacgtttcgtatgcttccccgttcagaagattgctgcctactactatttcctaggtgatggattcagatgaagaaaaatctttggaacaaatctcttgcgtggctgggtcgtagcttcgtatctggtaccagtccgtgtcgcgtcattcgcatcaacgtacgtagacctgaccagtgaccatctatctattgctgatgtgaccgagctctatgtggtgtccttgtgatttgaccatggtctacaggctttggtgtgaaagtcttgtctcttctgcttgtacacatggggtcgtcaaatggttacctagcaaagcattccgtttttgtgtctatggagcagcttgactggctgcatttttgttttttctcgtgagatttcggattcttttttttttcagttccgtgctgtgcttgaagttgagtaattttggatgttcgtttttaacctttttcgtcagttgtttgggtagtgcagtaaagcagtagcaatttttctcattctccgcaaggtgactgatgcatttatcggattccattctgacttgtctttatagtggcaacccaaggatagcatgcaaacttaaattttgtttacagattccactctggcctatttttagcttgctgttttcagaccgtgtgctttttattgccactgttcatagaatgatgtgaagttgaagtttcgatcatgagttgcctcgggcttgttcaaatgaactgtcctttgagttcgcagaactcaagtgaagaaacaagcggggccggaaccagggccagcatggagcgcgtaaagcacgagaacttttgccgtgccgtcgcagaggacaacacagcgctcctcctctcagcagtgggaaacttcaggaaggaggccctgtgccgcatccgcaagggctccgacgcctcgagggtgctggaccaggagatgtccgtcaggctactccacctcgcttgcaagcacgacgcagtagagtgcgcgacgctgctcctagagggcggcagcgggatcacggcggcccccattgatgcaagggaccagctcacgcggacgccgctgcacgtcgcagctgagacccactcggccaggtgcatagagctgctactctccaagaacgcccgtactgatctcagggtggttgacgggagaccacttctcccgcttgagatcgcgctaatgagcaggagagttcaaactaactggtccgtggacaacccaattgaggatcttctgtcttttcttaaacaaagggatctcaatgcagtaaggctcctggcagagaaaaccagagtggttggggagcttgcttacagatacgccatggaaggatgtgtccctgcattgacaatgctgcttctggtggttgaagagaagatatcgtcacaggttagtgtggttatagagggtgtcagaacgaagcgttcaatctacaactccattgtggacgaggctttatcaacgggagatacttcagctcgtgatggacatgaaaggagaaaggccctgctctgtgagattcagctgcttaaccaatttggatcggcatcatggagggaccacaatgacaagagaacactaccccctctactgagagctgctaaggttggagatatgaatgttataaagatgctcctgatgggtaatgttgatgtcaatgaagccgactctgaaggaaacacagcacttcactggtgccttagtggtgcttcatgtaccaaggaaccaaggattgtgtggcttctgctcaagaatggcgcaagagttttccaggggaacaaattagggctcacaccagtacacagcgctgcagctaagggcaattacaaagctcttcagtcacttctgcttcatgcccaagattgtgttgatatacctaccaagaccaaagaaacgccattattttttgcagtgaagaatggttctgtggattgtgcaaaacttcttttgcgtttcggggctgataccaaagcccggaacctgagaaagcaaagacctattgatgtggcaacatcccaggacatgcgtttcatccttagctctgcgaatgtgttactattttcagggaaccataactcacctcaaaagaatcgtgtgatgagaaaggaaatttacaaagagcttggtgatgaatttgacgattttgacaaggattcctgtgatgaaagctacactgggcttaagacatcan

SEQ ID NO: 2758 - DNA, 1653 bp, Zea Mays
  misc_feature (1653)..(1653): n is a, c, g, or t
gtgagtagagtacagaagagaggatcgcgaagcctgaagcagtttttggaggagggctgccacataaagcggcgagtgggcgatcgagtggtccgcgtggggtgcacaaggaggaggacgatccttcggggacggatgccagcgcccgtgccgtgcgaggacgacggaagagccgcgccgcgcctggagcacgcatgggagagaactcaagtgaagaaacaagcggggccggaaccagggccagcatggagcgcgtaaagcacgagaacttttgccgtgccgtcgcagaggacaacacagcgctcctcctctcagcagtgggaaacttcaggaaggaggccctgtgccgcatccgcaagggctccgacgcctcgagggtgctggaccaggagatgtccgtcaggctactccacctcgcttgcaagcacgacgcagtagagtgcgcgacgctgctcctagagggcggcagcgggatcacggcggcccccattgatgcaagggaccagctcacgcggacgccgctgcacgtcgcagctgagacccactcggccaggtgcatagagctgctactctccaagaacgcccgtactgatctcagggtggttgacgggagaccacttctcccgcttgagatcgcgctaatgagcaggagagttcaaactaactggtccgtggacaacccaattgaggatcttctgtcttttcttaaacaaagggatctcaatgcagtaaggctcctggcagagaaaaccagagtggttggggagcttgcttacagatacgccatggaaggatgtgtccctgcattgacaatgctgcttctggtggttgaagagaagatatcgtcacaggttagtgtggttatagagggtgtcagaacgaagcgttcaatctacaactccattgtggacgaggctttatcaacgggagatacttcagctcgtgatggacatgaaaggagaaaggccctgctctgtgagattcagctgcttaaccaatttggatcggcatcatggagggaccacaatgacaagagaacactaccccctctactgagagctgctaaggttggagatatgaatgttataaagatgctcctgatgggtaatgttgatgtcaatgaagccgactctgaaggaaacacagcacttcactggtgccttagtggtgcttcatgtaccaaggaaccaaggattgtgtggcttctgctcaagaatggcgcaagagttttccaggggaacaaattagggctcacaccagtacacagcgctgcagctaagggcaattacaaagctcttcagtcacttctgcttcatgcccaagattgtgttgatatacctaccaagaccaaagaaacgccattattttttgcagtgaagaatggttctgtggattgtgcaaaacttcttttgcgtttcggggctgataccaaagcccggaacctgagaaagcaaagacctattgatgtggcaacatcccaggacatgcgtttcatccttagctctgcgaatgtgttactattttcagggaaccataactcacctcaaaagaatcgtgtgatgagaaaggaaatttacaaagagcttggtgatgaatttgacgattttgacaaggattcctgtgatgaaagctacactgggcttaagacatcan

SEQ ID NO: 2759 - DNA, 1781 bp, Zea Mays
  misc_feature (1781)..(1781): n is a, c, g, or t
gtgagatttcggattcttttttttttcagttccgtgctgtgcttgaagttgagtaattttggatgttcgtttttaacctttttcgtcagttgtttgggtagtgcagtaaagcagtagcaatttttctcattctccgcaaggtgactgatgcatttatcggattccattctgacttgtctttatagtggcaacccaaggatagcatgcaaacttaaattttgtttacagattccactctggcctatttttagcttgctgttttcagaccgtgtgctttttattgccactgttcatagaatgatgtgaagttgaagtttcgatcatgagttgcctcgggaactcaagtgaagaaacaagcggggccggaaccagggccagcatggagcgcgtaaagcacgagaacttttgccgtgccgtcgcagaggacaacacagcgctcctcctctcagcagtgggaaacttcaggaaggaggccctgtgccgcatccgcaagggctccgacgcctcgagggtgctggaccaggagatgtccgtcaggctactccacctcgcttgcaagcacgacgcagtagagtgcgcgacgctgctcctagagggcggcagcgggatcacggcggcccccattgatgcaagggaccagctcacgcggacgccgctgcacgtcgcagctgagacccactcggccaggtgcatagagctgctactctccaagaacgcccgtactgatctcagggtggttgacgggagaccacttctcccgcttgagatcgcgctaatgagcaggagagttcaaactaactggtccgtggacaacccaattgaggatcttctgtcttttcttaaacaaagggatctcaatgcagtaaggctcctggcagagaaaaccagagtggttggggagcttgcttacagatacgccatggaaggatgtgtccctgcattgacaatgctgcttctggtggttgaagagaagatatcgtcacaggttagtgtggttatagagggtgtcagaacgaagcgttcaatctacaactccattgtggacgaggctttatcaacgggagatacttcagctcgtgatggacatgaaaggagaaaggccctgctctgtgagattcagctgcttaaccaatttggatcggcatcatggagggaccacaatgacaagagaacactaccccctctactgagagctgctaaggttggagatatgaatgttataaagatgctcctgatgggtaatgttgatgtcaatgaagccgactctgaaggaaacacagcacttcactggtgccttagtggtgcttcatgtaccaaggaaccaaggattgtgtggcttctgctcaagaatggcgcaagagttttccaggggaacaaattagggctcacaccagtacacagcgctgcagctaagggcaattacaaagctcttcagtcacttctgcttcatgcccaagattgtgttgatatacctaccaagaccaaagaaacgccattattttttgcagtgaagaatggttctgtggattgtgcaaaacttcttttgcgtttcggggctgataccaaagcccggaacctgagaaagcaaagacctattgatgtggcaacatcccaggacatgcgtttcatccttagctctgcgaatgtgttactatggaaccataactcacctcaaaagaatcgtgtgatgagaaaggaaatttacaaagagcttggtgatgaatttgacgattttgacaaggattcctgtgatgaaagctacactgggcttaagacatcan

SEQ ID NO: 2760 - DNA, 1475 bp, Zea Mays
  misc_feature (1475)..(1475): n is a, c, g, or t
gcttattatgcttgtcaaagttccaattaaaaactcaagtgaagaaacaagcggggccggaaccagggccagcatggagcgcgtaaagcacgagaacttttgccgtgccgtcgcagaggacaacacagcgctcctcctctcagcagtgggaaacttcaggaaggaggccctgtgccgcatccgcaagggctccgacgcctcgagggtgctggaccaggagatgtccgtcaggctactccacctcgcttgcaagcacgacgcagtagagtgcgcgacgctgctcctagagggcggcagcgggatcacggcggcccccattgatgcaagggaccagctcacgcggacgccgctgcacgtcgcagctgagacccactcggccaggtgcatagagctgctactctccaagaacgcccgtactgatctcagggtggttgacgggagaccacttctcccgcttgagatcgcgctaatgagcaggagagttcaaactaactggtccgtggacaacccaattgaggatcttctgtcttttcttaaacaaagggatctcaatgcagtaaggctcctggcagagaaaaccagagtggttggggagcttgcttacagatacgccatggaaggatgtgtccctgcattgacaatgctgcttctggtggttgaagagaagatatcgtcacaggttagtgtggttatagagggtgtcagaacgaagcgttcaatctacaactccattgtggacgaggctttatcaacgggagatacttcagctcgtgatggacatgaaaggagaaaggccctgctctgtgagattcagctgcttaaccaatttggatcggcatcatggagggaccacaatgacaagagaacactaccccctctactgagagctgctaaggttggagatatgaatgttataaagatgctcctgatgggtaatgttgatgtcaatgaagccgactctgaaggaaacacagcacttcactggtgccttagtggtgcttcatgtaccaaggaaccaaggattgtgtggcttctgctcaagaatggcgcaagagttttccaggggaacaaattagggctcacaccagtacacagcgctgcagctaagggcaattacaaagctcttcagtcacttctgcttcatgcccaagattgtgttgatatacctaccaagaccaaagaaacgccattattttttgcagtgaagaatggttctgtggattgtgcaaaacttcttttgcgtttcggggctgataccaaagcccggaacctgagaaagcaaagacctattgatgtggcaacatcccaggacatgcgtttcatccttagctctgcgaatgtgttactatggaaccataactcacctcaaaagaatcgtgtgatgagaaaggaaatttacaaagagcttggtgatgaatttgacgattttgacaaggattcctgtgatgaaagctacactgggcttaagacatcan

SEQ ID NO: 2761 - DNA, 1778 bp, Zea Mays
acgcgagaaaattgaatatttatactacccgtacacagcacgaacgggtatagtcgggccgttttcacccctagtgccatccctccctccggggtgcggaccttcctggagttctttccatcagccgaccaccggttccgaattccgacacgacatcgccaaattcctggaggccaaaacgcgatggaactcccagatgaaagagtacaagtagatgcactggagagacacttactagctggtttatcttcaaacgactatgatggaagttttgaggatgaggtcctctatgatgcatcatttgcagaaatggaagataattttgtcaaagactttcgctcgaggaagctgtacttgacaccgcatgctgttatttacaaggtaaacaagccttttgcttttccttgttttggagtttccaaaaaggagaaatattggatcctcccttcaatttccgatgttgttgttgagcaagattatctccaatccatttttggtgtatattcgatcaggattgagaatattagtgtcagaaagcctcctagttgtgatgtaaaaattactggggttgctcatccacatgatttcaggaaggccgttgtagtccatcttttgaacactaggaatcaaaaaacatcatcggatgaccaacagagcacaaatttgaattatgcagctagttcttcggaggcttctcttggagatttgatgctagagaagcttgatgaagttgaaatctctgtaaagaaaatgcaagcactgctacaggggcctgaaatttccaagtttaagaccacatcaggttgactccatgtgattgaagttgaaattgtttgactccttgggaaatgagaattgcgttctttttggaagtactagggagtacataccaaaattttgggcatgttcagctattggctgcggcagcagctgtacagccattcagcaactgtagcacatgcagcatccaatcagcagctggcacctcagcaaacagccgcttatacgcacagggaacaggcctttactgcagaagtcgcatttgtgcaggagtcatcaggttatgaaatgtaatgactatgtgtttttgtttctaataaataacgacgcaactgtaactaccaaaaaaaaagttctgttaaagaatgcagtaaccagcacataccctcctcttgttcagtaaatatcagccaaagtgccaaatccaaactaaagttatcaagacatctggctgtggctgcctgaaaaactacttggtgcttttcgacccagatgctagctccacagtcaaaaggctttggtgtatcctaatctgatggactacagttccaacacgtggttcactgaacctcataagtgtctagtcgcttcatctaaccacagggaggctgactgactgcttgacttgtgtcccttgttctccattctgtattcacacactacactactacagtatttcctttttttttctctctctctcgctttaggttagaggaccactcctcgatattagtctcctattctcctggctgcatgatctcaaattgcaatcttttgggggtgtccttgtcctggcctgatgtatgaggagcagaagaatggaccaggccattataagctagtttattgatttggtgcttatgcttatgcctgcattgcttgttacctttatgtcctgtcaaggcgtgggttaagcacatagtggttcatgaattgtgtcggtatggcaatcttttggtctgtcacccgtcatatggcaccacaaccaaccagagttc

SEQ ID NO: 2762 - DNA, 1078 bp, Zea Mays
taataacttcagatgcataacttaacgaaaatgcaagcactgctacaggggcctgaaatttccaagtttaagaccacatcaggttgactccatgtatgttgacattttcacaggtgattgaagttgaaattgtttgactccttgggaaatgagaattgcgttctttttggaagtactagggagtacataccaaaattttgggcatgttcagctattggctgcggcagcagctgtacagccattcagcaactgtagcacatgcagcatccaatcagcagctggcacctcagcaaacagccgcttatacgcacagggaacaggcctttactgcagaagtcgcatttgtgcaggagtcatcaggttatgaaatgtaatgactatgtgtttttgtttctaataaataacgacgcaactgtaactaccaaaaaaaaagttctgttaaagaatgcagtaaccagcacataccctcctcttgttcagtaaatatcagccaaagtgccaaatccaaactaaagttatcaagacatctggctgtggctgcctgaaaaactacttggtgcttttcgacccagatgctagctccacagtcaaaaggctttggtgtatcctaatctgatggactacagttccaacacgtggttcactgaacctcataagtgtctagtcgcttcatctaaccacagggaggctgactgactgcttgacttgtgtcccttgttctccattctgtattcacacactacactactacagtatttcctttttttttctctctctctcgctttaggttagaggaccactcctcgatattagtctcctattctcctggctgcatgatctcaaattgcaatcttttgggggtgtccttgtcctggcctgatgtatgaggagcagaagaatggaccaggccattataagctagtttattgatttggtgcttatgcttatgcctgcattgcttgttacctttatgtcctgtcaaggcgtgggttaagcacatagtggttcatgaattgtgtcggtatggcaatcttttggtctgtcacccgtcatatggcaccacaaccaaccagagttc

SEQ ID NO: 2763 - DNA, 3313 bp, Zea Mays
ctccaccccgcccccgcgaatccatcctatttccgccgatgccgccttcctcgaaccttcgtcgcccgctgcacctccccgccgcgccccctacaaagccagccagcagctaaaaacctcctcattctcatccacttcctcccgcgcaaccgctcttccccaacttcgccgccgccatgggctcctcctacgacccctacccgtccccggccgccgacgacctcttcctctacctctccgacctcggccccgcctcgccctccgcgtacctcgacctcccgcccaccccgcagcctcagccgtacccgcagtcccagcagcagcagcaggggagcaaaggccccacgcaggacatgttgctcccctacatctccagcatgctcatggaggacgacatcgacgacaccttcttctacgactacccggacaaccccgcgctcctccaggcgcagcagtccttccttgacatcctctccgacgacgcctcgtccccgaccaccaccactggcaccaccaacagcagcgccagcgtcaaccactcctcctccgacgcgtccgccagcgcgccgctcaccccagccgcggtcgactcctactccccggcccccgccgtccagttcgacggcttcgacctcgaccccgcggccttcttcagcaacggggccaactccgacctcatgagctccgccttcctcaagggcatggaggaggccaacaagttcctgccctcagaggacaagctcgtcatcgacctcgatccgccagacgaccccaagcggtttgtcctccccacccgcgccgcagaaaacctcgcgcccggattcaacgccgccgccgccaccaccgcccctgccgccgtggctatggcggtgaaggaggaggaggtgatcctcgctgcgcctgatgccgcgcttggcagcggcggcgtcgtcctgggccgcggtcggaggaaccgcttggacgatgacgaggaggacctggagctgcagcgccggagcagcaagcagagcgcgctgcagggggacggcgacgagcgggacgtcttcgagaagtacatcatgacctgccccgagacgtgcacggagcagatgcagcagctgcggatcgccatgcaggaggaggccgccaaggaggcggcggtcgccgccgggaacggcaaggccaagggccgccgcggtgggcgggaggtggtggacctgcgcacgctgctcgtccactgcgcgcaggccgtcgcctcggacgaccgccgcagcgccaccgagctgctcaggcagatcaagcagcacgcaagcccgcagggggacgccacccagcgcctcgctcactgcttcgccgagggcctccaggcccgcctcgccggcaccggcagcatggtttaccagtcgctcatggccaagcgcacgtccgcagccgacatactccaggcgtaccagctgtacatggccgccatctgcttcaagagagtcgtcttcgtgttctcgaataacaccatctacaatgccgctctgggcaagatgaagatacatatcgtcgattacgggatccattacggcttccagtggccgtgcttccttcgatggatagcggatagggagggcgggccaccggaggtgaggattactggcattgacctgccccagcctgggttccgccctactcagcgcattgaggagacagggcgccggctcagcaagtatgcccagcagtttggtgtgccattcaagtaccaggcgattgcagcatccaagatggagtccatccgcgcggaggatctgaatctcgatccagaggaggtgctcatcgtgaactgcctataccagtttaagaacttgatggatgagagcgttgtgattgaaagcccaagggacattgtgctcaataacatcagaaagatgcggcctcatacattcatacatgcaattgtgaatggctccttcagtgcgcccttcttcgtgacgaggttccgagaggctctgttcttttactcggccctgtttgacgctctggacacgaccactccaagagacagcaaccagaggatgctgattgaggagaaccttttcgggcgggctgccctgaatgtcatcgcgtgcgagggcacagatcgggtggagcgccctgagacgtacaagcaatggcaggtgcggaatcaacgagcaggcttgaagcagcagccgctgaaccctgatgtcgtgcaggtagtgcggaacaaggggccagtttggtacggcgcgtgcggcgccacggcgtgcctaagctgcggcgcccgaatcggccgccacacctgcggcgggaaaactatggtgcgccgtggcggcttagtccacgcaccaaacagcccctaggtttaggtatgtcatctagatatatctagtgacaagcgtgttcttggcctagttaatagccatggttacttggactctgcagtatgcctagtgccctagtgagaattcaacatgtacctgttctttccaagggtacattcagcttctgtggaacatgagtgacacacgggggatccagaagtcagaaggcataccgaaatctgtcctttgatttaatgtggattatatagatgctcatcactcagccatgctgttgcatagtgctaaatatgatctaggtcctggtctggataatgttctccacagcatctgctgtgcgtgtgacctgtgatcagttcagtcagttgaccaggttgtaattgacacttgttcctctgtttccggcgcttactgcgctgtttcagacttaaccatggctattatgaagtgatgaagcgtgggggttttttgtctgtctactttatcgcacatgggggagctctttccaggatttatatgccatgtgtttgttgatgtacatgattcatgttcaatgagttgaatcctctttccagcctgcatactggtttgtcgcggcgaggaaattattattatgacagtttatgaactgtggctgatgaattgttcagtaatcagtcgtgctgtttggttcacgaaatgtaacgtaaattgtaacggtaatgattcacattcgattcgagtaccagtggtaacaaatttgaatatgccgatattagttcttagtgtgatttagtttctagtgtgatatttaattacggttggtcacaaacaaacatgatataacgttattagttatccattacgttacaaatatgtgagctaaacgacaccttattaggctgttattaccaggattgcaattatctcttgctgtactgtctctgcgttttcaggctacatatggggttttgtgaggcccatgctgtcttgtatgggagctctctcca

SEQ ID NO: 2764 - DNA, 408 bp, Zea Mays
gccctggccacgtcgtgtccatatagggggaccacgaccggatttgcatgttccccctctgtttcctatcttcgcgaacaccactgaactagtgacggagagggaaagcggcgaatccgcatctagtcgacccgcgccgccgcgggtgaacttcaccgtgcttacgaccggtgccgagcagtggcgcactagggcttcacgggtcttgttgggtggtgatcgctgccgcgccgctcggaattgctcgtctgcgccccgagaatttctcaccgtcgcgatcgttccgccgcggaccgcatcctctctatggcttgagcagtacaccgcgaacgcgccgacgagccagccactgaggatccagaggttcagctagtagagactgctgagcaggagcttgttgaaggcaag

SEQ ID NO: 2765 - DNA, 2716 bp, Zea Mays
agatgaacttgttgtgcttcccctcgagctgcggcagcccggtcttctcctcctcttcatccaacacgatcatcttgcccatctcatctcatcatgcctagacctttttagcacattcaaaataccttgcaacttgtttctcctatcctctatcgacacggtacctagagatggtggttccctcgtgaattagtaggagggaggctgtagtgtcgaattgggtgggggaagggtgccagcgactgatgtcgatgagccaccactgcaccccactctcctccgtcatccccaccccaataccgagagtggaagcatcgcccttcacctccacctcatcctctgcattaatcgccactgtgaccttgatctagactcggattggggcctctgccatcgccgccgcagcctggacgcagatctgggtcgttgcggccttagtacaagacgaggagtcagaagcagacggaagccatggagaagaatctagcagatttatcccaactccttccatccttgcaagtgcaaaatgagtccatcaaagtggctctggaggagaataccgcagtggtacgtgatctctctgcttggaaacctcggattgaaactgacgtgagcaatctatgggaggatttgggtcatctttctgacaaggtggatgaattactggctgggcgaggcacaccacaacttgaactgaaggtgtttgatcatttgccgctactagttcaagcgtcagcacaagctcttttggtgaatctggatcatgctacttcacaccggagtgatggttttcgggtggtcactaccctaagaccacctccggtcacaggaggaaatctacacttgggcaacattgctacaactcgtagattaactgatactactgggaatctcaccacctctcgattgccttcactagctgttctatctcaggcttcttcagttggggatgtcaagcatcacaaagaagtcagtaaaattggtttggatgaacacaaagctgcaactctgatggcttttagaaaagctaagggcctttgttacaaatgtgggcttcgttggggtccaacacacaaatgcagtactactgtccctttgcatgtggtggaggaactctggcagctattggatacatctgggactcaggaaaatattttagagccaactaaagaatctagtgatgatttaatgaccttatcggtgaatgcggtgcaaggtattgaagccccacaaacggtgacattaattgcatccatgttctccaaaatagtggttatgcttgtggattcaggtagttcatcctcttttattagctagctcttggcagcttttggtcctggattagtagctctatctcagtctgttattgtcaaagtggtgaatggtcaagttatatgttgcactcatcaaattcctcgatgtcaaatgaacattcaaagccatatcttgtgtgttaacctcaaggtgttacctctacagtgttatgatgtcatcttgggtatggactggctatcttcccacagcccgatgcaggttcactagcaggagaaatggttatgtttttaccatgagcagtagctggtaattctacaaggtcagcgaactgattgctccaagttggaacaagtgtcagcctttcagttatatcatatggcacggttggatgagttatggtgtactatggaagtgcaaccaattctagaaacgcccaacatacaacatctttctcaggagatcaaaggccttctattgaattgacctccttatttgacccacccaaacgcctacctcctcccagatctcattgccacaccataactctcatccctggagtggtacccttttgtcttcatccctatcattacaacccagctcaaaaggacgaaattgagagacaaatagttgaactccttaagaatgggatgacacaacctagttgtaacccctttgcgtctcctgttatcttaggtcgcaagaaatagttgactggagattatgtgttgactaccgttgcctcaatgccattacagtgaagaacaaatatcccattccagtaattgatgaattattggatgaattgcaaggagtggtatggttcactagtttggatctgagctcagggtatcaccaaatccaaatggacccaaaagacatccagaaaaccacatttcaaactcatagtggacattatgagcatcgagtcatgccatatggagtaactggaggtccggctacatctcaacttgctatgaactcagtgcttgcaccattctttcgcaagtgtgtggttgtctttattgaccatattttgatctttagtgctacatgggttgatcatatacaacatatacatgttgttttctctgtattggaccagcaccaattcaagatcaagctatccaaatgctcctttgctcagaaaaaactacactatctgggtcatgtcatcagtaatgaaggtgtggcaatccaaggtagctattattcagtcatggcctactcccaaatcagtcaaagaagtgcgtagtttcatggggctagcaggttactatcgtaaattcgtctaacgttttcgaattctgagtcgaccattaactatgctgctaaaaaagggacaagtctttgtatggacacttgatcatgaacaagcgtttcatatgttgaaaaatgccctaatgataactcatgtgttggctcttccagacttcactaaaac

SEQ ID NO: 2766 - DNA, 1006 bp, Zea Mays
aagccaaccgcaaccagactccagagagagagagagagagccacacattgcaagcttccaccatttccaagaacaactgccactgcagagagctcgtacaggaagagatggagatgcacatggacgacaagagcaagacgccgctttccaagaaggggagccggaggtcggcgtcggcgtcggcggcggcggggctgaagagccggccgtccagggccgccgcgggcaggtcggtgccgggccgcctggcgggcctggtgaaggagcagagggccaggttctacatcatgcgccgctgcgtcaccatgctcgtgtgctggagggactagctcgtgcaagcggtgcgcatctatccatggccgtagcgcgtaggcccccccaccccgttcggtggatgtgggctgtggctcggcccatgtgggcctggagctgtagcgccctggtaggtgaggacgtgatgtccatcacatgtgccatatatactgactagtttcccaacaacagcaaccccaaaacaaaacaaaaaaaagtgtcatggtgagagatcggagatgtgcctgttgtgtggccatcctgtggttcatatgtgtccatagctgtcggaaaaattagtataacttcatcctgtggttcataattgtacgcaaaagaattactatcatgattgcctgaaatataacttcaccctgttacagaaaaactttcttaccgagtttcttttttctgtcaaaaagaaggaacaaataaacgtagctgcaaaaacaaaaaaacaaaaaaaaaacgacagactgctagtttcagctctgtcaacattggaaagaaagaatctgcaacagctacgcagacactatctgctgctaatcatctggttgatcgaggtaaatgagccgatgcacgcgcacacaacgccaatcgctatgatgattatgcacaggatgatctgcaaagaaaatgaccatagatactcagtgttgagcagtttcaggttccaatcctgtatttgttg

SEQ ID NO: 2767 - DNA, 2342 bp, Zea Mays
taacgctctgcattcgcggcgctatcagttccgcacgccactctggtgccaggaatattccgctcctcctgccctccgccctcgacccttccgcaaacccagctctctgctggcagttcgtgagggcagcatgagggcgccgctgctgctatgggcggccgccacgtggctggccgtcagcgccgtggcgcaccctggcagacgtggcggcggcggcggggagcagccgctgtcgaggatcgccgtcgagagcgcggtcctcgccgtcgacgatgcggcgcacgtcagggcgtcccccttggtactggggctcaagggcgagagcagcgaatgggtggacgtggagttcttccatcccgacccatccagcgacgactggatcggtgtcttctctcccgcggatttcagtgctgcgatctgtgagcctgagaatccgaggcagtctcctccagtgctttgctctgcacctatcaagtaccagtttgcaaccttcaaaaatgatgggtataacaagaccggaaagggctacctgaagcttcagctgatcaaccagaggggagatttctcgttcgcacttttttcaggaggcctcttgaagcccaagctgattgccgtctccaacaaggtggcatttgcgaatccgaaggcgccggtgtacccacgtttggcgcaaggcaagtcttggaatgaaatgacagtaacctggacaagtggctatgatattacagaagcggttcctttcgttgaatggggcgagaaaggcggacgccggtttcttgctccagctggaactctaacgtttgacagaaacagcatgtgtggtgcaccagcgcgaactgttggttggcgccatcctggctacatccatactagctacctgaaggatctgtggccagactcgcggtacacttacaggcttggccacaggctaatgaatgggacccgcgtctggagcaaatcatacagcttcagagcatcaccttaccctggacaagattctttgcagcgagttgtcatatttggagacatgggaaaggcagaggcagatggttcaaatgagttcaacaacttccagccaggttcactgaatactacgtaccagatcacgagtgacatagaaaacatcgacatggtggtccacatcggggacatctgctacgcgaacggctacttgtctcagtgggatcagttcactgcacagatcgaaccgattgcttcgacggtgccatacatggttggcagtggtaaccacgagagggattggcctggcaccggttcattctacggcaacctcgactccggcggagaatgcggcgtccctgcccaaaccgtgttctacactccggctgagaaccgcgcaaagttctggtacgcaacggactacggcatgttcaggttctgcgtcgctcacacggaggaggactggaggcccgggaccgagcagtacaggttcatcgagcggtgcctgtcgtccgtcgacaggcagaagcagccgtggctcgtcttcctcgcgcaccgcgtccttgggtactcgtcctgcgcctactacgagtcggagggcacgttcgaggagcccatggggcgggaagcgctgcaggagctctggcagaagtacaaggtcgacctcgccttctatggacacgtccacagctacgagaggacgtgcccagtctaccagagccagtgcgtcgtcgacgcgtcggaccactacagcgggccgttccaggcgacgacgcacgtcgtggtcggcggcgcgggagccagcctctcggagttcgccgcctcgaagatccagtggagccacttcaccgacttcgaccacggcttcgtcaagctcaccgccttcaaccactcgtcgctgctgttcgagtacaagaagagccgcgacggcaacgtgtacgaccgtttcaccatctcgcgcgactaccgggacgtcctcgcttgctccgtcgacaactgcccccggaccacactggcctcatgaagcctcacgatcgcggtggttttcacttttcagacaagggattcggtccgtgcggtgggtctcttgcagggcagcagcgattcaagttactgtacatagttttttttttctttttttctttttttggtagtgcgccaataaatgaggcgttttctttactgcctccgttacctgcatgtgaaactatgttgttctacccgtagctaaaatatgttttagtatgagaagggttaaccaaaacgttttggtttattttccgggacactgccgaaaacgagagaccgaccaatatttgtaatctacaacggctattaaggtcaaacaccagaactcctacaaaaactaaagttatactttg

SEQ ID NO: 2768 - DNA, 2336 bp, Zea Mays
taacgctctgcattcgcggcgctatcagttccgcacgccactctggtgccaggaatattccgctcctcctgccctccgccctcgacccttccgcaaacccagctctctgctggcagttcgtgagggcagcatgagggcgccgctgctgctatgggcggccgccacgtggctggccgtcagcgccgtggcgcaccctggcagacgtggcggcggcggcggggagcagccgctgtcgaggatcgccgtcgagagcgcggtcctcgccgtcgacgatgcggcgcacgtcagggcgtcccccttggtactggggctcaagggcgagagcagcgaatgggtggacgtggagttcttccatcccgacccatccagcgacgactggatcggtgtcttctctcccgcggatttcagtgctgcgatctgtgagcctgagaatccgaggcagtctcctccagtgctttgctctgcacctatcaagtaccagtttgcaaccttcaaaaatgatgggtataacaagaccggaaagggctacctgaagcttcagctgatcaaccagaggggagatttctcgttcgcacttttttcaggaggcctcttgaagcccaagctgattgccgtctccaacaaggtggcatttgcgaatccgaaggcgccggtgtacccacgtttggcgcaaggcaagtcttggaatgaaatgacagtaacctggacaagtggctatgatattacagaagcggttcctttcgttgaatggggcgagaaaggcggacgccggtttcttgctccagctggaactctaacgtttgacagaaacagcatgtgtggtgcaccagcgcgaactgttggttggcgccatcctggctacatccatactagctacctgaaggatctgtggccagactcgcggtacacttacaggcttggccacaggctaatgaatgggacccgcgtctggagcaaatcatacagcttcagagcatcaccttaccctggacaagattctttgcagcgagttgtcatatttggagacatgggaaaggcagaggcagatggttcaaatgagttcaacaacttccagccaggttcactgaatactacgtaccagatcacgagtgacatagaaaacatcgacatggtggtccacatcggggacatctgctacgcgaacggctacttgtctcagtgggatcagttcactgcacagatcgaaccgattgcttcgacggtgccatacatggttggcagtggtaaccacgagagggattggcctggcaccggttcattctacggcaacctcgactccggcggagaatgcggcgtccctgcccaaaccgtgttctacactccggctgagaaccgcgcaaagttctggtacgcaacggactacggcatgttcaggttctgcgtcgctcacacggaggaggactggaggcccgggaccgagcagtacaggttcatcgagcggtgcctgtcgtccgtcgacaggcagaagcagccgtggctcgtcttcctcgcgcaccgcgtccttgggtactcgtcctgcgcctactacgagtcggagggcacgttcgaggagcccatggggcgggaagcgctgcaggagctctggcagaagtacaaggtcgacctcgccttctatggacacgtccacagctacgagaggacgtgcccagtctaccagtgcgtcgtcgacgcgtcggaccactacagcgggccgttccaggcgacgacgcacgtcgtggtcggcggcgcgggagccagcctctcggagttcgccgcctcgaagatccagtggagccacttcaccgacttcgaccacggcttcgtcaagctcaccgccttcaaccactcgtcgctgctgttcgagtacaagaagagccgcgacggcaacgtgtacgaccgtttcaccatctcgcgcgactaccgggacgtcctcgcttgctccgtcgacaactgcccccggaccacactggcctcatgaagcctcacgatcgcggtggttttcacttttcagacaagggattcggtccgtgcggtgggtctcttgcagggcagcagcgattcaagttactgtacatagttttttttttctttttttctttttttggtagtgcgccaataaatgaggcgttttctttactgcctccgttacctgcatgtgaaactatgttgttctacccgtagctaaaatatgttttagtatgagaagggttaaccaaaacgttttggtttattttccgggacactgccgaaaacgagagaccgaccaatatttgtaatctacaacggctattaaggtcaaacaccagaactcctacaaaaactaaagttatactttg

SEQ ID NO: 2769 - DNA, 2734 bp, Zea Mays
ctctggtgccaggaatattccgctcctcctgccctccgccctcgacccttccgcaaacccagttcgtcatcaagtcgttgcctttattttttttatcccttccctgggtgatcgctattgctattgctacaacaagtggtcagggaattcaggtgcatctgctgtttgttttaggctctctgctggcagttcgtgagggcagcatgagggcgccgctgctgctatgggcggccgccacgtggctggccgtcagcgccgtggcgcaccctggcagacgtggcggcggcggcggggagcagccgctgtcgaggatcgccgtcgagagcgcggtcctcgccgtcgacgatgcggcgcacgtcagggcgtcccccttggtactggggctcaagggcgagagcagcgaatgggtggacgtggagttcttccatcccgacccatccagcgacgactggatcggtgtcttctctcccgcggatttcagtgctgcgatctgtgagcctgagaatccgaggcagtctcctccagtgctttgctctgcacctatcaagtaccagtttgcaaccttcaaaaatgatgggtataacaagaccggaaagggctacctgaagcttcagctgatcaaccagaggggagatttctcgttcgcacttttttcaggaggcctcttgaagcccaagctgattgccgtctccaacaaggtggcatttgcgaatccgaaggcgccggtgtacccacgtttggcgcaaggcaagtcttggaatgaagtaagccttcttgtcattccactgttgcgacaaccgtttcagttttgtggattagacgagaccctgtgaacgtgtatgttttttcacaaggaattattttggtggtcttctctctgctcgactactttgtatcaacagaggagaacttaccttgtggaaataaattaactgtggtctccgatccaagaatgtggaactattgactttgtttttgtacagatgacagtaacctggacaagtggctatgatattacagaagcggttcctttcgttgaatggggcgagaaaggcggacgccggtttcttgctccagctggaactctaacgtttgacagaaacagcatgtgtggtgcaccagcgcgaactgttggttggcgccatcctggctacatccatactagctacctgaaggatctgtggccagactcgcggtacacttacaggcttggccacaggctaatgaatgggacccgcgtctggagcaaatcatacagcttcagagcatcaccttaccctggacaagattctttgcagcgagttgtcatatttggagacatgggaaaggcagaggcagatggttcaaatgagttcaacaacttccagccaggttcactgaatactacgtaccagatcacgagtgacatagaaaacatcgacatggtggtccacatcggggacatctgctacgcgaacggctacttgtctcagtgggatcagttcactgcacagatcgaaccgattgcttcgacggtgccatacatggttggcagtggtaaccacgagagggattggcctggcaccggttcattctacggcaacctcgactccggcggagaatgcggcgtccctgcccaaaccgtgttctacactccggctgagaaccgcgcaaagttctggtacgcaacggactacggcatgttcaggttctgcgtcgctcacacggaggaggactggaggcccgggaccgagcagtacaggttcatcgagcggtgcctgtcgtccgtcgacaggcagaagcagccgtggctcgtcttcctcgcgcaccgcgtccttgggtactcgtcctgcgcctactacgagtcggagggcacgttcgaggagcccatggggcgggaagcgctgcaggagctctggcagaagtacaaggtcgacctcgccttctatggacacgtccacagctacgagaggacgtgcccagtctaccaggtgcgccttcatcagcttccatctacagccagcgaacaagtgcttgtaattcatcctacagagagccttgactgtaatcttccaaccaatttttctgcagagccagtgcgtcgtcgacgcgtcggaccactacagcgggccgttccaggcgacgacgcacgtcgtggtcggcggcgcgggagccagcctctcggagttcgccgcctcgaagatccagtggagccacttcaccgacttcgaccacggcttcgtcaagctcaccgccttcaaccactcgtcgctgctgttcgagtacaagaagagccgcgacggcaacgtgtacgaccgtttcaccatctcgcgcgactaccgggacgtcctcgcttgctccgtcgacaactgcccccggaccacactggcctcatgaagcctcacgatcgcggtggttttcacttttcagacaagggattcggtccgtgcggtgggtctcttgcagggcagcagcgattcaagttactgtacatagttttttttttctttttttctttttttggtagtgcgccaataaatgaggcgttttctttactgcctccgttacctgcatgtgaaactatgttgttctacccgtagctaaaatatgttttagtatgagaagggttaaccaaaacgttttggtttattttccgggacactgccgaaaacgagagaccgaccaatatttgtaatctacaacggctattaaggtcaaacaccagaactcctacaaaaactaaagttatactttg

SEQ ID NO: 2770 - DNA, 2498 bp, Zea Mays
ctctggtgccaggaatattccgctcctcctgccctccgccctcgacccttccgcaaacccagttcgtcatcaagtcgttgcctttattttttttatcccttccctgggtgatcgctattgctattgctacaacaagtggtcagggaattcaggtgcatctgctgtttgttttaggctctctgctggcagttcgtgagggcagcatgagggcgccgctgctgctatgggcggccgccacgtggctggccgtcagcgccgtggcgcaccctggcagacgtggcggcggcggcggggagcagccgctgtcgaggatcgccgtcgagagcgcggtcctcgccgtcgacgatgcggcgcacgtcagggcgtcccccttggtactggggctcaagggcgagagcagcgaatgggtggacgtggagttcttccatcccgacccatccagcgacgactggatcggtgtcttctctcccgcggatttcagtgctgcgatctgtgagcctgagaatccgaggcagtctcctccagtgctttgctctgcacctatcaagtaccagtttgcaaccttcaaaaatgatgggtataacaagaccggaaagggctacctgaagcttcagctgatcaaccagaggggagatttctcgttcgcacttttttcaggaggcctcttgaagcccaagctgattgccgtctccaacaaggtggcatttgcgaatccgaaggcgccggtgtacccacgtttggcgcaagatgacagtaacctggacaagtggctatgatattacagaagcggttcctttcgttgaatggggcgagaaaggcggacgccggtttcttgctccagctggaactctaacgtttgacagaaacagcatgtgtggtgcaccagcgcgaactgttggttggcgccatcctggctacatccatactagctacctgaaggatctgtggccagactcgcggtacacttacaggcttggccacaggctaatgaatgggacccgcgtctggagcaaatcatacagcttcagagcatcaccttaccctggacaagattctttgcagcgagttgtcatatttggagacatgggaaaggcagaggcagatggttcaaatgagttcaacaacttccagccaggttcactgaatactacgtaccagatcacgagtgacatagaaaacatcgacatggtggtccacatcggggacatctgctacgcgaacggctacttgtctcagtgggatcagttcactgcacagatcgaaccgattgcttcgacggtgccatacatggttggcagtggtaaccacgagagggattggcctggcaccggttcattctacggcaacctcgactccggcggagaatgcggcgtccctgcccaaaccgtgttctacactccggctgagaaccgcgcaaagttctggtacgcaacggactacggcatgttcaggttctgcgtcgctcacacggaggaggactggaggcccgggaccgagcagtacaggttcatcgagcggtgcctgtcgtccgtcgacaggcagaagcagccgtggctcgtcttcctcgcgcaccgcgtccttgggtactcgtcctgcgcctactacgagtcggagggcacgttcgaggagcccatggggcgggaagcgctgcaggagctctggcagaagtacaaggtcgacctcgccttctatggacacgtccacagctacgagaggacgtgcccagtctaccaggtgcgccttcatcagcttccatctacagccagcgaacaagtgcttgtaattcatcctacagagagccttgactgtaatcttccaaccaatttttctgcagagccagtgcgtcgtcgacgcgtcggaccactacagcgggccgttccaggcgacgacgcacgtcgtggtcggcggcgcgggagccagcctctcggagttcgccgcctcgaagatccagtggagccacttcaccgacttcgaccacggcttcgtcaagctcaccgccttcaaccactcgtcgctgctgttcgagtacaagaagagccgcgacggcaacgtgtacgaccgtttcaccatctcgcgcgactaccgggacgtcctcgcttgctccgtcgacaactgcccccggaccacactggcctcatgaagcctcacgatcgcggtggttttcacttttcagacaagggattcggtccgtgcggtgggtctcttgcagggcagcagcgattcaagttactgtacatagttttttttttctttttttctttttttggtagtgcgccaataaatgaggcgttttctttactgcctccgttacctgcatgtgaaactatgttgttctacccgtagctaaaatatgttttagtatgagaagggttaaccaaaacgttttggtttattttccgggacactgccgaaaacgagagaccgaccaatatttgtaatctacaacggctattaaggtcaaacaccagaactcctacaaaaactaaagttatactttg

SEQ ID NO: 2771 - DNA, 2714 bp, Zea Mays
gtagttgtagcatttgttttcacatgcgaagaccaatccgttgcttttgcggatgaaagacaccattttacgcatttatacatggctcaagaattaactgtactccagcaatttatcgtaaatttctccatcgttttcaagtgttgtcgtggtcctgtgctcccctgtatttggtggtttggctcctcgggatgttcttcctgtcccctccggaccaagagtccaaaacccaaacccaagcacccaaatccgaccccaaaatgcctgcttctcagtgatgggatgacggatgctcccctcctgctgtagccccagctcgcgccgcctcgctttctcccttcgcgacgccggcatttcgtggccggcggcgccgccttatcctctgccattcttgtgggcaagataagcagcgggttgtttttctttaccgttgtttctgaaggtttcggggccagttcagccggatcccggctcttcggacgccgccgctccctcggcctggtggagctggtggagcggaggggaggggcgatccatacggaggtggcggttccatttcttgttttcctggtttttgttcatgtagattgcccaagcaactgtggacctgaacagacttctgtggtgctgttgaagaattagtgccactctcccgatggataaacagaggaacaccaagaatggggaagtggggaacaatgtgttttgcagaatgattcttgatcatattgctggggacttatgtctcaatgaggagaacgtgccttgcaatactccaagaaactccgttcactccgcgtttggtggcaggacagttgcttctactagcggcagcttcaatactgattcggtgagcccaggcgagtatgtcagggatcctggatccctactgagtttacaaccgtggatttttagaagaaacggctcacagaactacagggaaagtgtgcgcgcgagtggtaaaggcaagaatctggtcgatgtccttggagagggtcaagctgtcgaaatctctccaaggagcccttgtcttggttctgggcctggaagaggctgtggagctcttaggagcagaagatctcgtaggaatttgatgaagccacttgtgccaatggaaaactcctacgttccacagctttacagtgagaacttcgaaatggaagaatgcacgtttgctccagctccctccccagcttctactaggccattcgttgtgacagacggtacaaggataattagtaaatcacgctatgagccagtacctctgccctttaatattagattagacgaggaatgtagaggcacctcattgatgccaggaagtatgattggaattgctcctctacctgagctgaagaaactcaaacatgaggccagagatttacacgatgcaaggcttggtctgtctggttctcagcgaagtagcaaatcgcatgaacaagcaggtctacgtgatcgactcctactattctctactggggtgagcatcggtattctgtcaaataagaaggaatttgatacattgaagggcacactgaaacaaatggagaacttagttcaggatttacaagatgagctggagatgaaagagggtttaactgtgaaagaattacttaatgaaacatctatcgaacatgatgatgataatagcaaactacacggagttgatccagagccaatgagcaaaattgaggctgagcttgaagctgagctagcaaggctggaactgaatatcacttcgataagtttagaagaagaaacatctgaaatcaatggggccgacgatgattccattggtgacattgtttgcggggaactgaaagctgatacggtccctcgcgacctcacagagtacagcagtgaatctgaccatcgcagggacagcagggaaagctccccaggttacacatgtggagccaactgtcctgtctcgccaagagatctcagcatccgtcttcacaaggtgatccaacacaggctcgaagaccgaatcaaggagctcgagtcagcaatcgtgcacggacagaagcagacgcaactgcagatgatggtgactgaccaaatggtctccgaccgaatacgctcgaacagcgagtcaggttcttcttcaggccagggaagtcccattttcatacaagaaaccagctcgctggcagaaccgtaccgtctaaacctatctggagacgcgctcgaagcttacgatgaagcttacgaagagttcatgaggatcgcggactccccttacaccacaagtccaaacgggaagccacaggcaaccgaagattgcttggcagaccgtggtctagtctggggaatggaggacagctctaggaagctgagagaagtgcccacctgggagagagctctaaggagtgcagatcctagcagagatcacgagcgcgatagggatgagtcaggtggcgacgacgacgatgacgactgtgaagtgctgatccggcagatcgtagagagaactagacaaggttcacatgtactcgttaacgcccagaaacttctgttttctgtggaccaatagtccactgcactatacaccattgctttttgagagatatatagcttgtatgtagtgtcgaattattgttgagaaaaaagggaattgttgattgttttgaggcttcttcacgtgatgtcttctcaatgcttacagaatgcaagttggaccccttgctgctgccatcttaaggtatcatttt

SEQ ID NO: 2772 - DNA, 6399 bp, Zea Mays
agcaaatggtatatgacaggtcgggcccagtgcttcataaaagcacatttgctcacccaaagagagagaaagaggtgatattgataagacgggaaaataccctaggctctcgccagtctccggtgcggctcaacaccgaccgaacccgtgaaaaattcgttctcctttcgatccgtttggcggggggctcggccggatccgaccggaggggcgccgccgatccatccggtcgcagccgcgtctgatttggtgcggattttggcgagataccccgctcctagctccgctgtttcaaggataacaaagatggcgtcgccgcggggcgggttcgatgagcaagatcgccggacggagaagggcaccgaggtgttcgtcggcgggctgccgcggtcggccacggaaagcacgctccgagagatattttcttcatgcggagagattattgacgcgcgcataatgaaagatcagagtggtcactcaaagggatatggttttgtgcggtttgcaaagagggattatgctaatactgccaaaaggcaaaagaatggtattgaggttcaaggaaagaggcttgtggttgagctttcaatggatcaagatacagttttctttggaaatctttgcaaagagtggactttagaagaatttgaagaattgattcacaaggcattcaaagatgttgtttcggttgaccttgcaatggcgtcaaatcttggttcttcaaacaagaagaatatcaatcgaggctttggatttgtgagattttcttctcatgcagtattggccaaatattattgcctcttgttttctttttcagtttaattggataaaacaaccttatacaaatatcaagatatgtgcaaaattaccttaccctactgtcctttctagtaggaaaagaagcacatatgccatttgtctcatgcattatcaagtgacgatatatccttaatgcccctatgtcctaataaaaatatggagccaaatgatgaatcggcaccaaattatcaaaataccttatgatctgctgaaaaactatggaattcacatctttgacttcaatgacttgtatactttgacattgattttggatttctatggcaaaatactttatgatcagctggcaagctaaggaattcacatccctgatttgtatacttgacattgattttggatttacatggcaacataatttctccatctcttatgtcataaatgactgactaatgttgcaaagaatggattttaattgttaccgttttcacatgaaaattccctgttgcattgtgggtacttttgaagaagccacagacattgaagaatcctttgttcaacacagttatagagaaaaaattggtacgccatataggaaagggacatggcagaattttcaccttagtcatatcttgtatctttgatctgctcttcatatttacatttatatccatggttgaagttcattataaagtgtacgaggatgaaataatgaccactggccagtgtttgtctgaaatgaattcccaatctttctagttcactgggtggtgctatatctgatgaaacagtctggaaggatgatgattggttagccaagccaaaggttacttgcatgcgtgccttttctgatctgcaacattcacaatctgtactgtgtactccatgcccactagtatttaactacatgaaatcaccggcatttgtcatcatttatctggatgacctttgttctatagagacctgtgagaaccacataatgccatagaggtaatgtcgttccagagtttagccagagtttttagcaacagcaaaacccaaaacccatatgtaggatatttagaaacacggatggggaaatcaacatatattttattaatcatctacttccatgtgatgtagaagttcccttgcagttcctctctctctctctctcagaccaagagtcaaataagagcttacaacaaattaatggttgcaatgaagtttaacagttcagttatgaaggcctgaagattactgttgattgaagcaacactgttacttgacagcttcttctgttgcttgtgtttgcgctccattaaaatttggcattctttgacttgcctatatatttctttaattcaagtaaaagtagactatatgccccctcgttgaacagataagatgactgcatatcgttttattaagaagaaaggtctgaaacaggaagaaatcccaaaccacattcacacccacaacactctagaagactagaacatactttttctctctcgaaaacacaggagagctgcgcttcattatttaagaagcagcaaacaaggtcccaaaatgggccagcacaaagggtggcactttacagtagccagcacctgacatagacaaacttatccataaaaacacgtcacagcactcaaacacctaaatcaggcccatatcccggctaactcagtagccccagcaagggccaattcctggcatcctctccgatatctcgcagcacctgggacacatccgccacgccttcttcgaagatagtaattgcgatgtttccacaaccaccaagccactaaaatcaccacagaattgaactcatttccctgcggtttggggactcttctctctgcttgattccaccaatcctgaaaattgacctccctgggcattgggctaaggtgctgtaagttgattagagaaagaacttgaaaccagacctgtctaccaaacgcacaggccaccaacaaatgctgaactgtttcctctttctgatcacataacaggcaaagttcaagatgctcaagtcctcttctagcaagccagtccacagtccagcacctattgaggctcgcaagccaaatgaaaaacttacatttcggagggccccaggttttccaaacccttttagccggtttaaaggctactgaccctacgaagaacctttcatatgctgacttggaagagtagcacctggaagcagaaggggtccaaagatgcacgtcttgtacacccggagccaaattgaactcatttaggatgacctagagctgtagaaattccatctacgtttgagcattactgcacctcttatatgtctgacaccaacaaccattgttcatagtgtcctgtactgtttgtatctgctgaaccttactggggatgagcttgataagagagggtgccaagaccgacaaggattgcccatggagccacctgccataccaaaacgtgctgctagcaccatctcccaccgcagttacaagcgaagcagtgaacatagcaagaccagaacatactgaaaagaaagaccaaaagcaacatgaccaaaactaccacactattgcctgtgcccctcctaaaggtctcccaataagcttcaggaggccctttgctctagctgagtaccaaaggatgcactcataagttacagcttgcaacaccgttgtaaggcttggagtagagccgttaaaaacacagttgtcctgtcccaagccaccaatattgccagtgaattgaaccccttctgtagtccattgttacctctttaactgcctggtaggctggtaccactagcttgagaatctatgggttgatggttgggctgcaatggagacaaaagcaattttctgcaacctgcaaaatggtgaactagattttccaggcgaaaacacatgaaatcaataggtgctgtgtggtcttctcttcttcatcagaaggggcaagcagctgggtgggaagtcctcttttagtgatccggtccgcatttcaagaacggttctttactgcaagccaaatggagagcttgcagcaaagaggagcccaggacttccaaattcgtttccatggagcaaagcggatggaactaaggaaaaaggtattgtaggccgactttgctagagtaagaatcgttcctagtaagcctccaaacaagctgatcagcatcattctgcttcagcgagaaaccttccatcaagtctcataagcggagatattatgtaagaacctggacagagagctcctcttatgtcagctacccaacgatgggggtacatcacttgatgatcctcttgaattccctagttgatcatttttcagtttattgccaaatctagctgtgttcttgtggctgtgaaattatatctcccatgctgatacttgattcccttatctttgcttcattactacaccacagtaatttggatctgccattatgttactatgtaactctcatttgatatcaatcacagctgccacatacaaaatacaagtatgtttatctagataagatcttgattcatcaatcaccactgatctgagttttcgccactgcgatgcgaggaaaagacagatatctaataacatcttggtgaagatgttcttaggtcctttgctttctcttcaagtcagcttcctttgatttcattcctcaaactatcaatcacaggctgcagcacgtgtaatccgcatcggttcaagaacagatttcatgcttggtgatattttgcatcctgcgataaattgggctgataaagagtctcatctggatcctgatgaaatggccaagatgaagtctgcttttattggtaacctgccagaagatgttaatgaggagtacttgagaaagctttttggacagttcggtgaggtagtacgggttgctatctcaagaaaaggacaatgtccagttgcttttgttcacttcgccaaacgttcagagcttgagaatgctatagaagaaatggatggtaaaacggtgagaggacctggtcgagggccgtctttcaagatccaggtgtcagttgctcgacctacggcagacaacgacaagaagcgatctcgtgaagaagtgagaactagaagatcaaatgcatcaggagataggcgagattattctcatggaagatatggacacgattcacttgatcgtcaagtgaaagctccaagattatctaattatgtggccgatgctgctgacccctatgaatcagctgttaattcattaccttcagctgtcaaggaagtcttgcttcgaattctacgtctaagaattggtactcgatatgatattgatatccattgtgttaaaagccttgatgagcttcctgagtcatctgctcttgctgtccttaatcagtttttgatatcaggtggagacaaacacaacaaaggagattattttgcatcgttggttgctaaggctgagacctttggcttaacacatgcattacacggtaccacttatttgtcaagaaatccggaaatgcatagcaagcgatacccacatgaagattatgattttgtgacacccaggagcagtaggtacgattcgtcagcccatcatccttcaacatactacgaagacgatccaccagtgtctgagtcaagggttagaagatatgctgaagaaaggtccaccattgtaagaagcccagaaccacgtccgcgatatgacgaaacagacataagaataaacccagaaccaagattaccatatgaatcaagacacaacgccgaaaagcatctcgatcgaagatacatacaagagcatagttcaaatattgaaagaccagctgaagaagctctcctttctagggaaaggagatttctgcctgctgcagggtacatgccgaacccaggcggctcggatttccgctccaggtcgcccgccgaatattcagcacaacgccaacaaatgaggtttgatccattcacaggtgaaccttacaagtttgatcccttcacaggggagcccatcaggccagatccgaaccagcgccgctcaggaagcctgtactgatcagattagttggagcgatatgccagataagaccctgaaacaaagctagatctggataactcttcttcttgtctgccaagtgtctctgtgattttgcttgtgggctacagatcatgtaccccgagcaccatgtgtgatccagtcggactaatcatttcggcattgaaaagtcggactaactttttttgtgcccataacgctacgtattgtttggtagattaattaaaaattcatccggtgaaaagcaattttctggtatttttctggaggtgcagtaggcgtggtaatgcagaatttcaactgctacgtacactgcaagcgctgttttacccgattcgtctttacgtgttgccaaatgtttcattgacttcatagaactgatttcgactactttggatgctgagcaagggaccatgcctttctcacatatactcatctggagaatgtcaagcaagacggcccatctggacacatggcaagaagagataaactagctagctgcctcccaatgatgctactaccttctcttcgactgcttcaacgttcacatgcccctcccttgcatggcgtagtaaactgggttgcttgaaaaaacgccacttctaagcgta

SEQ ID NO: 2773 - DNA, 6399 bp, Zea Mays
agcaaatggtatatgacaggtcgggcccagtgcttcataaaagcacatttgctcacccaaagagagagaaagaggtgatattgataagacgggaaaataccctaggctctcgccagtctccggtgcggctcaacaccgaccgaacccgtgaaaaattcgttctcctttcgatccgtttggcggggggctcggccggatccgaccggaggggcgccgccgatccatccggtcgcagccgcgtctgatttggtgcggattttggcgagataccccgctcctagctccgctgtttcaaggataacaaagatggcgtcgccgcggggcgggttcgatgagcaagatcgccggacggagaagggcaccgaggtgttcgtcggcgggctgccgcggtcggccacggaaagcacgctccgagagatattttcttcatgcggagagattattgacgcgcgcataatgaaagatcagagtggtcactcaaagggatatggttttgtgcggtttgcaaagagggattatgctaatactgccaaaaggcaaaagaatggtattgaggttcaaggaaagaggcttgtggttgagctttcaatggatcaagatacagttttctttggaaatctttgcaaagagtggactttagaagaatttgaagaattgattcacaaggcattcaaagatgttgtttcggttgaccttgcaatggcgtcaaatcttggttcttcaaacaagaagaatatcaatcgaggctttggatttgtgagattttcttctcatgcagtattggccaaatattattgcctcttgttttctttttcagtttaattggataaaacaaccttatacaaatatcaagatatgtgcaaaattaccttaccctactgtcctttctagtaggaaaagaagcacatatgccatttgtctcatgcattatcaagtgacgatatatccttaatgcccctatgtcctaataaaaatatggagccaaatgatgaatcggcaccaaattatcaaaataccttatgatctgctgaaaaactatggaattcacatctttgacttcaatgacttgtatactttgacattgattttggatttctatggcaaaatactttatgatcagctggcaagctaaggaattcacatccctgatttgtatacttgacattgattttggatttacatggcaacataatttctccatctcttatgtcataaatgactgactaatgttgcaaagaatggattttaattgttaccgttttcacatgaaaattccctgttgcattgtgggtacttttgaagaagccacagacattgaagaatcctttgttcaacacagttatagagaaaaaattggtacgccatataggaaagggacatggcagaattttcaccttagtcatatcttgtatctttgatctgctcttcatatttacatttatatccatggttgaagttcattataaagtgtacgaggatgaaataatgaccactggccagtgtttgtctgaaatgaattcccaatctttctagttcactgggtggtgctatatctgatgaaacagtctggaaggatgatgattggttagccaagccaaaggttacttgcatgcgtgccttttctgatctgcaacattcacaatctgtactgtgtactccatgcccactagtatttaactacatgaaatcaccggcatttgtcatcatttatctggatgacctttgttctatagagacctgtgagaaccacataatgccatagaggtaatgtcgttccagagtttagccagagtttttagcaacagcaaaacccaaaacccatatgtaggatatttagaaacacggatggggaaatcaacatatattttattaatcatctacttccatgtgatgtagaagttcccttgcagttcctctctctctctctctcagaccaagagtcaaataagagcttacaacaaattaatggttgcaatgaagtttaacagttcagttatgaaggcctgaagattactgttgattgaagcaacactgttacttgacagcttcttctgttgcttgtgtttgcgctccattaaaatttggcattctttgacttgcctatatatttctttaattcaagtaaaagtagactatatgccccctcgttgaacagataagatgactgcatatcgttttattaagaagaaaggtctgaaacaggaagaaatcccaaaccacattcacacccacaacactctagaagactagaacatactttttctctctcgaaaacacaggagagctgcgcttcattatttaagaagcagcaaacaaggtcccaaaatgggccagcacaaagggtggcactttacagtagccagcacctgacatagacaaacttatccataaaaacacgtcacagcactcaaacacctaaatcaggcccatatcccggctaactcagtagccccagcaagggccaattcctggcatcctctccgatatctcgcagcacctgggacacatccgccacgccttcttcgaagatagtaattgcgatgtttccacaaccaccaagccactaaaatcaccacagaattgaactcatttccctgcggtttggggactcttctctctgcttgattccaccaatcctgaaaattgacctccctgggcattgggctaaggtgctgtaagttgattagagaaagaacttgaaaccagacctgtctaccaaacgcacaggccaccaacaaatgctgaactgtttcctctttctgatcacataacaggcaaagttcaagatgctcaagtcctcttctagcaagccagtccacagtccagcacctattgaggctcgcaagccaaatgaaaaacttacatttcggagggccccaggttttccaaacccttttagccggtttaaaggctactgaccctacgaagaacctttcatatgctgacttggaagagtagcacctggaagcagaaggggtccaaagatgcacgtcttgtacacccggagccaaattgaactcatttaggatgacctagagctgtagaaattccatctacgtttgagcattactgcacctcttatatgtctgacaccaacaaccattgttcatagtgtcctgtactgtttgtatctgctgaaccttactggggatgagcttgataagagagggtgccaagaccgacaaggattgcccatggagccacctgccataccaaaacgtgctgctagcaccatctcccaccgcagttacaagcgaagcagtgaacatagcaagaccagaacatactgaaaagaaagaccaaaagcaacatgaccaaaactaccacactattgcctgtgcccctcctaaaggtctcccaataagcttcaggaggccctttgctctagctgagtaccaaaggatgcactcataagttacagcttgcaacaccgttgtaaggcttggagtagagccgttaaaaacacagttgtcctgtcccaagccaccaatattgccagtgaattgaaccccttctgtagtccattgttacctctttaactgcctggtaggctggtaccactagcttgagaatctatgggttgatggttgggctgcaatggagacaaaagcaattttctgcaacctgcaaaatggtgaactagattttccaggcgaaaacacatgaaatcaataggtgctgtgtggtcttctcttcttcatcagaaggggcaagcagctgggtgggaagtcctcttttagtgatccggtccgcatttcaagaacggttctttactgcaagccaaatggagagcttgcagcaaagaggagcccaggacttccaaattcgtttccatggagcaaagcggatggaactaaggaaaaaggtattgtaggccgactttgctagagtaagaatcgttcctagtaagcctccaaacaagctgatcagcatcattctgcttcagcgagaaaccttccatcaagtctcataagcggagatattatgtaagaacctggacagagagctcctcttatgtcagctacccaacgatgggggtacatcacttgatgatcctcttgaattccctagttgatcatttttcagtttattgccaaatctagctgtgttcttgtggctgtgaaattatatctcccatgctgatacttgattcccttatctttgcttcattactacaccacagtaatttggatctgccattatgttactatgtaactctcatttgatatcaatcacagctgccacatacaaaatacaagtatgtttatctagataagatcttgattcatcaatcaccactgatctgagttttcgccactgcgatgcgaggaaaagacagatatctaataacatcttggtgaagatgttcttaggtcctttgctttctcttcaagtcagcttcctttgatttcattcctcaaactatcaatcacaggctgcagcacgtgtaatccgcatcggttcaagaacagatttcatgcttggtgatattttgcatcctgcgataaattgggctgataaagagtctcatctggatcctgatgaaatggccaagatgaagtctgcttttattggtaacctgccagaagatgttaatgaggagtacttgagaaagctttttggacagttcggtgaggtagtacgggttgctatctcaagaaaaggacaatgtccagttgcttttgttcacttcgccaaacgttcagagcttgagaatgctatagaagaaatggatggtaaaacggtgagaggacctggtcgagggccgtctttcaagatccaggtgtcagttgctcgacctacggcagacaacgacaagaagcgatctcgtgaagaagtgagaactagaagatcaaatgcatcaggagataggcgagattattctcatggaagatatggacacgattcacttgatcgtcaagtgaaagctccaagattatctaattatgtggccgatgctgctgacccctatgaatcagctgttaattcattaccttcagctgtcaaggaagtcttgcttcgaattctacgtctaagaattggtactcgatatgatattgatatccattgtgttaaaagccttgatgagcttcctgagtcatctgctcttgctgtccttaatcagtttttgatatcaggtggagacaaacacaacaaaggagattattttgcatcgttggttgctaagcaccaggctgagacctttggcttaacacatgcattacacggtaccacttatttgtcaagaaatccggaaatgcatagcaagcgatacccacatgaagattatgattttgtgacacccagtaggtacgattcgtcagcccatcatccttcaacatactacgaagacgatccaccagtgtctgagtcaagggttagaagatatgctgaagaaaggtccaccattgtaagaagcccagaaccacgtccgcgatatgacgaaacagacataagaataaacccagaaccaagattaccatatgaatcaagacacaacgccgaaaagcatctcgatcgaagatacatacaagagcatagttcaaatattgaaagaccagctgaagaagctctcctttctagggaaaggagatttctgcctgctgcagggtacatgccgaacccaggcggctcggatttccgctccaggtcgcccgccgaatattcagcacaacgccaacaaatgaggtttgatccattcacaggtgaaccttacaagtttgatcccttcacaggggagcccatcaggccagatccgaaccagcgccgctcaggaagcctgtactgatcagattagttggagcgatatgccagataagaccctgaaacaaagctagatctggataactcttcttcttgtctgccaagtgtctctgtgattttgcttgtgggctacagatcatgtaccccgagcaccatgtgtgatccagtcggactaatcatttcggcattgaaaagtcggactaactttttttgtgcccataacgctacgtattgtttggtagattaattaaaaattcatccggtgaaaagcaattttctggtatttttctggaggtgcagtaggcgtggtaatgcagaatttcaactgctacgtacactgcaagcgctgttttacccgattcgtctttacgtgttgccaaatgtttcattgacttcatagaactgatttcgactactttggatgctgagcaagggaccatgcctttctcacatatactcatctggagaatgtcaagcaagacggcccatctggacacatggcaagaagagataaactagctagctgcctcccaatgatgctactaccttctcttcgactgcttcaacgttcacatgcccctcccttgcatggcgtagtaaactgggttgcttgaaaaaacgccacttctaagcgta

SEQ ID NO: 2774 - DNA, 6319 bp, Zea Mays
agcaaatggtatatgacaggtcgggcccagtgcttcataaaagcacatttgctcacccaaagagagagaaagaggtgatattgataagacgggaaaataccctaggctctcgccagtctccggtgcggctcaacaccgaccgaacccgtgaaaaattcgttctcctttcgatccgtttggcggggggctcggccggatccgaccggaggggcgccgccgatccatccggtcgcagccgcgtctgatttggtgcggattttggcgagataccccgctcctagctccgctgtttcaaggataacaaagatggcgtcgccgcggggcgggttcgatgagcaagatcgccggacggagaagggcaccgaggtgttcgtcggcgggctgccgcggtcggccacggaaagcacgctccgagagatattttcttcatgcggagagattattgacgcgcgcataatgaaagatcagagtggtcactcaaagggatatggttttgtgcggtttgcaaagagggattatgctaatactgccaaaaggcaaaagaatggtattgaggttcaaggaaagaggcttgtggttgagctttcaatggatcaagatacagttttctttggaaatctttgcaaagagtggactttagaagaatttgaagaattgattcacaaggcattcaaagatgttgtttcggttgaccttgcaatggcgtcaaatcttggttcttcaaacaagaagaatatcaatcgaggctttggatttgtgagattttcttctcatgcagtattggccaaatattattgcctcttgttttctttttcagtttaattggataaaacaaccttatacaaatatcaagatatgtgcaaaattaccttaccctactgtcctttctagtaggaaaagaagcacatatgccatttgtctcatgcattatcaagtgacgatatatccttaatgcccctatgtcctaataaaaatatggagccaaatgatgaatcggcaccaaattatcaaaataccttatgatctgctgaaaaactatggaattcacatctttgacttcaatgacttgtatactttgacattgattttggatttctatggcaaaatactttatgatcagctggcaagctaaggaattcacatccctgatttgtatacttgacattgattttggatttacatggcaacataatttctccatctcttatgtcataaatgactgactaatgttgcaaagaatggattttaattgttaccgttttcacatgaaaattccctgttgcattgtgggtacttttgaagaagccacagacattgaagaatcctttgttcaacacagttatagagaaaaaattggtacgccatataggaaagggacatggcagaattttcaccttagtcatatcttgtatctttgatctgctcttcatatttacatttatatccatggttgaagttcattataaagtgtacgaggatgaaataatgaccactggccagtgtttgtctgaaatgaattcccaatctttctagttcactgggtggtgctatatctgatgaaacagtctggaaggatgatgattggttagccaagccaaaggttacttgcatgcgtgccttttctgatctgcaacattcacaatctgtactgtgtactccatgcccactagtatttaactacatgaaatcaccggcatttgtcatcatttatctggatgacctttgttctatagagacctgtgagaaccacataatgccatagaggtaatgtcgttccagagtttagccagagtttttagcaacagcaaaacccaaaacccatatgtaggatatttagaaacacggatggggaaatcaacatatattttattaatcatctacttccatgtgatgtagaagttcccttgcagttcctctctctctctctctcagaccaagagtcaaataagagcttacaacaaattaatggttgcaatgaagtttaacagttcagttatgaaggcctgaagattactgttgattgaagcaacactgttacttgacagcttcttctgttgcttgtgtttgcgctccattaaaatttggcattctttgacttgcctatatatttctttaattcaagtaaaagtagactatatgccccctcgttgaacagataagatgactgcatatcgttttattaagaagaaaggtctgaaacaggaagaaatcccaaaccacattcacacccacaacactctagaagactagaacatactttttctctctcgaaaacacaggagagctgcgcttcattatttaagaagcagcaaacaaggtcccaaaatgggccagcacaaagggtggcactttacagtagccagcacctgacatagacaaacttatccataaaaacacgtcacagcactcaaacacctaaatcaggcccatatcccggctaactcagtagccccagcaagggccaattcctggcatcctctccgatatctcgcagcacctgggacacatccgccacgccttcttcgaagatagtaattgcgatgtttccacaaccaccaagccactaaaatcaccacagaattgaactcatttccctgcggtttggggactcttctctctgcttgattccaccaatcctgaaaattgacctccctgggcattgggctaaggtgctgtaagttgattagagaaagaacttgaaaccagacctgtctaccaaacgcacaggccaccaacaaatgctgaactgtttcctctttctgatcacataacaggcaaagttcaagatgctcaagtcctcttctagcaagccagtccacagtccagcacctattgaggctcgcaagccaaatgaaaaacttacatttcggagggccccaggttttccaaacccttttagccggtttaaaggctactgaccctacgaagaacctttcatatgctgacttggaagagtagcacctggaagcagaaggggtccaaagatgcacgtcttgtacacccggagccaaattgaactcatttaggatgacctagagctgtagaaattccatctacgtttgagcattactgcacctcttatatgtctgacaccaacaaccattgttcatagtgtcctgtactgtttgtatctgctgaaccttactggggatgagcttgataagagagggtgccaagaccgacaaggattgcccatggagccacctgccataccaaaacgtgctgctagcaccatctcccaccgcagttacaagcgaagcagtgaacatagcaagaccagaacatactgaaaagaaagaccaaaagcaacatgaccaaaactaccacactattgcctgtgcccctcctaaaggtctcccaataagcttcaggaggccctttgctctagctgagtaccaaaggatgcactcataagttacagcttgcaacaccgttgtaaggcttggagtagagccgttaaaaacacagttgtcctgtcccaagccaccaatattgccagtgaattgaaccccttctgtagtccattgttacctctttaactgcctggtaggctggtaccactagcttgagaatctatgggttgatggttgggctgcaatggagacaaaagcaattttctgcaacctgcaaaatggtgaactagattttccaggcgaaaacacatgaaatcaataggtgctgtgtggtcttctcttcttcatcagaaggggcaagcagctgggtgggaagtcctcttttagtgatccggtccgcatttcaagaacggttctttactgcaagccaaatggagagcttgcagcaaagaggagcccaggacttccaaattcgtttccatggagcaaagcggatggaactaaggaaaaaggtattgtaggccgactttgctagagtaagaatcgttcctagtaagcctccaaacaagctgatcagcatcattctgcttcagcgagaaaccttccatcaagtctcataagcggagatattatgtaagaacctggacagagagctcctcttatgtcagctacccaacgatgggggtacatcacttgatgatcctcttgaattccctagttgatcatttttcagtttattgccaaatctagctgtgttcttgtggctgtgaaattatatctcccatgctgatacttgattcccttatctttgcttcattactacaccacagtaatttggatctgccattatgttactatgtaactctcatttgatatcaatcacagctgccacatacaaaatacaagtatgtttatctagataagatcttgattcatcaatcaccactgatctgagttttcgccactgcgatgcgaggaaaagacagatatctaataacatcttggtgaagatgttcttaggtcctttgctttctcttcaagtcagcttcctttgatttcattcctcaaactatcaatcacaggctgcagcacgtgtaatccgcatcggttcaagaacagatttcatgcttggtgatattttgcatcctgcgataaattgggctgataaagagtctcatctggatcctgatgaaatggccaagatgaagtctgcttttattggtaacctgccagaagatgttaatgaggagtacttgagaaagctttttggacagttcggtgaggtagtacgggttgctatctcaagaaaaggacaatgtccagttgcttttgttcacttcgccaaacgttcagagcttgagaatgctatagaagaaatggatggtaaaacggtgagaggacctggtcgagggccgtctttcaagatccaggtgtcagttgctcgacctacggcagacaacgacaagaagcgatctcgtgaagaagtgagaactagaagatcaaatgcatcaggagataggcgagattattctcatggaagatatggacacgattcacttgatcgtcaagtgaaagctccaagattatctaattatgtggccgatgctgctgacccctatgaatcagctgttaattcattaccttcagctgtcaaggaagtcttgcttcgaattctacgtctaagaattggtactcgatatgatattgatatccattgtgttaaaagccttgatgagcttcctgagtcatctgctcttgctgtccttaatcagtttttgatatcaggtggagacaaacacaacaaaggagattattttgcatcgttggttgctaagcaccaggctgagacctttggcttaacacatgcattacacggtaccacttatttgtcaagaaatccggaaatgcatagcaagcgatacccacatgaagattatgattttgtgacacccaggagcagtaggtacgattcgtcagcccatcatccttcaacatactacgaagacgatccaccagtgtctgagtcaagggttagaagatatgctgaagaaaggtccaccattgtaagaagcccagaaccacgtccgcgatatgacgaaacagacataagaataaacccagaaccaagattaccatatgaatcaagacacaacgccgaaaagcatctcgatcgaagatacatacaagagcatagttcaaatattgaaagaccagctgaagaagctctcctttctagggaaaggagatttctgcctgctgcagggtacatgccgaacccaggcggctcggatttccgctccaggggagcccatcaggccagatccgaaccagcgccgctcaggaagcctgtactgatcagattagttggagcgatatgccagataagaccctgaaacaaagctagatctggataactcttcttcttgtctgccaagtgtctctgtgattttgcttgtgggctacagatcatgtaccccgagcaccatgtgtgatccagtcggactaatcatttcggcattgaaaagtcggactaactttttttgtgcccataacgctacgtattgtttggtagattaattaaaaattcatccggtgaaaagcaattttctggtatttttctggaggtgcagtaggcgtggtaatgcagaatttcaactgctacgtacactgcaagcgctgttttacccgattcgtctttacgtgttgccaaatgtttcattgacttcatagaactgatttcgactactttggatgctgagcaagggaccatgcctttctcacatatactcatctggagaatgtcaagcaagacggcccatctggacacatggcaagaagagataaactagctagctgcctcccaatgatgctactaccttctcttcgactgcttcaacgttcacatgcccctcccttgcatggcgtagtaaactgggttgcttgaaaaaacgccacttctaagcgta

SEQ ID NO: 2775 - DNA, 6146 bp, Zea Mays
agcaaatggtatatgacaggtcgggcccagtgcttcataaaagcacatttgctcacccaaagagagagaaagaggtgatattgataagacgggaaaataccctaggctctcgccagtctccggtgcggctcaacaccgaccgaacccgtgaaaaattcgttctcctttcgatccgtttggcggggggctcggccggatccgaccggaggggcgccgccgatccatccggtcgcagccgcgtctgatttggtgcggattttggcgagataccccgctcctagctccgctgtttcaaggataacaaagatggcgtcgccgcggggcgggttcgatgagcaagatcgccggacggagaagggcaccgaggtgttcgtcggcgggctgccgcggtcggccacggaaagcacgctccgagagatattttcttcatgcggagagattattgacgcgcgcataatgaaagatcagagtggtcactcaaagggatatggttttgtgcggtttgcaaagagggattatgctaatactgccaaaaggcaaaagaatggtattgaggttcaaggaaagaggcttgtggttgagctttcaatggatcaagatacagttttctttggaaatctttgcaaagagtggactttagaagaatttgaagaattgattcacaaggcattcaaagatgttgtttcggttgaccttgcaatggcgtcaaatcttggttcttcaaacaagaagaatatcaatcgaggctttggatttgtgagattttcttctcatgcagtattggccaaatattattgcctcttgttttctttttcagtttaattggataaaacaaccttatacaaatatcaagatatgtgcaaaattaccttaccctactgtcctttctagtaggaaaagaagcacatatgccatttgtctcatgcattatcaagtgacgatatatccttaatgcccctatgtcctaataaaaatatggagccaaatgatgaatcggcaccaaattatcaaaataccttatgatctgctgaaaaactatggaattcacatctttgacttcaatgacttgtatactttgacattgattttggatttctatggcaaaatactttatgatcagctggcaagctaaggaattcacatccctgatttgtatacttgacattgattttggatttacatggcaacataatttctccatctcttatgtcataaatgactgactaatgttgcaaagaatggattttaattgttaccgttttcacatgaaaattccctgttgcattgtgggtacttttgaagaagccacagacattgaagaatcctttgttcaacacagttatagagaaaaaattgttcactgggtggtgctatatctgatgaaacagtctggaaggatgatgattggttagccaagccaaaggttacttgcatgcgtgccttttctgatctgcaacattcacaatctgtactgtgtactccatgcccactagtatttaactacatgaaatcaccggcatttgtcatcatttatctggatgacctttgttctatagagacctgtgagaaccacataatgccatagaggtaatgtcgttccagagtttagccagagtttttagcaacagcaaaacccaaaacccatatgtaggatatttagaaacacggatggggaaatcaacatatattttattaatcatctacttccatgtgatgtagaagttcccttgcagttcctctctctctctctctcagaccaagagtcaaataagagcttacaacaaattaatggttgcaatgaagtttaacagttcagttatgaaggcctgaagattactgttgattgaagcaacactgttacttgacagcttcttctgttgcttgtgtttgcgctccattaaaatttggcattctttgacttgcctatatatttctttaattcaagtaaaagtagactatatgccccctcgttgaacagataagatgactgcatatcgttttattaagaagaaaggtctgaaacaggaagaaatcccaaaccacattcacacccacaacactctagaagactagaacatactttttctctctcgaaaacacaggagagctgcgcttcattatttaagaagcagcaaacaaggtcccaaaatgggccagcacaaagggtggcactttacagtagccagcacctgacatagacaaacttatccataaaaacacgtcacagcactcaaacacctaaatcaggcccatatcccggctaactcagtagccccagcaagggccaattcctggcatcctctccgatatctcgcagcacctgggacacatccgccacgccttcttcgaagatagtaattgcgatgtttccacaaccaccaagccactaaaatcaccacagaattgaactcatttccctgcggtttggggactcttctctctgcttgattccaccaatcctgaaaattgacctccctgggcattgggctaaggtgctgtaagttgattagagaaagaacttgaaaccagacctgtctaccaaacgcacaggccaccaacaaatgctgaactgtttcctctttctgatcacataacaggcaaagttcaagatgctcaagtcctcttctagcaagccagtccacagtccagcacctattgaggctcgcaagccaaatgaaaaacttacatttcggagggccccaggttttccaaacccttttagccggtttaaaggctactgaccctacgaagaacctttcatatgctgacttggaagagtagcacctggaagcagaaggggtccaaagatgcacgtcttgtacacccggagccaaattgaactcatttaggatgacctagagctgtagaaattccatctacgtttgagcattactgcacctcttatatgtctgacaccaacaaccattgttcatagtgtcctgtactgtttgtatctgctgaaccttactggggatgagcttgataagagagggtgccaagaccgacaaggattgcccatggagccacctgccataccaaaacgtgctgctagcaccatctcccaccgcagttacaagcgaagcagtgaacatagcaagaccagaacatactgaaaagaaagaccaaaagcaacatgaccaaaactaccacactattgcctgtgcccctcctaaaggtctcccaataagcttcaggaggccctttgctctagctgagtaccaaaggatgcactcataagttacagcttgcaacaccgttgtaaggcttggagtagagccgttaaaaacacagttgtcctgtcccaagccaccaatattgccagtgaattgaaccccttctgtagtccattgttacctctttaactgcctggtaggctggtaccactagcttgagaatctatgggttgatggttgggctgcaatggagacaaaagcaattttctgcaacctgcaaaatggtgaactagattttccaggcgaaaacacatgaaatcaataggtgctgtgtggtcttctcttcttcatcagaaggggcaagcagctgggtgggaagtcctcttttagtgatccggtccgcatttcaagaacggttctttactgcaagccaaatggagagcttgcagcaaagaggagcccaggacttccaaattcgtttccatggagcaaagcggatggaactaaggaaaaaggtattgtaggccgactttgctagagtaagaatcgttcctagtaagcctccaaacaagctgatcagcatcattctgcttcagcgagaaaccttccatcaagtctcataagcggagatattatgtaagaacctggacagagagctcctcttatgtcagctacccaacgatgggggtacatcacttgatgatcctcttgaattccctagttgatcatttttcagtttattgccaaatctagctgtgttcttgtggctgtgaaattatatctcccatgctgatacttgattcccttatctttgcttcattactacaccacagtaatttggatctgccattatgttactatgtaactctcatttgatatcaatcacagctgccacatacaaaatacaagtatgtttatctagataagatcttgattcatcaatcaccactgatctgagttttcgccactgcgatgcgaggaaaagacagatatctaataacatcttggtgaagatgttcttaggtcctttgctttctcttcaagtcagcttcctttgatttcattcctcaaactatcaatcacaggctgcagcacgtgtaatccgcatcggttcaagaacagatttcatgcttggtgatattttgcatcctgcgataaattgggctgataaagagtctcatctggatcctgatgaaatggccaagatgaagtctgcttttattggtaacctgccagaagatgttaatgaggagtacttgagaaagctttttggacagttcggtgaggtagtacgggttgctatctcaagaaaaggacaatgtccagttgcttttgttcacttcgccaaacgttcagagcttgagaatgctatagaagaaatggatggtaaaacggtgagaggacctggtcgagggccgtctttcaagatccaggtgtcagttgctcgacctacggcagacaacgacaagaagcgatctcgtgaagaagtgagaactagaagatcaaatgcatcaggagataggcgagattattctcatggaagatatggacacgattcacttgatcgtcaagtgaaagctccaagattatctaattatgtggccgatgctgctgacccctatgaatcagctgttaattcattaccttcagctgtcaaggaagtcttgcttcgaattctacgtctaagaattggtactcgatatgatgtggagacaaacacaacaaaggagattattttgcatcgttggttgctaagcaccaggctgagacctttggcttaacacatgcattacacggtaccacttatttgtcaagaaatccggaaatgcatagcaagcgatacccacatgaagattatgattttgtgacacccaggagcagtaggtacgattcgtcagcccatcatccttcaacatactacgaagacgatccaccagtgtctgagtcaagggttagaagatatgctgaagaaaggtccaccattgtaagaagcccagaaccacgtccgcgatatgacgaaacagacataagaataaacccagaaccaagattaccatatgaatcaagacacaacgccgaaaagcatctcgatcgaagatacatacaagagcatagttcaaatattgaaagaccagctgaagaagctctcctttctagggaaaggagatttctgcctgctgcagggtacatgccgaacccaggcggctcggatttccgctccaggtcgcccgccgaatattcagcacaacgccaacaaatgaggtttgatccattcacaggtgaaccttacaagtttgatcccttcacaggggagcccatcaggccagatccgaaccagcgccgctcaggaagcctgtactgatcagattagttggagcgatatgccagataagaccctgaaacaaagctagatctggataactcttcttcttgtctgccaagtgtctctgtgattttgcttgtgggctacagatcatgtaccccgagcaccatgtgtgatccagtcggactaatcatttcggcattgaaaagtcggactaactttttttgtgcccataacgctacgtattgtttggtagattaattaaaaattcatccggtgaaaagcaattttctggtatttttctggaggtgcagtaggcgtggtaatgcagaatttcaactgctacgtacactgcaagcgctgttttacccgattcgtctttacgtgttgccaaatgtttcattgacttcatagaactgatttcgactactttggatgctgagcaagggaccatgcctttctcacatatactcatctggagaatgtcaagcaagacggcccatctggacacatggcaagaagagataaactagctagctgcctcccaatgatgctactaccttctcttcgactgcttcaacgttcacatgcccctcccttgcatggcgtagtaaactgggttgcttgaaaaaacgccacttctaagcgta

SEQ ID NO: 2776 - DNA, 6316 bp, Zea Mays
agcaaatggtatatgacaggtcgggcccagtgcttcataaaagcacatttgctcacccaaagagagagaaagaggtgatattgataagacgggaaaataccctaggctctcgccagtctccggtgcggctcaacaccgaccgaacccgtgaaaaattcgttctcctttcgatccgtttggcggggggctcggccggatccgaccggaggggcgccgccgatccatccggtcgcagccgcgtctgatttggtgcggattttggcgagataccccgctcctagctccgctgtttcaaggataacaaagatggcgtcgccgcggggcgggttcgatgagcaagatcgccggacggagaagggcaccgaggtgttcgtcggcgggctgccgcggtcggccacggaaagcacgctccgagagatattttcttcatgcggagagattattgacgcgcgcataatgaaagatcagagtggtcactcaaagggatatggttttgtgcggtttgcaaagagggattatgctaatactgccaaaaggcaaaagaatggtattgaggttcaaggaaagaggcttgtggttgagctttcaatggatcaagatacagttttctttggaaatctttgcaaagagtggactttagaagaatttgaagaattgattcacaaggcattcaaagatgttgtttcggttgaccttgcaatggcgtcaaatcttggttcttcaaacaagaagaatatcaatcgaggctttggatttgtgagattttcttctcatgcagtattggccaaatattattgcctcttgttttctttttcagtttaattggataaaacaaccttatacaaatatcaagatatgtgcaaaattaccttaccctactgtcctttctagtaggaaaagaagcacatatgccatttgtctcatgcattatcaagtgacgatatatccttaatgcccctatgtcctaataaaaatatggagccaaatgatgaatcggcaccaaattatcaaaataccttatgatctgctgaaaaactatggaattcacatctttgacttcaatgacttgtatactttgacattgattttggatttctatggcaaaatactttatgatcagctggcaagctaaggaattcacatccctgatttgtatacttgacattgattttggatttacatggcaacataatttctccatctcttatgtcataaatgactgactaatgttgcaaagaatggattttaattgttaccgttttcacatgaaaattccctgttgcattgtgggtacttttgaagaagccacagacattgaagaatcctttgttcaacacagttatagagaaaaaattggtacgccatataggaaagggacatggcagaattttcaccttagtcatatcttgtatctttgatctgctcttcatatttacatttatatccatggttgaagttcattataaagtgtacgaggatgaaataatgaccactggccagtgtttgtctgaaatgaattcccaatctttctagttcactgggtggtgctatatctgatgaaacagtctggaaggatgatgattggttagccaagccaaaggttacttgcatgcgtgccttttctgatctgcaacattcacaatctgtactgtgtactccatgcccactagtatttaactacatgaaatcaccggcatttgtcatcatttatctggatgacctttgttctatagagacctgtgagaaccacataatgccatagaggtaatgtcgttccagagtttagccagagtttttagcaacagcaaaacccaaaacccatatgtaggatatttagaaacacggatggggaaatcaacatatattttattaatcatctacttccatgtgatgtagaagttcccttgcagttcctctctctctctctctcagaccaagagtcaaataagagcttacaacaaattaatggttgcaatgaagtttaacagttcagttatgaaggcctgaagattactgttgattgaagcaacactgttacttgacagcttcttctgttgcttgtgtttgcgctccattaaaatttggcattctttgacttgcctatatatttctttaattcaagtaaaagtagactatatgccccctcgttgaacagataagatgactgcatatcgttttattaagaagaaaggtctgaaacaggaagaaatcccaaaccacattcacacccacaacactctagaagactagaacatactttttctctctcgaaaacacaggagagctgcgcttcattatttaagaagcagcaaacaaggtcccaaaatgggccagcacaaagggtggcactttacagtagccagcacctgacatagacaaacttatccataaaaacacgtcacagcactcaaacacctaaatcaggcccatatcccggctaactcagtagccccagcaagggccaattcctggcatcctctccgatatctcgcagcacctgggacacatccgccacgccttcttcgaagatagtaattgcgatgtttccacaaccaccaagccactaaaatcaccacagaattgaactcatttccctgcggtttggggactcttctctctgcttgattccaccaatcctgaaaattgacctccctgggcattgggctaaggtgctgtaagttgattagagaaagaacttgaaaccagacctgtctaccaaacgcacaggccaccaacaaatgctgaactgtttcctctttctgatcacataacaggcaaagttcaagatgctcaagtcctcttctagcaagccagtccacagtccagcacctattgaggctcgcaagccaaatgaaaaacttacatttcggagggccccaggttttccaaacccttttagccggtttaaaggctactgaccctacgaagaacctttcatatgctgacttggaagagtagcacctggaagcagaaggggtccaaagatgcacgtcttgtacacccggagccaaattgaactcatttaggatgacctagagctgtagaaattccatctacgtttgagcattactgcacctcttatatgtctgacaccaacaaccattgttcatagtgtcctgtactgtttgtatctgctgaaccttactggggatgagcttgataagagagggtgccaagaccgacaaggattgcccatggagccacctgccataccaaaacgtgctgctagcaccatctcccaccgcagttacaagcgaagcagtgaacatagcaagaccagaacatactgaaaagaaagaccaaaagcaacatgaccaaaactaccacactattgcctgtgcccctcctaaaggtctcccaataagcttcaggaggccctttgctctagctgagtaccaaaggatgcactcataagttacagcttgcaacaccgttgtaaggcttggagtagagccgttaaaaacacagttgtcctgtcccaagccaccaatattgccagtgaattgaaccccttctgtagtccattgttacctctttaactgcctggtaggctggtaccactagcttgagaatctatgggttgatggttgggctgcaatggagacaaaagcaattttctgcaacctgcaaaatggtgaactagattttccaggcgaaaacacatgaaatcaataggtgctgtgtggtcttctcttcttcatcagaaggggcaagcagctgggtgggaagtcctcttttagtgatccggtccgcatttcaagaacggttctttactgcaagccaaatggagagcttgcagcaaagaggagcccaggacttccaaattcgtttccatggagcaaagcggatggaactaaggaaaaaggtattgtaggccgactttgctagagtaagaatcgttcctagtaagcctccaaacaagctgatcagcatcattctgcttcagcgagaaaccttccatcaagtctcataagcggagatattatgtaagaacctggacagagagctcctcttatgtcagctacccaacgatgggggtacatcacttgatgatcctcttgaattccctagttgatcatttttcagtttattgccaaatctagctgtgttcttgtggctgtgaaattatatctcccatgctgatacttgattcccttatctttgcttcattactacaccacagtaatttggatctgccattatgttactatgtaactctcatttgatatcaatcacagctgccacatacaaaatacaagtatgtttatctagataagatcttgattcatcaatcaccactgatctgagttttcgccactgcgatgcgaggaaaagacagatatctaataacatcttggtgaagatgttcttaggtcctttgctttctcttcaagtcagcttcctttgatttcattcctcaaactatcaatcacaggctgcagcacgtgtaatccgcatcggttcaagaacagatttcatgcttggtgatattttgcatcctgcgataaattgggctgataaagagtctcatctggatcctgatgaaatggccaagatgaagtctgcttttattggtaacctgccagaagatgttaatgaggagtacttgagaaagctttttggacagttcggtgaggtagtacgggttgctatctcaagaaaaggacaatgtccagttgcttttgttcacttcgccaaacgttcagagcttgagaatgctatagaagaaatggatggtaaaacggtgagaggacctggtcgagggccgtctttcaagatccagttgctcgacctacggcagacaacgacaagaagcgatctcgtgaagaagtgagaactagaagatcaaatgcatcaggagataggcgagattattctcatggaagatatggacacgattcacttgatcgtcaagtgaaagctccaagattatctaattatgtggccgatgctgctgacccctatgaatcagctgttaattcattaccttcagctgtcaaggaagtcttgcttcgaattctacgtctaagaattggtactcgatatgatgtggagacaaacacaacaaaggagattattttgcatcgttggttgctaagcaccaggctgagacctttggcttaacacatgcattacacggtaccacttatttgtcaagaaatccggaaatgcatagcaagcgatacccacatgaagattatgattttgtgacacccaggagcagtaggtacgattcgtcagcccatcatccttcaacatactacgaagacgatccaccagtgtctgagtcaagggttagaagatatgctgaagaaaggtccaccattgtaagaagcccagaaccacgtccgcgatatgacgaaacagacataagaataaacccagaaccaagattaccatatgaatcaagacacaacgccgaaaagcatctcgatcgaagatacatacaagagcatagttcaaatattgaaagaccagctgaagaagctctcctttctagggaaaggagatttctgcctgctgcagggtacatgccgaacccaggcggctcggatttccgctccaggtcgcccgccgaatattcagcacaacgccaacaaatgaggtttgatccattcacaggtgaaccttacaagtttgatcccttcacaggggagcccatcaggccagatccgaaccagcgccgctcaggaagcctgtactgatcagattagttggagcgatatgccagataagaccctgaaacaaagctagatctggataactcttcttcttgtctgccaagtgtctctgtgattttgcttgtgggctacagatcatgtaccccgagcaccatgtgtgatccagtcggactaatcatttcggcattgaaaagtcggactaactttttttgtgcccataacgctacgtattgtttggtagattaattaaaaattcatccggtgaaaagcaattttctggtatttttctggaggtgcagtaggcgtggtaatgcagaatttcaactgctacgtacactgcaagcgctgttttacccgattcgtctttacgtgttgccaaatgtttcattgacttcatagaactgatttcgactactttggatgctgagcaagggaccatgcctttctcacatatactcatctggagaatgtcaagcaagacggcccatctggacacatggcaagaagagataaactagctagctgcctcccaatgatgctactaccttctcttcgactgcttcaacgttcacatgcccctcccttgcatggcgtagtaaactgggttgcttgaaaaaacgccacttctaagcgta

SEQ ID NO: 2777 - DNA, 6336 bp, Zea Mays
agcaaatggtatatgacaggtcgggcccagtgcttcataaaagcacatttgctcacccaaagagagagaaagaggtgatattgataagacgggaaaataccctaggctctcgccagtctccggtgcggctcaacaccgaccgaacccgtgaaaaattcgttctcctttcgatccgtttggcggggggctcggccggatccgaccggaggggcgccgccgatccatccggtcgcagccgcgtctgatttggtgcggattttggcgagataccccgctcctagctccgctgtttcaaggataacaaagatggcgtcgccgcggggcgggttcgatgagcaagatcgccggacggagaagggcaccgaggtgttcgtcggcgggctgccgcggtcggccacggaaagcacgctccgagagatattttcttcatgcggagagattattgacgcgcgcataatgaaagatcagagtggtcactcaaagggatatggttttgtgcggtttgcaaagagggattatgctaatactgccaaaaggcaaaagaatggtattgaggttcaaggaaagaggcttgtggttgagctttcaatggatcaagatacagttttctttggaaatctttgcaaagagtggactttagaagaatttgaagaattgattcacaaggcattcaaagatgttgtttcggttgaccttgcaatggcgtcaaatcttggttcttcaaacaagaagaatatcaatcgaggctttggatttgtgagattttcttctcatgcagtattggccaaatattattgcctcttgttttctttttcagtttaattggataaaacaaccttatacaaatatcaagatatgtgcaaaattaccttaccctactgtcctttctagtaggaaaagaagcacatatgccatttgtctcatgcattatcaagtgacgatatatccttaatgcccctatgtcctaataaaaatatggagccaaatgatgaatcggcaccaaattatcaaaataccttatgatctgctgaaaaactatggaattcacatctttgacttcaatgacttgtatactttgacattgattttggatttctatggcaaaatactttatgatcagctggcaagctaaggaattcacatccctgatttgtatacttgacattgattttggatttacatggcaacataatttctccatctcttatgtcataaatgactgactaatgttgcaaagaatggattttaattgttaccgttttcacatgaaaattccctgttgcattgtgggtacttttgaagaagccacagacattgaagaatcctttgttcaacacagttatagagaaaaaattggtacgccatataggaaagggacatggcagaattttcaccttagtcatatcttgtatctttgatctgctcttcatatttacatttatatccatggttgaagttcattataaagtgtacgaggatgaaataatgaccactggccagtgtttgtctgaaatgaattcccaatctttctagttcactgggtggtgctatatctgatgaaacagtctggaaggatgatgattggttagccaagccaaaggttacttgcatgcgtgccttttctgatctgcaacattcacaatctgtactgtgtactccatgcccactagtatttaactacatgaaatcaccggcatttgtcatcatttatctggatgacctttgttctatagagacctgtgagaaccacataatgccatagaggtaatgtcgttccagagtttagccagagtttttagcaacagcaaaacccaaaacccatatgtaggatatttagaaacacggatggggaaatcaacatatattttattaatcatctacttccatgtgatgtagaagttcccttgcagttcctctctctctctctctcagaccaagagtcaaataagagcttacaacaaattaatggttgcaatgaagtttaacagttcagttatgaaggcctgaagattactgttgattgaagcaacactgttacttgacagcttcttctgttgcttgtgtttgcgctccattaaaatttggcattctttgacttgcctatatatttctttaattcaagtaaaagtagactatatgccccctcgttgaacagataagatgactgcatatcgttttattaagaagaaaggtctgaaacaggaagaaatcccaaaccacattcacacccacaacactctagaagactagaacatactttttctctctcgaaaacacaggagagctgcgcttcattatttaagaagcagcaaacaaggtcccaaaatgggccagcacaaagggtggcactttacagtagccagcacctgacatagacaaacttatccataaaaacacgtcacagcactcaaacacctaaatcaggcccatatcccggctaactcagtagccccagcaagggccaattcctggcatcctctccgatatctcgcagcacctgggacacatccgccacgccttcttcgaagatagtaattgcgatgtttccacaaccaccaagccactaaaatcaccacagaattgaactcatttccctgcggtttggggactcttctctctgcttgattccaccaatcctgaaaattgacctccctgggcattgggctaaggtgctgtaagttgattagagaaagaacttgaaaccagacctgtctaccaaacgcacaggccaccaacaaatgctgaactgtttcctctttctgatcacataacaggcaaagttcaagatgctcaagtcctcttctagcaagccagtccacagtccagcacctattgaggctcgcaagccaaatgaaaaacttacatttcggagggccccaggttttccaaacccttttagccggtttaaaggctactgaccctacgaagaacctttcatatgctgacttggaagagtagcacctggaagcagaaggggtccaaagatgcacgtcttgtacacccggagccaaattgaactcatttaggatgacctagagctgtagaaattccatctacgtttgagcattactgcacctcttatatgtctgacaccaacaaccattgttcatagtgtcctgtactgtttgtatctgctgaaccttactggggatgagcttgataagagagggtgccaagaccgacaaggattgcccatggagccacctgccataccaaaacgtgctgctagcaccatctcccaccgcagttacaagcgaagcagtgaacatagcaagaccagaacatactgaaaagaaagaccaaaagcaacatgaccaaaactaccacactattgcctgtgcccctcctaaaggtctcccaataagcttcaggaggccctttgctctagctgagtaccaaaggatgcactcataagttacagcttgcaacaccgttgtaaggcttggagtagagccgttaaaaacacagttgtcctgtcccaagccaccaatattgccagtgaattgaaccccttctgtagtccattgttacctctttaactgcctggtaggctggtaccactagcttgagaatctatgggttgatggttgggctgcaatggagacaaaagcaattttctgcaacctgcaaaatggtgaactagattttccaggcgaaaacacatgaaatcaataggtgctgtgtggtcttctcttcttcatcagaaggggcaagcagctgggtgggaagtcctcttttagtgatccggtccgcatttcaagaacggttctttactgcaagccaaatggagagcttgcagcaaagaggagcccaggacttccaaattcgtttccatggagcaaagcggatggaactaaggaaaaaggtattgtaggccgactttgctagagtaagaatcgttcctagtaagcctccaaacaagctgatcagcatcattctgcttcagcgagaaaccttccatcaagtctcataagcggagatattatgtaagaacctggacagagagctcctcttatgtcagctacccaacgatgggggtacatcacttgatgatcctcttgaattccctagttgatcatttttcagtttattgccaaatctagctgtgttcttgtggctgtgaaattatatctcccatgctgatacttgattcccttatctttgcttcattactacaccacagtaatttggatctgccattatgttactatgtaactctcatttgatatcaatcacagctgccacatacaaaatacaagtatgtttatctagataagatcttgattcatcaatcaccactgatctgagttttcgccactgcgatgcgaggaaaagacagatatctaataacatcttggtgaagatgttcttaggtcctttgctttctcttcaagtcagcttcctttgatttcattcctcaaactatcaatcacaggctgcagcacgtgtaatccgcatcggttcaagaacagatttcatgcttggtgatattttgcatcctgcgataaattgggctgataaagagtctcatctggatcctgatgaaatggccaagatgaagtctgcttttattggtaacctgccagaagatgttaatgaggagtacttgagaaagctttttggacagttcggtgaggtagtacgggttgctatctcaagaaaaggacaatgtccagttgcttttgttcacttcgccaaacgttcagagcttgagaatgctatagaagaaatggatggtaaaacggtgagaggacctggtcgagggccgtctttcaagatccaggtgtcagttgctcgacctacggcagacaacgacaagaagcgatctcgtgaagaagtgagaactagaagatcaaatgcatcaggagataggcgagattattctcatggaagatatggacacgattcacttgatcgtcaagtgaaagctccaagattatctaattatgtggccgatgctgctgacccctatgaatcagctgttaattcattaccttcagctgtcaaggaagtcttgcttcgaattctacgtctaagaattggtactcgatatgattttttgatatcaggtggagacaaacacaacaaaggagattattttgcatcgttggttgctaagcaccaggctgagacctttggcttaacacatgcattacacggtaccacttatttgtcaagaaatccggaaatgcatagcaagcgatacccacatgaagattatgattttgtgacacccaggagcagtaggtacgattcgtcagcccatcatccttcaacatactacgaagacgatccaccagtgtctgagtcaagggttagaagatatgctgaagaaaggtccaccattgtaagaagcccagaaccacgtccgcgatatgacgaaacagacataagaataaacccagaaccaagattaccatatgaatcaagacacaacgccgaaaagcatctcgatcgaagatacatacaagagcatagttcaaatattgaaagaccagctgaagaagctctcctttctagggaaaggagatttctgcctgctgcagggtacatgccgaacccaggcggctcggatttccgctccaggtcgcccgccgaatattcagcacaacgccaacaaatgaggtttgatccattcacaggtgaaccttacaagtttgatcccttcacaggggagcccatcaggccagatccgaaccagcgccgctcaggaagcctgtactgatcagattagttggagcgatatgccagataagaccctgaaacaaagctagatctggataactcttcttcttgtctgccaagtgtctctgtgattttgcttgtgggctacagatcatgtaccccgagcaccatgtgtgatccagtcggactaatcatttcggcattgaaaagtcggactaactttttttgtgcccataacgctacgtattgtttggtagattaattaaaaattcatccggtgaaaagcaattttctggtatttttctggaggtgcagtaggcgtggtaatgcagaatttcaactgctacgtacactgcaagcgctgttttacccgattcgtctttacgtgttgccaaatgtttcattgacttcatagaactgatttcgactactttggatgctgagcaagggaccatgcctttctcacatatactcatctggagaatgtcaagcaagacggcccatctggacacatggcaagaagagataaactagctagctgcctcccaatgatgctactaccttctcttcgactgcttcaacgttcacatgcccctcccttgcatggcgtagtaaactgggttgcttgaaaaaacgccacttctaagcgta

SEQ ID NO: 2778 - DNA, 6317 bp, Zea Mays
agcaaatggtatatgacaggtcgggcccagtgcttcataaaagcacatttgctcacccaaagagagagaaagaggtgatattgataagacgggaaaataccctaggctctcgccagtctccggtgcggctcaacaccgaccgaacccgtgaaaaattcgttctcctttcgatccgtttggcggggggctcggccggatccgaccggaggggcgccgccgatccatccggtcgcagccgcgtctgatttggtgcggattttggcgagataccccgctcctagctccgctgtttcaaggataacaaagatggcgtcgccgcggggcgggttcgatgagcaagatcgccggacggagaagggcaccgaggtgttcgtcggcgggctgccgcggtcggccacggaaagcacgctccgagagatattttcttcatgcggagagattattgacgcgcgcataatgaaagatcagagtggtcactcaaagggatatggttttgtgcggtttgcaaagagggattatgctaatactgccaaaaggcaaaagaatggtattgaggttcaaggaaagaggcttgtggttgagctttcaatggatcaagatacagttttctttggaaatctttgcaaagagtggactttagaagaatttgaagaattgattcacaaggcattcaaagatgttgtttcggttgaccttgcaatggcgtcaaatcttggttcttcaaacaagaagaatatcaatcgaggctttggatttgtgagattttcttctcatgcagtattggccaaatattattgcctcttgttttctttttcagtttaattggataaaacaaccttatacaaatatcaagatatgtgcaaaattaccttaccctactgtcctttctagtaggaaaagaagcacatatgccatttgtctcatgcattatcaagtgacgatatatccttaatgcccctatgtcctaataaaaatatggagccaaatgatgaatcggcaccaaattatcaaaataccttatgatctgctgaaaaactatggaattcacatctttgacttcaatgacttgtatactttgacattgattttggatttctatggcaaaatactttatgatcagctggcaagctaaggaattcacatccctgatttgtatacttgacattgattttggatttacatggcaacataatttctccatctcttatgtcataaatgactgactaatgttgcaaagaatggattttaattgttaccgttttcacatgaaaattccctgttgcattgtgggtacttttgaagaagccacagacattgaagaatcctttgttcaacacagttatagagaaaaaattggtacgccatataggaaagggacatggcagaattttcaccttagtcatatcttgtatctttgatctgctcttcatatttacatttatatccatggttgaagttcattataaagtgtacgaggatgaaataatgaccactggccagtgtttgtctgaaatgaattcccaatctttctagttcactgggtggtgctatatctgatgaaacagtctggaaggatgatgattggttagccaagccaaaggttacttgcatgcgtgccttttctgatctgcaacattcacaatctgtactgtgtactccatgcccactagtatttaactacatgaaatcaccggcatttgtcatcatttatctggatgacctttgttctatagagacctgtgagaaccacataatgccatagaggtaatgtcgttccagagtttagccagagtttttagcaacagcaaaacccaaaacccatatgtaggatatttagaaacacggatggggaaatcaacatatattttattaatcatctacttccatgtgatgtagaagttcccttgcagttcctctctctctctctctcagaccaagagtcaaataagagcttacaacaaattaatggttgcaatgaagtttaacagttcagttatgaaggcctgaagattactgttgattgaagcaacactgttacttgacagcttcttctgttgcttgtgtttgcgctccattaaaatttggcattctttgacttgcctatatatttctttaattcaagtaaaagtagactatatgccccctcgttgaacagataagatgactgcatatcgttttattaagaagaaaggtctgaaacaggaagaaatcccaaaccacattcacacccacaacactctagaagactagaacatactttttctctctcgaaaacacaggagagctgcgcttcattatttaagaagcagcaaacaaggtcccaaaatgggccagcacaaagggtggcactttacagtagccagcacctgacatagacaaacttatccataaaaacacgtcacagcactcaaacacctaaatcaggcccatatcccggctaactcagtagccccagcaagggccaattcctggcatcctctccgatatctcgcagcacctgggacacatccgccacgccttcttcgaagatagtaattgcgatgtttccacaaccaccaagccactaaaatcaccacagaattgaactcatttccctgcggtttggggactcttctctctgcttgattccaccaatcctgaaaattgacctccctgggcattgggctaaggtgctgtaagttgattagagaaagaacttgaaaccagacctgtctaccaaacgcacaggccaccaacaaatgctgaactgtttcctctttctgatcacataacaggcaaagttcaagatgctcaagtcctcttctagcaagccagtccacagtccagcacctattgaggctcgcaagccaaatgaaaaacttacatttcggagggccccaggttttccaaacccttttagccggtttaaaggctactgaccctacgaagaacctttcatatgctgacttggaagagtagcacctggaagcagaaggggtccaaagatgcacgtcttgtacacccggagccaaattgaactcatttaggatgacctagagctgtagaaattccatctacgtttgagcattactgcacctcttatatgtctgacaccaacaaccattgttcatagtgtcctgtactgtttgtatctgctgaaccttactggggatgagcttgataagagagggtgccaagaccgacaaggattgcccatggagccacctgccataccaaaacgtgctgctagcaccatctcccaccgcagttacaagcgaagcagtgaacatagcaagaccagaacatactgaaaagaaagaccaaaagcaacatgaccaaaactaccacactattgcctgtgcccctcctaaaggtctcccaataagcttcaggaggccctttgctctagctgagtaccaaaggatgcactcataagttacagcttgcaacaccgttgtaaggcttggagtagagccgttaaaaacacagttgtcctgtcccaagccaccaatattgccagtgaattgaaccccttctgtagtccattgttacctctttaactgcctggtaggctggtaccactagcttgagaatctatgggttgatggttgggctgcaatggagacaaaagcaattttctgcaacctgcaaaatggtgaactagattttccaggcgaaaacacatgaaatcaataggtgctgtgtggtcttctcttcttcatcagaaggggcaagcagctgggtgggaagtcctcttttagtgatccggtccgcatttcaagaacggttctttactgcaagccaaatggagagcttgcagcaaagaggagcccaggacttccaaattcgtttccatggagcaaagcggatggaactaaggaaaaaggtattgtaggccgactttgctagagtaagaatcgttcctagtaagcctccaaacaagctgatcagcatcattctgcttcagcgagaaaccttccatcaagtctcataagcggagatattatgtaagaacctggacagagagctcctcttatgtcagctacccaacgatgggggtacatcacttgatgatcctcttgaattccctagttgatcatttttcagtttattgccaaatctagctgtgttcttgtggctgtgaaattatatctcccatgctgatacttgattcccttatctttgcttcattactacaccacagtaatttggatctgccattatgttactatgtaactctcatttgatatcaatcacagctgccacatacaaaatacaagtatgtttatctagataagatcttgattcatcaatcaccactgatctgagttttcgccactgcgatgcgaggaaaagacagatatctaataacatcttggtgaagatgttcttaggtcctttgctttctcttcaagtcagcttcctttgatttcattcctcaaactatcaatcacaggctgcagcacgtgtaatccgcatcggttcaagaacagatttcatgcttggtgatattttgcatcctgcgataaattgggctgataaagagtctcatctggatcctgatgaaatggccaagatgaagtctgcttttattggtaacctgccagaagatgttaatgaggagtacttgagaaagctttttggacagttcggtgaggtagtacgggttgctatctcaagaaaaggacaatgtccagttgcttttgttcacttcgccaaacgttcagagcttgagaatgctatagaagaaatggatggtaaaacggtgagaggacctggtcgagggccgtctttcaagatccaggtgtcagttgctcgacctacggcagacaacgacaagaagcgatctcgtgaagaagtgagaactagaagatcaaatgcatcaggagataggcgagattattctcatggaagatatggacacgattcacttgatcgtcaagtgaaagctccaagattatctaattatgtggccgatgctgctgacccctatgaatcagctgttaattcattaccttcagctgtcaaggaagtcttgcttcgaattctacgtctaagaattggtactcgatatgatgtggagacaaacacaacaaaggagattattttgcatcgttggttgctaagcaccaggctgagacctttggcttaacacatgcattacacggtaccacttatttgtcaagaaatccggaaatgcatagcaagcgatacccacatgaagattatgattttgtgacacccagtaggtacgattcgtcagcccatcatccttcaacatactacgaagacgatccaccagtgtctgagtcaagggttagaagatatgctgaagaaaggtccaccattgtaagaagcccagaaccacgtccgcgatatgacgaaacagacataagaataaacccagaaccaagattaccatatgaatcaagacacaacgccgaaaagcatctcgatcgaagatacatacaagagcatagttcaaatattgaaagaccagctgaagaagctctcctttctagggaaaggagatttctgcctgctgcagggtacatgccgaacccaggcggctcggatttccgctccaggtcgcccgccgaatattcagcacaacgccaacaaatgaggtttgatccattcacaggtgaaccttacaagtttgatcccttcacaggggagcccatcaggccagatccgaaccagcgccgctcaggaagcctgtactgatcagattagttggagcgatatgccagataagaccctgaaacaaagctagatctggataactcttcttcttgtctgccaagtgtctctgtgattttgcttgtgggctacagatcatgtaccccgagcaccatgtgtgatccagtcggactaatcatttcggcattgaaaagtcggactaactttttttgtgcccataacgctacgtattgtttggtagattaattaaaaattcatccggtgaaaagcaattttctggtatttttctggaggtgcagtaggcgtggtaatgcagaatttcaactgctacgtacactgcaagcgctgttttacccgattcgtctttacgtgttgccaaatgtttcattgacttcatagaactgatttcgactactttggatgctgagcaagggaccatgcctttctcacatatactcatctggagaatgtcaagcaagacggcccatctggacacatggcaagaagagataaactagctagctgcctcccaatgatgctactaccttctcttcgactgcttcaacgttcacatgcccctcccttgcatggcgtagtaaactgggttgcttgaaaaaacgccacttctaagcgta

SEQ ID NO: 2779 - DNA, 2682 bp, Zea Mays
aagagagagaaagaggtgatattgataagacgggaaaataccctaggctctcgccagtctccggtgcggctcaacaccgaccgaacccgtgaaaaattcgttctcctttcgatccgtttggcggggggctcggccggatccgaccggaggggcgccgccgatccatccggtcgcagccgcgtctgatttggtgcggattttggcgagataccccgctcctagctccgctgtttcaaggataacaaagatggcgtcgccgcggggcgggttcgatgagcaagatcgccggacggagaagggcaccgaggtgttcgtcggcgggctgccgcggtcggccacggaaagcacgctccgagagatattttcttcatgcggagagattattgacgcgcgcataatgaaagatcagagtggtcactcaaagggatatggttttgtgcggtttgcaaagagggattatgctaatactgccaaaaggcaaaagaatggtattgaggttcaaggaaagaggcttgtggttgagctttcaatggatcaagatacagttttctttggaaatctttgcaaagagtggactttagaagaatttgaagaattgattcacaaggcattcaaagatgttgtttcggttgaccttgcaatggcgtcaaatcttggttcttcaaacaagaagaatatcaatcgaggctttggatttgtgagattttcttctcatgcagctgcagcacgtgtaatccgcatcggttcaagaacagatttcatgcttggtgatattttgcatcctgcgataaattgggctgataaagagtctcatctggatcctgatgaaatggccaagatgaagtctgcttttattggtaacctgccagaagatgttaatgaggagtacttgagaaagctttttggacagttcggtgaggtagtacgggttgctatctcaagaaaaggacaatgtccagttgcttttgttcacttcgccaaacgttcagagcttgagaatgctatagaagaaatggatggtaaaacggtgagaggacctggtcgagggccgtctttcaagatccaggtgtcagttgctcgacctacggcagacaacgacaagaagcgatctcgtgaagaagtgagaactagaagatcaaatgcatcaggagataggcgagattattctcatggaagatatggacacgattcacttgatcgtcaagtgaaagctccaagattatctaattatgtggccgatgctgctgacccctatgaatcagctgttaattcattaccttcagctgtcaaggaagtcttgcttcgaattctacgtctaagaattggtactcgatatgatattgatatccattgtgttaaaagccttgatgagcttcctgagtcatctgctcttgctgtccttaatcagtttttgatatcaggtggagacaaacacaacaaaggagattattttgcatcgttggttgctaaggctgagacctttggcttaacacatgcattacacggtaccacttatttgtcaagaaatccggaaatgcatagcaagcgatacccacatgaagattatgattttgtgacacccaggagcagtaggtacgattcgtcagcccatcatccttcaacatactacgaagacgatccaccagtgtctgagtcaagggttagaagatatgctgaagaaaggtccaccattgtaagaagcccagaaccacgtccgcgatatgacgaaacagacataagaataaacccagaaccaagattaccatatgaatcaagacacaacgccgaaaagcatctcgatcgaagatacatacaagagcatagttcaaatattgaaagaccagctgaagaagctctcctttctagggaaaggagatttctgcctgctgcagggtacatgccgaacccaggcggctcggatttccgctccaggtcgcccgccgaatattcagcacaacgccaacaaatgaggtttgatccattcacaggtgaaccttacaagtttgatcccttcacaggggagcccatcaggccagatccgaaccagcgccgctcaggaagcctgtactgatcagattagttggagcgatatgccagataagaccctgaaacaaagctagatctggataactcttcttcttgtctgccaagtgtctctgtgattttgcttgtgggctacagatcatgtaccccgagcaccatgtgtgatccagtcggactaatcatttcggcattgaaaagtcggactaactttttttgtgcccataacgctacgtattgtttggtagattaattaaaaattcatccggtgaaaagcaattttctggtatttttctggaggtgcagtaggcgtggtaatgcagaatttcaactgctacgtacactgcaagcgctgttttacccgattcgtctttacgtgttgccaaatgtttcattgacttcatagaactgatttcgactactttggatgctgagcaagggaccatgcctttctcacatatactcatctggagaatgtcaagcaagacggcccatctggacacatggcaagaagagataaactagctagctgcctcccaatgatgctactaccttctcttcgactgcttcaacgttcacatgcccctcccttgcatggcgtagtaaactgggttgcttgaaaaaacgccacttctaagcgta

SEQ ID NO: 2780 - DNA, 2663 bp, Zea Mays
aagagagagaaagaggtgatattgataagacgggaaaataccctaggctctcgccagtctccggtgcggctcaacaccgaccgaacccgtgaaaaattcgttctcctttcgatccgtttggcggggggctcggccggatccgaccggaggggcgccgccgatccatccggtcgcagccgcgtctgatttggtgcggattttggcgagataccccgctcctagctccgctgtttcaaggataacaaagatggcgtcgccgcggggcgggttcgatgagcaagatcgccggacggagaagggcaccgaggtgttcgtcggcgggctgccgcggtcggccacggaaagcacgctccgagagatattttcttcatgcggagagattattgacgcgcgcataatgaaagatcagagtggtcactcaaagggatatggttttgtgcggtttgcaaagagggattatgctaatactgccaaaaggcaaaagaatggtattgaggttcaaggaaagaggcttgtggttgagctttcaatggatcaagatacagttttctttggaaatctttgcaaagagtggactttagaagaatttgaagaattgattcacaaggcattcaaagatgttgtttcggttgaccttgcaatggcgtcaaatcttggttcttcaaacaagaagaatatcaatcgaggctttggatttgtgagattttcttctcatgcagctgcagcacgtgtaatccgcatcggttcaagaacagatttcatgcttggtgatattttgcatcctgcgataaattgggctgataaagagtctcatctggatcctgatgaaatggccaagatgaagtctgcttttattggtaacctgccagaagatgttaatgaggagtacttgagaaagctttttggacagttcggtgaggtagtacgggttgctatctcaagaaaaggacaatgtccagttgcttttgttcacttcgccaaacgttcagagcttgagaatgctatagaagaaatggatggtaaaacggtgagaggacctggtcgagggccgtctttcaagatccaggtgtcagttgctcgacctacggcagacaacgacaagaagcgatctcgtgaagaagtgagaactagaagatcaaatgcatcaggagataggcgagattattctcatggaagatatggacacgattcacttgatcgtcaagtgaaagctccaagattatctaattatgtggccgatgctgctgacccctatgaatcagctgttaattcattaccttcagctgtcaaggaagtcttgcttcgaattctacgtctaagaattggtactcgatatgatattgatatccattgtgttaaaagccttgatgagcttcctgagtcatctgctcttgctgtccttaatcaggtggagacaaacacaacaaaggagattattttgcatcgttggttgctaaggctgagacctttggcttaacacatgcattacacggtaccacttatttgtcaagaaatccggaaatgcatagcaagcgatacccacatgaagattatgattttgtgacacccagtaggtacgattcgtcagcccatcatccttcaacatactacgaagacgatccaccagtgtctgagtcaagggttagaagatatgctgaagaaaggtccaccattgtaagaagcccagaaccacgtccgcgatatgacgaaacagacataagaataaacccagaaccaagattaccatatgaatcaagacacaacgccgaaaagcatctcgatcgaagatacatacaagagcatagttcaaatattgaaagaccagctgaagaagctctcctttctagggaaaggagatttctgcctgctgcagggtacatgccgaacccaggcggctcggatttccgctccaggtcgcccgccgaatattcagcacaacgccaacaaatgaggtttgatccattcacaggtgaaccttacaagtttgatcccttcacaggggagcccatcaggccagatccgaaccagcgccgctcaggaagcctgtactgatcagattagttggagcgatatgccagataagaccctgaaacaaagctagatctggataactcttcttcttgtctgccaagtgtctctgtgattttgcttgtgggctacagatcatgtaccccgagcaccatgtgtgatccagtcggactaatcatttcggcattgaaaagtcggactaactttttttgtgcccataacgctacgtattgtttggtagattaattaaaaattcatccggtgaaaagcaattttctggtatttttctggaggtgcagtaggcgtggtaatgcagaatttcaactgctacgtacactgcaagcgctgttttacccgattcgtctttacgtgttgccaaatgtttcattgacttcatagaactgatttcgactactttggatgctgagcaagggaccatgcctttctcacatatactcatctggagaatgtcaagcaagacggcccatctggacacatggcaagaagagataaactagctagctgcctcccaatgatgctactaccttctcttcgactgcttcaacgttcacatgcccctcccttgcatggcgtagtaaactgggttgcttgaaaaaacgccacttctaagcgta

SEQ ID NO: 2781 - DNA, 2592 bp, Zea Mays
aagagagagaaagaggtgatattgataagacgggaaaataccctaggctctcgccagtctccggtgcggctcaacaccgaccgaacccgtgaaaaattcgttctcctttcgatccgtttggcggggggctcggccggatccgaccggaggggcgccgccgatccatccggtcgcagccgcgtctgatttggtgcggattttggcgagataccccgctcctagctccgctgtttcaaggataacaaagatggcgtcgccgcggggcgggttcgatgagcaagatcgccggacggagaagggcaccgaggtgttcgtcggcgggctgccgcggtcggccacggaaagcacgctccgagagatattttcttcatgcggagagattattgacgcgcgcataatgaaagatcagagtggtcactcaaagggatatggttttgtgcggtttgcaaagagggattatgctaatactgccaaaaggcaaaagaatggtattgaggttcaaggaaagaggcttgtggttgagctttcaatggatcaagatacagttttctttggaaatctttgcaaagagtggactttagaagaatttgaagaattgattcacaaggcattcaaagatgttgtttcggttgaccttgcaatggcgtcaaatcttggttcttcaaacaagaagaatatcaatcgaggctttggatttgtgagattttcttctcatgcagctgcagcacgtgtaatccgcatcggttcaagaacagatttcatgcttggtgatattttgcatcctgcgataaattgggctgataaagagtctcatctggatcctgatgaaatggccaagatgaagtctgcttttattggtaacctgccagaagatgttaatgaggagtacttgagaaagctttttggacagttcggtgaggtagtacgggttgctatctcaagaaaaggacaatgtccagttgcttttgttcacttcgccaaacgttcagagcttgagaatgctatagaagaaatggatggtaaaacggtgagaggacctggtcgagggccgtctttcaagatccaggtgtcagttgctcgacctacggcagacaacgacaagaagcgatctcgtgaagaagtgagaactagaagatcaaatgcatcaggagataggcgagattattctcatggaagatatggacacgattcacttgatcgtcaagtgaaagctccaagattatctaattatgtggccgatgctgctgacccctatgaatcagctgttaattcattaccttcagctgtcaaggaagtcttgcttcgaattctacgtctaagaattggtggagacaaacacaacaaaggagattattttgcatcgttggttgctaagcaccaggctgagacctttggcttaacacatgcattacacggtaccacttatttgtcaagaaatccggaaatgcatagcaagcgatacccacatgaagattatgattttgtgacacccaggagcagtaggtacgattcgtcagcccatcatccttcaacatactacgaagacgatccaccagtgtctgagtcaagggttagaagatatgctgaagaaaggtccaccattgtaagaagcccagaaccacgtccgcgatatgacgaaacagacataagaataaacccagaaccaagattaccatatgaatcaagacacaacgccgaaaagcatctcgatcgaagatacatacaagagcatagttcaaatattgaaagaccagctgaagaagctctcctttctagggaaaggagatttctgcctgctgcagggtacatgccgaacccaggcggctcggatttccgctccaggtcgcccgccgaatattcagcacaacgccaacaaatgaggtttgatccattcacaggtgaaccttacaagtttgatcccttcacaggggagcccatcaggccagatccgaaccagcgccgctcaggaagcctgtactgatcagattagttggagcgatatgccagataagaccctgaaacaaagctagatctggataactcttcttcttgtctgccaagtgtctctgtgattttgcttgtgggctacagatcatgtaccccgagcaccatgtgtgatccagtcggactaatcatttcggcattgaaaagtcggactaactttttttgtgcccataacgctacgtattgtttggtagattaattaaaaattcatccggtgaaaagcaattttctggtatttttctggaggtgcagtaggcgtggtaatgcagaatttcaactgctacgtacactgcaagcgctgttttacccgattcgtctttacgtgttgccaaatgtttcattgacttcatagaactgatttcgactactttggatgctgagcaagggaccatgcctttctcacatatactcatctggagaatgtcaagcaagacggcccatctggacacatggcaagaagagataaactagctagctgcctcccaatgatgctactaccttctcttcgactgcttcaacgttcacatgcccctcccttgcatggcgtagtaaactgggttgcttgaaaaaacgccacttctaagcgta

SEQ ID NO: 2782 - DNA, 2682 bp, Zea Mays
aagagagagaaagaggtgatattgataagacgggaaaataccctaggctctcgccagtctccggtgcggctcaacaccgaccgaacccgtgaaaaattcgttctcctttcgatccgtttggcggggggctcggccggatccgaccggaggggcgccgccgatccatccggtcgcagccgcgtctgatttggtgcggattttggcgagataccccgctcctagctccgctgtttcaaggataacaaagatggcgtcgccgcggggcgggttcgatgagcaagatcgccggacggagaagggcaccgaggtgttcgtcggcgggctgccgcggtcggccacggaaagcacgctccgagagatattttcttcatgcggagagattattgacgcgcgcataatgaaagatcagagtggtcactcaaagggatatggttttgtgcggtttgcaaagagggattatgctaatactgccaaaaggcaaaagaatggtattgaggttcaaggaaagaggcttgtggttgagctttcaatggatcaagatacagttttctttggaaatctttgcaaagagtggactttagaagaatttgaagaattgattcacaaggcattcaaagatgttgtttcggttgaccttgcaatggcgtcaaatcttggttcttcaaacaagaagaatatcaatcgaggctttggatttgtgagattttcttctcatgcagctgcagcacgtgtaatccgcatcggttcaagaacagatttcatgcttggtgatattttgcatcctgcgataaattgggctgataaagagtctcatctggatcctgatgaaatggccaagatgaagtctgcttttattggtaacctgccagaagatgttaatgaggagtacttgagaaagctttttggacagttcggtgaggtagtacgggttgctatctcaagaaaaggacaatgtccagttgcttttgttcacttcgccaaacgttcagagcttgagaatgctatagaagaaatggatggtaaaacggtgagaggacctggtcgagggccgtctttcaagatccaggtgtcagttgctcgacctacggcagacaacgacaagaagcgatctcgtgaagaagtgagaactagaagatcaaatgcatcaggagataggcgagattattctcatggaagatatggacacgattcacttgatcgtcaagtgaaagctccaagattatctaattatgtggccgatgctgctgacccctatgaatcagctgttaattcattaccttcagctgtcaaggaagtcttgcttcgaattctacgtctaagaattggtactcgatatgatattgatatccattgtgttaaaagccttgatgagcttcctgagtcatctgctcttgctgtccttaatcagtttttgatatcaggtggagacaaacacaacaaaggagattattttgcatcgttggttgctaagcaccaggctgagacctttggcttaacacatgcattacacggtaccacttatttgtcaagaaatccggaaatgcatagcaagcgatacccacatgaagattatgattttgtgacacccagtaggtacgattcgtcagcccatcatccttcaacatactacgaagacgatccaccagtgtctgagtcaagggttagaagatatgctgaagaaaggtccaccattgtaagaagcccagaaccacgtccgcgatatgacgaaacagacataagaataaacccagaaccaagattaccatatgaatcaagacacaacgccgaaaagcatctcgatcgaagatacatacaagagcatagttcaaatattgaaagaccagctgaagaagctctcctttctagggaaaggagatttctgcctgctgcagggtacatgccgaacccaggcggctcggatttccgctccaggtcgcccgccgaatattcagcacaacgccaacaaatgaggtttgatccattcacaggtgaaccttacaagtttgatcccttcacaggggagcccatcaggccagatccgaaccagcgccgctcaggaagcctgtactgatcagattagttggagcgatatgccagataagaccctgaaacaaagctagatctggataactcttcttcttgtctgccaagtgtctctgtgattttgcttgtgggctacagatcatgtaccccgagcaccatgtgtgatccagtcggactaatcatttcggcattgaaaagtcggactaactttttttgtgcccataacgctacgtattgtttggtagattaattaaaaattcatccggtgaaaagcaattttctggtatttttctggaggtgcagtaggcgtggtaatgcagaatttcaactgctacgtacactgcaagcgctgttttacccgattcgtctttacgtgttgccaaatgtttcattgacttcatagaactgatttcgactactttggatgctgagcaagggaccatgcctttctcacatatactcatctggagaatgtcaagcaagacggcccatctggacacatggcaagaagagataaactagctagctgcctcccaatgatgctactaccttctcttcgactgcttcaacgttcacatgcccctcccttgcatggcgtagtaaactgggttgcttgaaaaaacgccacttctaagcgta

SEQ ID NO: 2783 - DNA, 2667 bp, Zea Mays
aagagagagaaagaggtgatattgataagacgggaaaataccctaggctctcgccagtctccggtgcggctcaacaccgaccgaacccgtgaaaaattcgttctcctttcgatccgtttggcggggggctcggccggatccgaccggaggggcgccgccgatccatccggtcgcagccgcgtctgatttggtgcggattttggcgagataccccgctcctagctccgctgtttcaaggataacaaagatggcgtcgccgcggggcgggttcgatgagcaagatcgccggacggagaagggcaccgaggtgttcgtcggcgggctgccgcggtcggccacggaaagcacgctccgagagatattttcttcatgcggagagattattgacgcgcgcataatgaaagatcagagtggtcactcaaagggatatggttttgtgcggtttgcaaagagggattatgctaatactgccaaaaggcaaaagaatggtattgaggttcaaggaaagaggcttgtggttgagctttcaatggatcaagatacagttttctttggaaatctttgcaaagagtggactttagaagaatttgaagaattgattcacaaggcattcaaagatgttgtttcggttgaccttgcaatggcgtcaaatcttggttcttcaaacaagaagaatatcaatcgaggctttggatttgctgcagcacgtgtaatccgcatcggttcaagaacagatttcatgcttggtgatattttgcatcctgcgataaattgggctgataaagagtctcatctggatcctgatgaaatggccaagatgaagtctgcttttattggtaacctgccagaagatgttaatgaggagtacttgagaaagctttttggacagttcggtgaggtagtacgggttgctatctcaagaaaaggacaatgtccagttgcttttgttcacttcgccaaacgttcagagcttgagaatgctatagaagaaatggatggtaaaacggtgagaggacctggtcgagggccgtctttcaagatccaggtgtcagttgctcgacctacggcagacaacgacaagaagcgatctcgtgaagaagtgagaactagaagatcaaatgcatcaggagataggcgagattattctcatggaagatatggacacgattcacttgatcgtcaagtgaaagctccaagattatctaattatgtggccgatgctgctgacccctatgaatcagctgttaattcattaccttcagctgtcaaggaagtcttgcttcgaattctacgtctaagaattggtactcgatatgatattgatatccattgtgttaaaagccttgatgagcttcctgagtcatctgctcttgctgtccttaatcagtttttgatatcaggtggagacaaacacaacaaaggagattattttgcatcgttggttgctaagcaccaggctgagacctttggcttaacacatgcattacacggtaccacttatttgtcaagaaatccggaaatgcatagcaagcgatacccacatgaagattatgattttgtgacacccaggagcagtaggtacgattcgtcagcccatcatccttcaacatactacgaagacgatccaccagtgtctgagtcaagggttagaagatatgctgaagaaaggtccaccattgtaagaagcccagaaccacgtccgcgatatgacgaaacagacataagaataaacccagaaccaagattaccatatgaatcaagacacaacgccgaaaagcatctcgatcgaagatacatacaagagcatagttcaaatattgaaagaccagctgaagaagctctcctttctagggaaaggagatttctgcctgctgcagggtacatgccgaacccaggcggctcggatttccgctccaggtcgcccgccgaatattcagcacaacgccaacaaatgaggtttgatccattcacaggtgaaccttacaagtttgatcccttcacaggggagcccatcaggccagatccgaaccagcgccgctcaggaagcctgtactgatcagattagttggagcgatatgccagataagaccctgaaacaaagctagatctggataactcttcttcttgtctgccaagtgtctctgtgattttgcttgtgggctacagatcatgtaccccgagcaccatgtgtgatccagtcggactaatcatttcggcattgaaaagtcggactaactttttttgtgcccataacgctacgtattgtttggtagattaattaaaaattcatccggtgaaaagcaattttctggtatttttctggaggtgcagtaggcgtggtaatgcagaatttcaactgctacgtacactgcaagcgctgttttacccgattcgtctttacgtgttgccaaatgtttcattgacttcatagaactgatttcgactactttggatgctgagcaagggaccatgcctttctcacatatactcatctggagaatgtcaagcaagacggcccatctggacacatggcaagaagagataaactagctagctgcctcccaatgatgctactaccttctcttcgactgcttcaacgttcacatgcccctcccttgcatggcgtagtaaactgggttgcttgaaaaaacgccacttctaagcgta

SEQ ID NO: 2784 - DNA, 6108 bp, Zea Mays
aagagagagaaagaggtgatattgataagacgggaaaataccctaggctctcgccagtctccggtgcggctcaacaccgaccgaacccgtgaaaaattcgttctcctttcgatccgtttggcggggggctcggccggatccgaccggaggggcgccgccgatccatccggtcgcagccgcgtctgatttggtgcggattttggcgagataccccgctcctagctccgctgtttcaaggataacaaagatggcgtcgccgcggggcgggttcgatgagcaagatcgccggacggagaagggcaccgaggtgttcgtcggcgggctgccgcggtcggccacggaaagcacgctccgagagatattttcttcatgcggagagattattgacgcgcgcataatgaaagatcagagtggtcactcaaagggatatggttttgtgcggtttgcaaagagggattatgctaatactgccaaaaggcaaaagaatggtattgaggttcaaggaaagaggcttgtggttgagctttcaatggatcaagatacagttttctttggaaatctttgcaaagagtggactttagaagaatttgaagaattgattcacaaggcattcaaagatgttgtttcggttgaccttgcaatggcgtcaaatcttggttcttcaaacaagaagaatatcaatcgaggctttggatttgtgagattttcttctcatgcagtattggccaaatattattgcctcttgttttctttttcagtttaattggataaaacaaccttatacaaatatcaagatatgtgcaaaattaccttaccctactgtcctttctagtaggaaaagaagcacatatgccatttgtctcatgcattatcaagtgacgatatggcaacataatttctccatctcttatgtcataaatgactgactaatgttgcaaagaatggattttaattgttaccgttttcacatgaaaattccctgttgcattgtgggtacttttgaagaagccacagacattgaagaatcctttgttcaacacagttatagagaaaaaattggtacgccatataggaaagggacatggcagaattttcaccttagtcatatcttgtatctttgatctgctcttcatatttacatttatatccatggttgaagttcattataaagtgtacgaggatgaaataatgaccactggccagtgtttgtctgaaatgaattcccaatctttctagttcactgggtggtgctatatctgatgaaacagtctggaaggatgatgattggttagccaagccaaaggttacttgcatgcgtgccttttctgatctgcaacattcacaatctgtactgtgtactccatgcccactagtatttaactacatgaaatcaccggcatttgtcatcatttatctggatgacctttgttctatagagacctgtgagaaccacataatgccatagaggtaatgtcgttccagagtttagccagagtttttagcaacagcaaaacccaaaacccatatgtaggatatttagaaacacggatggggaaatcaacatatattttattaatcatctacttccatgtgatgtagaagttcccttgcagttcctctctctctctctctcagaccaagagtcaaataagagcttacaacaaattaatggttgcaatgaagtttaacagttcagttatgaaggcctgaagattactgttgattgaagcaacactgttacttgacagcttcttctgttgcttgtgtttgcgctccattaaaatttggcattctttgacttgcctatatatttctttaattcaagtaaaagtagactatatgccccctcgttgaacagataagatgactgcatatcgttttattaagaagaaaggtctgaaacaggaagaaatcccaaaccacattcacacccacaacactctagaagactagaacatactttttctctctcgaaaacacaggagagctgcgcttcattatttaagaagcagcaaacaaggtcccaaaatgggccagcacaaagggtggcactttacagtagccagcacctgacatagacaaacttatccataaaaacacgtcacagcactcaaacacctaaatcaggcccatatcccggctaactcagtagccccagcaagggccaattcctggcatcctctccgatatctcgcagcacctgggacacatccgccacgccttcttcgaagatagtaattgcgatgtttccacaaccaccaagccactaaaatcaccacagaattgaactcatttccctgcggtttggggactcttctctctgcttgattccaccaatcctgaaaattgacctccctgggcattgggctaaggtgctgtaagttgattagagaaagaacttgaaaccagacctgtctaccaaacgcacaggccaccaacaaatgctgaactgtttcctctttctgatcacataacaggcaaagttcaagatgctcaagtcctcttctagcaagccagtccacagtccagcacctattgaggctcgcaagccaaatgaaaaacttacatttcggagggccccaggttttccaaacccttttagccggtttaaaggctactgaccctacgaagaacctttcatatgctgacttggaagagtagcacctggaagcagaaggggtccaaagatgcacgtcttgtacacccggagccaaattgaactcatttaggatgacctagagctgtagaaattccatctacgtttgagcattactgcacctcttatatgtctgacaccaacaaccattgttcatagtgtcctgtactgtttgtatctgctgaaccttactggggatgagcttgataagagagggtgccaagaccgacaaggattgcccatggagccacctgccataccaaaacgtgctgctagcaccatctcccaccgcagttacaagcgaagcagtgaacatagcaagaccagaacatactgaaaagaaagaccaaaagcaacatgaccaaaactaccacactattgcctgtgcccctcctaaaggtctcccaataagcttcaggaggccctttgctctagctgagtaccaaaggatgcactcataagttacagcttgcaacaccgttgtaaggcttggagtagagccgttaaaaacacagttgtcctgtcccaagccaccaatattgccagtgaattgaaccccttctgtagtccattgttacctctttaactgcctggtaggctggtaccactagcttgagaatctatgggttgatggttgggctgcaatggagacaaaagcaattttctgcaacctgcaaaatggtgaactagattttccaggcgaaaacacatgaaatcaataggtgctgtgtggtcttctcttcttcatcagaaggggcaagcagctgggtgggaagtcctcttttagtgatccggtccgcatttcaagaacggttctttactgcaagccaaatggagagcttgcagcaaagaggagcccaggacttccaaattcgtttccatggagcaaagcggatggaactaaggaaaaaggtattgtaggccgactttgctagagtaagaatcgttcctagtaagcctccaaacaagctgatcagcatcattctgcttcagcgagaaaccttccatcaagtctcataagcggagatattatgtaagaacctggacagagagctcctcttatgtcagctacccaacgatgggggtacatcacttgatgatcctcttgaattccctagttgatcatttttcagtttattgccaaatctagctgtgttcttgtggctgtgaaattatatctcccatgctgatacttgattcccttatctttgcttcattactacaccacagtaatttggatctgccattatgttactatgtaactctcatttgatatcaatcacagctgccacatacaaaatacaagtatgtttatctagataagatcttgattcatcaatcaccactgatctgagttttcgccactgcgatgcgaggaaaagacagatatctaataacatcttggtgaagatgttcttaggtcctttgctttctcttcaagtcagcttcctttgatttcattcctcaaactatcaatcacaggctgcagcacgtgtaatccgcatcggttcaagaacagatttcatgcttggtgatattttgcatcctgcgataaattgggctgataaagagtctcatctggatcctgatgaaatggccaagatgaagtctgcttttattggtaacctgccagaagatgttaatgaggagtacttgagaaagctttttggacagttcggtgaggtagtacgggttgctatctcaagaaaaggacaatgtccagttgcttttgttcacttcgccaaacgttcagagcttgagaatgctatagaagaaatggatggtaaaacggtgagaggacctggtcgagggccgtctttcaagatccaggtgtcagttgctcgacctacggcagacaacgacaagaagcgatctcgtgaagaagtgagaactagaagatcaaatgcatcaggagataggcgagattattctcatggaagatatggacacgattcacttgatcgtcaagtgaaagctccaagattatctaattatgtggccgatgctgctgacccctatgaatcagctgttaattcattaccttcagctgtcaaggaagtcttgcttcgaattctacgtctaagaattggtactcgatatgatattgatatccattgtgttaaaagccttgatgagcttcctgagtcatctgctcttgctgtccttaatcagtttttgatatcaggtggagacaaacacaacaaaggagattattttgcatcgttggttgctaagcaccaggctgagacctttggcttaacacatgcattacacggtaccacttatttgtcaagaaatccggaaatgcatagcaagcgatacccacatgaagattatgattttgtgacacccaggagcagtaggtacgattcgtcagcccatcatccttcaacatactacgaagacgatccaccagtgtctgagtcaagggttagaagatatgctgaagaaaggtccaccattgtaagaagcccagaaccacgtccgcgatatgacgaaacagacataagaataaacccagaaccaagattaccatatgaatcaagacacaacgccgaaaagcatctcgatcgaagatacatacaagagcatagttcaaatattgaaagaccagctgaagaagctctcctttctagggaaaggagatttctgcctgctgcagggtacatgccgaacccaggcggctcggatttccgctccaggtcgcccgccgaatattcagcacaacgccaacaaatgaggtttgatccattcacaggtgaaccttacaagtttgatcccttcacaggggagcccatcaggccagatccgaaccagcgccgctcaggaagcctgtactgatcagattagttggagcgatatgccagataagaccctgaaacaaagctagatctggataactcttcttcttgtctgccaagtgtctctgtgattttgcttgtgggctacagatcatgtaccccgagcaccatgtgtgatccagtcggactaatcatttcggcattgaaaagtcggactaactttttttgtgcccataacgctacgtattgtttggtagattaattaaaaattcatccggtgaaaagcaattttctggtatttttctggaggtgcagtaggcgtggtaatgcagaatttcaactgctacgtacactgcaagcgctgttttacccgattcgtctttacgtgttgccaaatgtttcattgacttcatagaactgatttcgactactttggatgctgagcaagggaccatgcctttctcacatatactcatctggagaatgtcaagcaagacggcccatctggacacatggcaagaagagataaactagctagctgcctcccaatgatgctactaccttctcttcgactgcttcaacgttcacatgcccctcccttgcatggcgtagtaaactgggttgcttgaaaaaacgccacttctaagcgta

SEQ ID NO: 2785 - DNA, 1706 bp, Zea Mays
agaaggtacaagtgttgcatgacaaggtggtggtcgtggtggaggaggaggtggagatggaggtttcatatgttctctaggctggggcaaattttgtggcaatgatgggattggaaggcctccatgttctttatcatcggttttagaggccaagagtccattggttgtctcactttgtgatatctccaccttgaatggcctcaaatgaatgggtaatgctgtttgatctaaagcctgctcgcaatttacttgctctgcagatattgaacctgaggaattatatgttacaatatgaaatattgggtacggaggtgctgcagtgcttccaaacacatgctgaactgtatactcagaatgttttgatgaagataattcaacaagtaggtggaacagcagatttgtgttctggtagcattgctgcttctttatatggacaatctgaagatggatttgagtgtaccagtggaactgatccactatcactgcatatagttggcactggtaattctggtggtggtgttactggaggaaaaggtggcagcggcagtggtggttcaccatgttgtaatgttttgggaggtgaagaacaagtcaacatgtgcaacagagaatttggatcttcattagtaattgggaaatccatgccagttactatattaggtctacttgttacttcctcatctatgaaatcagagattcctaaggaactttctgctgcagctatactacctttagagggtgaagttactgaggaatcatctaagtggagaacagtttgtctacaacctggactaaaggaacaagacccatcagctcttatttgttcatgttcagatattagggtgctcgaacaattttgggtgcaagaatcatgtggaggtggcagtggaggtgggtatgggggttgaggggcatatttgttagaagcaagcaaagttagactacctgaatgtagatacttttcctctgtcattgatgggtgaagatattgatgtggtggtattaggggaggtttaacatgctcttcatgtttggacgatcgtgaagaatacattgacatatctatgtattcatcaaatgataatgaaggtagagatgaaactgttcttattggtcgtagaggaggatgtactagagaaattttgggtgatgatctcaggggtatgtagagatgagatggtggaagcacagaagatatagctggatcatcccttccacttgtagaagtaacagagttctgtttagattctgtttgtgatggagaaaaaaacgacaaatctgtggatgcaccacgaagcagattgcgcctgggagatgatggagcaaaaagactagatgtcaacaatggttgaaaaggttttttctttagcaccaatcgagatgaatctgttgtatctgtatttgcattcatggaagttgaagcatggtttattgtcaagctagattcttctggtagaatgttcacacaagacatattagaagagtggctcctggagtcaattcccgccccttgttctgcagtgccattactactgcaagcatgaagctgatcgatatttttcttggcagaacttagccccgaagaagtgcttgaacagtgaagatatggtattcctgataatgaaagttcaaacccattattctcatctgtgggctcagtcacttctgaatttgtgtctctgatggtaaggttttcttcgttgctg

SEQ ID NO: 2786 - DNA, 2738 bp, Zea Mays
ctcttttccacctttccctccctcccctgaaccttctcaatctcccctccccacgtggagtatatcacccatacgcagacgccacacgcgcaagcacatgaaccaccaccatcccggcggctcccacttgctcttgctccccttcctctcctcgctctgatcctcctccagtgcactgctccgttccggcgacctcgctgccggcccggcgctccccggggcaggcgggctgtcatagggagtggcctgcgtgtatggtgattggtagcctggcaggccaccaataatatcttctctcctgggcttatttgcctccatttgtcatcagcttcttgaaatccacagtctggtcaaatgctgtgaagaaaattcctctagtgctgaataagttcagcatagaaccactatgggcgcctgtgtatcttcaagcaaaaagcggagatcgcaaaggtcatgctgtatatacaggcgctaccgtggcaaggttttaaccaatacacctatagtacgcgtcggtgaagtggagaaccttgcttcttctggagcagcagtccatttagggacttctgcagctgctcgacggagatccgatggctcaaacgttacgttccacctcacacaattgcagtggcgtcacagtgagctggacacagagaatggaaatgttgtgtgccaagaagaagcgtggttcgactctgtcagtatcttgggatctgactcagatgaagacttcagcagtgtcaatggagacttccctgctatgtcaaattcaacaggtacacaattgatgcagtgcgaagatgcttcatctatcgctgacgccatccagaagtttgaattgatttttgatggttctagtgttgctcaagctgttgggcagtacctgaaaagagatgcaaataaaatagaagcagagaggcctagagttgcaagccccgaagcttgtgatgtctctagtggaaaggttgaggatgctaagacacgaaatgagggtataaaaaaagttagaagaggcgaggatgcatgtaataccttgaagtctttcaaagatggagagaagcctcatgaaagcatcttcaaaagtttgacaccagtgtgcacacctcgtcatgctaacaaggtccaaccattggcagtagcaagtccacggggccaaaagaagaaatcagctgttgtcaggctttctttcaagaggcagtctttcgatggagaacaaactactgaaatatgttcctctagaaggtacttgatccgcccacgagctggattattggttccacaagctggtgagaaaatttctgaaggttgttggtctgtgcttgagccttcggcattcaagctgcgaggggaaagttttttcaaggacaaaaagaagtctcctgccccagcttgttctccatacacttcatttggtgtggacatattcatgtcccctaggaaaattcaccacattgcccagcatattgagcttccatctgtaaagccaaatgataaaattccttcgctacttatcgtaaatattcagatgcctacatatcctgctgctatgttccttggtgatagtgacggtgaagggattaatctggtgctatatttcaaactgaacgataactttgagaaagaaatttctccccagtttcatgacagcatcaagagacttgtaagcgacgaaacggagaaggtcaagggtttcccattggactcaacagtccctttcagagaaagattgaagatattggcagggttagttaacccagatgacatgaacctgagttctgcggagaggaagcttgttcaggcttacaatgaaaagccagtcctctcaaggcctcagcacaacttttatgtgggatcaaattacttggagatcgaccttgatgtacaccgctttagcttcatctcgaggaaagggctcgaagcattccgagaaagattgaaacatgggatgattgatctcggtctaaccatacaggtaggttgatggttctttctgccttctttattaatctttgtgacacaaaagaaatgccatttgctagttcaatatcagcctgaaagttgttaagaatatctgaagataaaactgacctagagaagcttgggctgctgaatcttactttggatcatcaggaaatgtaatatgaaccttcaaactgttaccagttgcctagtcaatattctttcatgcacagtaatacatgtaatgtacacagcttttcgtcatcctgttaggttacagattcagactagtttcttgataagctgaacatgctgaccattgacacaggcccagaagcaggaggaacttccagagcatgtactgtgctgtgtaaggctaaacaaaattgattttgtcgataatgggcaaataccaacactactgccatgtgacgatgactaaaaagttcggccagcagcctagcaacaaattaactgaaactgatgtttcggccaagaacatgagcatgtgctcacaagtccattccccgaagaattgtgagatgaactgaagtggggatctgcgtgtatagtcatggttttttttttctttcgtattctggtgttgcgaatcaaattctgttggaacttggaagttgatttgcgagtccggaattgaacatgccggcaagacgtcttatccatgttctatttttttcttttgaaggagtattattaattactctgcttataagaaagcatataagaggtacaacagaacgggataacaaaggataaaa

SEQ ID NO: 2787 - DNA, 2308 bp, Zea Mays
ctcctgcaatgccgaacagttagtatttgggcgattcaaggcggagagtgcctccgcctttgggatcaggctgggattccgatgcgattcgtagatgttcctatgctgctcaggctgtcatagggagtggcctgcgtgtatggtgattggtagcctggcaggccaccaataatatcttctctcctgggcttatttgcctccatttgtcatcagcttcttgaaatccacagtctggtcaaatgctgtgaagaaaattcctctagtgctgaataagttcagcatagaaccactatgggcgcctgtgtatcttcaagcaaaaagcggagatcgcaaaggtcatgctgtatatacaggcgctaccgtggcaaggttttaaccaatacacctatagtacgcgtcggtgaagtggagaaccttgcttcttctggagcagcagtccatttagggacttctgcagctgctcgacggagatccgatggctcaaacgttacgttccacctcacacaattgcagtggcgtcacagtgagctggacacagagaatggaaatgttgtgtgccaagaagaagcgtggttcgactctgtcagtatcttgggatctgactcagatgaagacttcagcagtgtcaatggagacttccctgctatgtcaaattcaacaggtacacaattgatgcagtgcgaagatgcttcatctatcgctgacgccatccagaagtttgaattgatttttgatggttctagtgttgctcaagctgttgggcagtacctgaaaagagatgcaaataaaatagaagcagagaggcctagagttgcaagccccgaagcttgtgatgtctctagtggaaaggttgaggatgctaagacacgaaatgagggtataaaaaaagttagaagaggcgaggatgcatgtaataccttgaagtctttcaaagatggagagaagcctcatgaaagcatcttcaaaagtttgacaccagtgtgcacacctcgtcatgctaacaaggtccaaccattggcagtagcaagtccacggggccaaaagaagaaatcagctgttgtcaggctttctttcaagaggcagtctttcgatggagaacaaactactgaaatatgttcctctagaaggtacttgatccgcccacgagctggattattggttccacaagctggtgagaaaatttctgaaggttgttggtctgtgcttgagccttcggcattcaagctgcgaggggaaagttttttcaaggacaaaaagaagtctcctgccccagcttgttctccatacacttcatttggtgtggacatattcatgtcccctaggaaaattcaccacattgcccagcatattgagcttccatctgtaaagccaaatgataaaattccttcgctacttatcgtaaatattcagatgcctacatatcctgctgctatgttccttggtgatagtgacggtgaagggattaatctggtgctatatttcaaactgaacgataactttgagaaagaaatttctccccagtttcatgacagcatcaagagacttgtaagcgacgaaacggagaaggtcaagggtttcccattggactcaacagtccctttcagagaaagattgaagatattggcagggttagttaacccagatgacatgaacctgagttctgcggagaggaagcttgttcaggcttacaatgaaaagccagtcctctcaaggcctcagcacaacttttatgtgggatcaaattacttggagatcgaccttgatgtacaccgctttagcttcatctcgaggaaagggctcgaagcattccgagaaagattgaaacatgggatgattgatctcggtctaaccatacaggcccagaagcaggaggaacttccagagcatgtactgtgctgtgtaaggctaaacaaaattgattttgtcgataatgggcaaataccaacactactgccatgtgacgatgactaaaaagttcggccagcagcctagcaacaaattaactgaaactgatgtttcggccaagaacatgagcatgtgctcacaagtccattccccgaagaattgtgagatgaactgaagtggggatctgcgtgtatagtcatggttttttttttctttcgtattctggtgttgcgaatcaaattctgttggaacttggaagttgatttgcgagtccggaattgaacatgccggcaagacgtcttatccatgttctatttttttcttttgaaggagtattattaattactctgcttataagaaagcatataagaggtacaacagaacgggataacaaaggataaaa

SEQ ID NO: 2788 - DNA, 350 bp, Zea Mays
ctcaccggaccctccatcgccgccagctccccagggtgccgctgtcgccttagccccgccggatctacgcctgtgaggcaagcgtgaaatcctatgtgggaactgtaatggtgctggcttcttgggtggatttctaagcactttcgatgaaactgcgcaatagtcatcggtttagcactttcgatgaaactgcgcaatagtcatcggtttaatttatgtttaagttacattgagggacccataatatatgtatcgtgttccatggacacataatcatattatataaaataatatttttaatgaatactccttcgtccacttgatttggacgttctgggtttttatagaca

SEQ ID NO: 2789 - DNA, 2961 bp, Zea Mays
gatacactttcgtcgttgatcggtatatctagcataattatttctacgagtagatcatatgtgcacctgtttatttagatatatttgtacatctttaaattataaattgtttctaaaatttcctaaatagacagtaggatttacaaaaacttcaataaacggtgaaaagtccatagcctggcatcgtgctgcggtgtccgagtgattcatcgtcttcccggaaccaacaggccgctgtttgactttgacccaaccacaccacgcgggacggggctccgcctccgaccccgcgccgacctaacgtgaccaactcactcaacctcgctgccgtgacgtgccgtaccgtgccgccctgtccatcgggtcaaatccctcgtcgcttcctctccgcctcctcgccacttctccgctaatccccaatccggaacctcaccgcggagaaccccagatcaaacccttccccgcccattcccacttccatccttccagtacgatccgtttcttccttacttccctgctcatccgagggtgaggaaggagtcgggcgaggaatccaccgccggggtttcttgatccgggcgcgtgattcgccgcgcccaggcaccagtgagaaatcaaatcaagaacggggtgggggaagtgagacgagggcgcggggagcaatcaagatcgcttcttggagctttcggcccccccgagccaatgccggatccggttagcggcgccccccgctcccacggcgccgggctggcatgccccctctgagcgcccccgcctgcctccgcggctcccgatgctcgtgtggtcttcgggagcaggagagggagcagcggccgtcgtgggcggcggccaggagcgaggatgcagatccggctgtcgccgagcatgaggagcatcaccatctccactagccatggcctgctagacttgatgaggttcaaggtcgccgcgcgacacttctcctaccgcaccgtcttccacaccgtcctaatcctcgccttcctcctgcctttcgtcttcatactcaccgccgtcatgactctcgagggcttcaacaagtgctcttcactagattgtcttggaagacgtttgggtccgcgccttcttggtaggggaaatgatggttccatgaggcttgtgagggatttatatgtgatgcttgatgaagtaaattctgaggaagcacctcttaatttgaaggttccagaaacttttgatgaatttatctgggacatgaagaataatgattatgatttaaggtcatttgcttttaagttgaaggctacgatggagagcatggataaggaattgaggtcatcaaggttatcggagcagttgaacaagcactatgctgcaattgctattcctaaaggcctttattgcctttcattgcgtttaactgatgaatactcctcaaatgcccttgcaaggaaacaactaccacccccggagttggtgcctagtctttcggacaactcctattaccattttgttttagcatcagataacatccttgcagcctcagttgtggtcagatcaacagttagatcatcactgaaacctgagagaatagttttccatgttattactgacaaaaagacctatcctgccatgcactcatggtttgctttaaattctctcagtcctgctattgttgaggtgaaaggtgttcaccaatttgattggttaacaaaagaaaatgttcctgtacttgaagctatagaaactcagcgcactgctagagatcgttaccatggaagtcaccgtccaagaaccagtgctagtgataacccaagggtttttgcggccaagctgcaggcaggaagtccaacatacactaatgtactcaatcatattcgaatatacttgcctgagttgttcccaagcctcaacaaggtcgtatttcttgatgatgatgttgttgtccagcatgacctatcaccactttgggatatcgatctagctgggaaggttaatggtgctgttgagacttgcataggtggagacagtcgggtgatgtctaagaggttcaggaattatttcaacttttctcatcccctcattgcaaaaaactttgacccttcagagtgtgcttgggcatatggtatgaatatttttgacctgaaagcatggaggaagacaacaatcaaagatcagtatcatcattgggtcaaggagaacttgaagtcaaacttcacactttggaggcttggaacattgccaccaggccttattgcctttaaaggccatgttcacccaattgatccatcatggcatctgttaggcttgggttatcaggaaaagacagatgtcagtagcgttgaacaagcagcagttatacattataacgggcaaagtaaaccgtggctggagattggttttaaacatcttcagccattttggacaaaatatgtgaactactcaaatgaattcataagaaactgtcatataatggagcctcagtttagattgtcttgacaatatatataaaagcatatagtaagtgaaattaaattcgttattttggaaatcaacagcagggagtttatcaagtgcaactggggagctcagtaatcccttaacatggttacatgcgctgtggagaatattcaatgaacagaaaggaaatgttattttttccccatttactgtagggcccttttcctttaatttattccatttgtatcatagctcatgaaattaagatattgcttaggatggttcttttgtattttatggagcaatataagttgggttgatggtagtcccatcgttattgtaattgatgaagagcatacacatttcaccatgtgaaaagcatggattttgattatgcaaagcaaaccttgtatactttttacattgtatgtgtgatttcatttgaaccaacattgattttacagaagaaaaacaccgatttaactaattttagccagcagaaagatcaatagtgctctgaac

SEQ ID NO: 2790 - DNA, 3063 bp, Zea Mays
ccgcctccgaccccgcgccgacctaacgtgaccaactcactcaacctcgctgccgtgacgtgccgtaccgtgccgccctgtccatcgggtcaaatccctcgtcgcttcctctccgcctcctcgccacttctccgctaatccccaatccggaacctcaccgcggagaaccccagatcaaacccttccccgcccattcccacttccatccttccagtacgatccgtttcttccttacttccctgctcatccgagggtgaggaaggagtcgggcgaggaatccaccgccggggtttcttgatccgggcgcgtgattcgccgcgcccaggcaccagtgagaaatcaaatcaagaacggggtgggggaagtgagacgagggcgcggggagcaatcaagatcgcttcttggagctttcggcccccccgagccaatgccggatccggttagcggcgccccccgctcccacggcgccgggctggcatgccccctctgagcgcccccgcctgcctccgcggctcccgatgctcgtgtggtcttcgggagcaggagagggagcagcggccgtcgtgggcggcggccaggagcgaggatgcagatccggctgtcgccgagcatgaggagcatcaccatctccactagccatggcctgctagacttgatgaggttcaaggtcgccgcgcgacacttctcctaccgcaccgtcttccacaccgtcctaatcctcgccttcctcctgcctttcgtcttcatactcaccgccgtcatgactctcgagggcttcaacaagtgctcttcactagattgtcttggaagacgtttgggtccgcgccttcttggtaggggaaatgatggttccatgaggcttgtgagggatttatatgtgatgcttgatgaagtaaattctgaggaagcacctcttaatttgaaggttccagaaacttttgatgaatttatctgggacatgaagaataatgattatgatttaaggtcatttgcttttaagttgaaggctacgatggagagcatggataaggaattgaggtcatcaaggttatcggagcagttgaacaagcactatgctgcaattgctattcctaaaggcctttattgcctttcattgcgtttaactgatgaatactcctcaaatgcccttgcaaggaaacaactaccacccccggagttggtgcctagtctttcggacaactcctattaccattttgttttagcatcagataacatccttgcagcctcagttgtggtcagatcaacagttagatcatcactgaaacctgagagaatagttttccatgttattactgacaaaaagacctatcctgccatgcactcatggtttgctttaaattctctcagtcctgctattgttgaggtgaaaggtgttcaccaatttgattggttaacaaaagaaaatgttcctgtacttgaagctatagaaactcagcgcactgctagagatcgttaccatggaagtcaccgtccaagaaccagtgctagtgataacccaagggtttttgcggccaagctgcaggcaggaagtccaacatacactaatgtactcaatcatattcgaatatacttgcctgaggtattagaattttcttgactattattctcatctcttactttcctagtaccatttttgttgggtgaaacaagtatcgtgcttatatagatagaaggatggtttgaaacaatgaaaactgcaaaagaattgaaagcattttagacttttgctctgtagaactattcactgtgaacctgttctagtttgctggtcctgctgggatcaaggagtaagtgatgctgccctcttcttgagatatctggagctttctctgcatgtagtctatatataattgtatatggtacaaacttgttcaaaatgtggttatatttgttgacctgcatccttttttttttgctgaaagttacactgatttaatctgcaatcggtggatgcagttgttcccaagcctcaacaaggtcgtatttcttgatgatgatgttgttgtccagcatgacctatcaccactttgggatatcgatctagctgggaaggttaatggtgctgttgagacttgcataggtggagacagtcgggtgatgtctaagaggttcaggaattatttcaacttttctcatcccctcattgcaaaaaactttgacccttcagagtgtgcttgggcatatggtatgaatatttttgacctgaaagcatggaggaagacaacaatcaaagatcagtatcatcattgggtcaaggagaacttgaagtcaaacttcacactttggaggcttggaacattgccaccaggccttattgcctttaaaggccatgttcacccaattgatccatcatggcatctgttaggcttgggttatcaggaaaagacagatgtcagtagcgttgaacaagcagcagttatacattataacgggcaaagtaaaccgtggctggagattggttttaaacatcttcagccattttggacaaaatatgtgaactactcaaatgaattcataagaaactgtcatataatggagcctcagtttagattgtcttgacaatatatataaaagcatatagtaagtgaaattaaattcgttattttggaaatcaacagcagggagtttatcaagtgcaactggggagctcagtaatcccttaacatggttacatgcgctgtggagaatattcaatgaacagaaaggaaatgttattttttccccatttactgtagggcccttttcctttaatttattccatttgtatcatagctcatgaaattaagatattgcttaggatggttcttttgtattttatggagcaatataagttgggttgatggtagtcccatcgttattgtaattgatgaagagcatacacatttcaccatgtgaaaagcatggattttgattatgcaaagcaaaccttgtatactttttacattgtatgtgtgatttcatttgaaccaacattgattttacagaagaaaaacaccgatttaactaattttagccagcagaaagatcaatagtgctctgaac

SEQ ID NO: 2791 - DNA, 448 bp, Zea Mays
ttcaattagatatgttgacaggttccccacctggtctgggagtggcccggtgaaggaattattatatatgtcaaggagctcgagttgcctgcagttggaaagggaggacagaaagtcgagacctccgttgaaattgttccatgagaatctaaactgggtcagacctgggatgtttccaattgttctaggtacagaaccagacaatagatttgattccacactcagcaaagacaatgcagacaaatttcctagagaagctggaactggacctgttagccggttgtttcctagacgtagattctttaggtcttgcaacaggcctatttctggtggaatgtgcccagtcaggtcgcagaaagagacgtctatatcagtaatacgggtgaggttgccaagaatagctgggataggtccagtaaggtgaggaagtccgcctaagtaaagaact

SEQ ID NO: 2792 - DNA, 1187 bp, Zea Mays
agcacaagcaggagatagtgctgagaccaagaaaatggccggcagtagcactagagcgactagtgagcttgcagcggccattgggacagagtcaggtgctgcttaattgtttattttccttggcacacatatgaatgcatgggaaggtagcaaggatcaggggcggacctacgttatggtgagtgagggcctaggcccctgctcatttctatgatattatgatatagtatagatttttaccatggagtcccctccttgatttaactgagatgcccctgctcttacattttaatccttgatcttgtaagaatgccctcactctaattttatcctaggtccgcccctggcaaggatggctttgtagaaggtaggtaggtaagttgtttcttagaatatttcaaagcaggccggcctactggttgctgtccaccagtgggaaaaaggaagcatactagtccaggtacgaatctccaaataaatctgccaggaggacccgactatcctggttgacggccggttggcctgttgctgtccaccggtgtgaatatttcaaactctactgtcatatagtgttttgtcagtgtgtacaagttggaattgatccatttcatgtaactttgacactttctttgtcttctcaaaatgggaacaaaaggtcaatacgatacctaggatatcaaagttgctaagtacaaggataaacaatcagagaggtgaatatcacggaagcttaaaaataattatatcacctccttccaactgtaaaaccgatttaattcagtttgataaatttagacagaactctgttttgctagaaaaaaaaaacaatactgatcaaaatcagtaacttcaattgacttgagattttaacagattaaactagataaaattacgcaactaacccaactaaaatcatgtcgatcagactttggatctaaagatattaacgaaactcaaatcctcttcggaattggaggggattaaggtggaattagttccctccaatcctccaatccctagggaggctagaaatagcacctgaagtcctggggggccgagaagatcacaatgtccgaaatttctggatcccagaaaatgtatgagacctgcaaatcacaacaccaccaaatcattcataataccaaacataaaaatggcatggtacatgcgcaacttgttccccgccg

SEQ ID NO: 2793 - DNA, 498 bp, Zea Mays
cccagatccaaattgcgaagaagttgtcgtccctgcacatggcggttcccgattgtgatccatttctgaacttggaggaaattgacggtcaagcttcggtgaccaagagatcaaactcttcgagttccacaaagttgaagaccctgagcatctgtttggtggaggcaagtgtcccttgacctatctctgtcctatacattctttaattcacctcccgcatttcacagttatacctaaggattgactagcttttgttatccatgtccttgtttacctatttgggttggattattattgttttgctttatgctattgctcaacactaaacaatgaacatgatgagatttatcaatgatacgctgttttcccctcctttattatgatgctatacttgtggtattcaagggggctcgagcgatttctcgagtgcctctccgtaaggacctgttcgttggatgaccgctcgggaaaacagtgcaaccatgagggtggaatggg

SEQ ID NO: 2794 - DNA, 500 bp, Zea Mays
gtcgcgtcgttctccttcccggcgagcagtcctctctgtcccctggccgagcaattgtgatccatttctgaacttggaggaaattgacggtcaagcttcggtgaccaagagatcaaactcttcgagttccacaaagttgaagaccctgagcatctgtttggtggaggcaagtgtcccttgacctatctctgtcctatacattctttaattcacctcccgcatttcacagttatacctaaggattgactagcttttgttatccatgtccttgtttacctatttgggttggattattattgttttgctttatgctattgctcaacactaaacaatgaacatgatgagatttatcaatgatacgctgttttcccctcctttattatgatgctatacttgtggtattcaagggggctcgagcgatttctcgagtgcctctccgtaaggacctgttcgttggatgaccgctcgggaaaacagtgcaaccatgagggtggaatggg

SEQ ID NO: 2795 - DNA, 145 bp, Zea Mays
ctaatcgctcgtcggattcgggtggatacggcgaacctgcgctgtgccgcggataactcctctcggcctctcaatcaccgacgagcaatgactgaggagcacggtacttagtaggtggaaaatactgagcaggagctcgttgaag

SEQ ID NO: 2796 - DNA, 701 bp, Zea Mays
atggcacagcaaggtgagtttctgattggactcctcaatgaactagcctgttgggctttggcacctggagcagagtcattcttcaggtcccttctgttaggaaggatttggatgcgctccttgtttgagtgctccaaatatgaaaaccaagcagatagctgtacctttgaacttcctcttacttggaggactttcagtgtttcttctatctgcaggaatgtcctcaggaggcttggagccttcatgctggtcaatcttcccaagaagaaaggtgtattgagacttcaaatgcttctagtttgtcttcactgcaaccgaaacagtagccagctgaacatgctgacatgttaatgcgggtggtcaaggctcaggattcagagcagaagatacacataaatactggtgaatgatgccatcgacgatgatgaaatgatcaaacgatggatgatgccatcgatgaaagatggaatggaactcaaatttgggtggtcgcacaagtgtggagacttgaatttatatatacttagttagtctcaatgttagcataaatagttgatgagcaagttttcccattgtattttagtttgaatttagagtacatttatgtaagagttatttgacaatgcttatttatgagatattgaatgatatttatgtatattatattaattataatgttattaaatatatgtgtatgtatt

SEQ ID NO: 2797 - DNA, 2611 bp, Zea Mays
gtaggcggtagcctcaccaagggcggtgacgggaaaacctagcagtataacccctgctcgcagtcgtccacactcccgctgcttcacgcagtcggcgcctccactctgctccctcgctcgccgtcttcttccatccaggcccctcagctttccctgtttcccatatattctcgcgcggctccacgctctcgctctccacactccacaccgcagacgcctggggggcgctcctactcctcctctagggaaggaggggctcgaggttccaccaattcgccgacaggtcccttgcgtgccatccccgccgcgcgcgcagctccagaggcctccatcccatccatggacgccaagaggcagggcttcttctccgcgctgcgggaggaggtggcgcgcgggctgtcgccggggcgcgcgcggcggcggtcggcgtccaacgccgcggaggtggcggcggcgctgcgccgcctcgggggcggcggcgaggcgctcgcgccgctcatggagggcccggatccggaggcgggccccggcgcgacctgcggcggctccgcgaggaaggaaggcgggtgggggcggtgggtgcgcggccagctccagctcacgcgcgcgccggcgctggaggccggggccggagctggctccggcgccgccgccgccgccgccgccgccggcaggcgcaacgacctcaggctgctgctcggcgtcatgggcgcgccgctcgcgcccgtgcacgtctgcgccgctgagccgctgccgcacctcagcatcaaggacacccccattgagacgtcgtcggcgcagtacatactgcagcagtacctggcggcgtcgggcgggcagaggctgctgtcctccatccgcaactcgtacgccatgggcaaggtgcggatggtggcgaccgagttcgaggcgggcggccgcgtcgtccggaaccgcatggcggcgcagcgcgccgagcccgggcgcttcgtgctgtggcagatggcgcccgagatgtggtatatggagctggccgtgggcgggagcaaggtgcacgccggctgcaacggcaagctcgtctggcgccacaccccctggctcggcgcgcactccgccaagggccccgtgcgcccgctccgccgcgctctgcagggcctggacccgctgacggcggcgagcatgttcgccggcgcgcggtgcatcggcgagaggaaggttaacggggaggactgcttcatcctgaagctgagcgcggacccggagactcttcgggcgcgcagcgaggggctggcggagatcatccggcacgtgctgttcggctacttcagccacaagtccggactcctcgtgcacctggaggactcgcacctgacccggatccagtccgccaccggcggcgacgcggtgtactgggagacgaccatcagctcgtccgtcgaggactaccgcgccgtggacggcgtggtggtggcgcacgccgggcggtccgccgtgaccctgttccggttcggcgaggcggccgtggggctgggccacaccaagacccgcatggaggaggcgtggaccatcgaggaggtggcgttcgacgtccccggcctctccgccgactgcttcatcccgcccaccgacgtcgggcccggctccgtcagcgaggccgccgagctcccgcggggcgagcggagcaaggccgccgccggcctcgtcctcccgtgccaccgcgctagggtcgccgcgctcgagaaggccgacgacggtggcgtcgcgtggagcggcgccctgcagctcgggtgcaagtgattcgtggtaccccgtgctctctcgcagccgtcttgcatttcctgactgactggttttggtaggagacacagaggtaaggtcaggaggaggacttggaggagctttaccattccaagtttccctctgtaaataggaagctcacatcgccttccgtatccctgcctcgtctcgtccggagatctggtagtaggtagtctttgtctgtaacgctgtgtcggcacctcgaggacgaagatccaggggagcggggtgtttgtgtttcttctccgtccagccatatggtatggatcctagtgggcggcggtgcttcttcttctcttctgtcgtagccaaaactaatcatctgaggctagtgaggaagaagggtttcctcgcaggcaattgagttctgtcgtcgtgtacgtggagtctgattagcagcagtccagtatgcttggttggcgagtcaaactaactttttttaggggggagggcgcaaattatgtagtgacctgcctgtgggtggtcctggccgcggggtggtccgtccggtcaggctgtgtaccctttttccttcacatctctctttatttattagtacgatgagatggtgtggttatgttctacacaagttttatgtaagccaaaacttgtatgaaatatcatggtttgagtttgctttttttcctctcccattttctggctgcccactcccacaacttttttgtaatttagccatttttgattttatttttataaatataccctttttagttttattttaaaaaatagacccttaagtcggtgtcgcattggcgcttaggtataggccacgacctacgacttggcggcggcg

SEQ ID NO: 2798 - DNA, 369 bp, Zea Mays
cggggcgtgggtctgggattctggagcggagcggcgcggggctgcggcgggtgggcggcgacggcgacggcggcgctggttcttctggccgcgtcgctgacggtgggtccgatggtggcgtgatggatggtagagccacctgtcagggtcgagagagtggtgggttgatgtgatgggatctgcatgggtagtacgtgcattggttcaaacacgctgtattttgtgctactgccgcacgtcacgttattattctctgcgtggagttgacgcccagaatatatagtaccaccactattatattttgtttgctattgtacaacattttcatgcttgattacttctaccgtgcctatgatggtcatttgcttc

SEQ ID NO: 2799 - DNA, 2325 bp, Zea Mays
aaagcaaagcatccgaaacggctgaaccgaggcgggcacgtgccaaccacgtgccttacccgccccgcccgcgtcgtccaggtccaaggtccaactcgcgacgcatctcgatggccgccaccgacgacggtgccgtggactccgcctccgccgcggccgcggccagggccgtcgaggaggcgcgcgcgctgctccccgccccggcgccggactacgacgacgaggatctcgaggagcgcgcgtacgaggcggctgagaaggtcatcgtgtccatctcgggcgggccggacccggaggacgtcgacggcgatggcgacggcgcggagctctgctcgtcctcggggtcgtcaccgccgcccttctcgtggcggaagctctggctcttcacgggccccgggttcctcatgagcatcgcgttcctggacccgggcaacctcgagggcgacctccaggcgggcgccgtcgccggggacacgctgctgtggctgctcatgtgggccaccgccatgggcctcctcgtgcagctcctcgccgcgcgcctcggcgtcgccacaggccgtcacctcgccgagctctgccgcgacgagtaccctgactgggcgcgccgcgcgctctggctcatggccgaggtcgccatggtcggcgcggacatccaggaggtcatcggcagcgccatcgccatcaagatcctcagccgcgggtacctgccgctctgggccggcgtcgtcatcaccgccttggattgacactaaacccaacgggaaagacttattgattggtattttggttccaaaattgagctcaaggacaataaggcaagcggttggggttgttggctgtgtaatcatgcctcacaatgtgtttcttcattcagcactagtgcaatcaaggaaaatagatcaaaataaggaatatcaagtccgtgaagcattgagatactattcaatagagtcaacaatagcattagttgtctccttcatgataaatctctttgttacaacagtttttgcaaaaggattttatggaagcaaggaagccggtaatattggtcttgaaaatgctggacagtatttacaagagaagtttggtggaggattttttcctatactgtacatctgggggattgggcttttagcagctggacagagtagtactataacaggaacttatgctgggcagtttataatgggcggatttctgaatttaaggttaaaaaaatgggtcagggcactgatcaccagaagcttcgcaattgtgcctactataactgttgctttgttcttcgacacatctgattctgcactggatattttaaatgagtggctcaatgtgctccaatcaattcagatcccttttgcactcattccactcatcaccttggtttccaaggagcaagttatgggagtcttcaaaataggccctaacacccaagctgtaacctggactgtagccactctgctgatcactatcaacggctacctcttgatggatttcttctcttctgaaatccgaggtcccctatctggctcgcttctctgcgtggcggtcctcatttatgcctcgtttgttctgtatctcatattgcggggcaccgagctgtccgagaagattgccaaagcgatccgcggcagtttttcatgacaatagtcatcagttttggtcttacatagtgacaagaagtttctcagacagaagagacacgtatcgggagatactaccacacccggtctggtgactgcggactggatactacagcacaccggcatacactgtacagtgattgcttggaagggtccacccatcagttgctgcgaggagcttgcaagcctgtagcagctgctcgttgcatctgctccaggccggaagtaacacatagagatgaacgaattgctgatgttgtacgtgaacattcagagaagacaggttctctttgcaatcaactctcttttttttaaccagtgaagtaaccagaggaagaggacgttgggaatggaagaactggaagtcatttgtattctgtttaatttgcacaggagggtatgtgctcaaccatttttcagggaagccgttggattacaggggtgtttgaatgcactaggaagctaatagttatcggctaaaattagctaaagatatacaaacaaaactattagctattttagtaaattagctaatagttagctagctaattccactagcaattttttagccaactaattgtacgtgatttcattgggcttagagcaactccaacaacaccactaaatgtaatagccaaaatcttagaaataaaataggatccttgattatatgattttatgacta

SEQ ID NO: 2800 - DNA, 1953 bp, Zea Mays
cagcgattaaacttattagacaagactctaatccaataagacttgctagcggtggccggagattaaggatcagcagccagcaacacattgagtaaaaaataaggagcaaacttgccttgtggaaatcccaataagtccttgtggaaatcttcagtccagacaacaggcgaagcccagaaatcccaatcatggacaacagtgcgtactactgctactgctgccttctagctcttcttccacctctatactttctcgtcaagttctggtggagaacttcctgtgcacgtcgtagccatggactccggctccctccaggcccatggcagctccccatcatcggcagcatccaccacctccgcggctccctcgtccaccgggccctgcgagacctgtcgctccgccacggcccactcatgttcctcaggctcggcgaggtgccggtggtcgtcgcgtccacgccggacgccgcgaaggagttcatgaagacccacgacgccaccttcgcgacgaggccaatgaccctgagcgccaaggtcttcgcgaaggacgggccggggatcgtggtggccccgtacggcggcgaccactggcggcagctccgcaagatctgcatcgtggagctcctcagcgcccgccgcgtccggtcgttcgggcccgtgcgcgaggaggaggcggcgcggctggtccaggccgtcgccggcgcctcgacgcggcgcgcgccggcaccggcgccgctcgtcgacctcggcaggctcgccgccgtgtacgtcgccgacgcgtcggtgcgcgccatcgtgggcaggcggttcggggagacggacgctctgctgcgcttcgtggacgagagcgtcagcctggccggcgggttcacgcccgtcgacctgttcccgtcgtcgctgctcgttcgcgtgctcaccttgcgccggaccgtgcgcaggctggagcacttccgcgagtccttgttcggcttcatggatggagtggtgcgtgagcacctcgagaggaagcagtcatcacgtggtggaggaggaggagaagaagaagaagaagctgacatggtcgacgttctcctccggatccaacaggagggaaacctaaagttccctctcaccatgcgcataatcgaagcagtgatatttgatctcatcgcagggggtatcgagacagcgtcatcgacgctgcagtgggcgatggcggagctgatgcggaaccctgccgccatgtccaaggcgcaagccgaggtcaggggagtctacgcggggcagacgaaggtaaccgaggaccgactaggcgagctaccctacctgcagctggtgatcaaggagaccttgcggctgcacgtcccggggccgctgctgatcccgcgggaatgccaggagcactgccgcgtgctcggctacgacgtgcccaagggcgccatggtgctcgtgaacgcgtgggcgatcgcccggagcccggagtactgggaggagccggacgcgttcgatcccgacaggtttgccggtgacgcggcgagggatttcaggggcaacgacttcgagttcataccgttcggcgctgggcgacggatctgccctgggatggcgtttgggctcgccaatatcgagctcgggctggccagcttgctgttccatttcgactggagcctgccggagggcgtcgttccaagtgagatggacatggctgagaccatgggaatcactgctaggagaaaggcagacctcctgctgtccgctactccgcgtgtcgtcccacgcccgagttaaattcatggttcccgtacaatttagaaccaatgaacttctcttgcttgcctctgaaaaaaaactaataataattgtgttgactgtttggttcgcttcatctgggaggctcctgtagatgtatgttatgaagacgtgattcactaatgagtgtttggtttgatgaaccactttatccaaaataaaatag

SEQ ID NO: 2801 - DNA, 502 bp, Zea Mays
gttgaaacacgttaactcatccttgatatttcaacattccatttctcctcttttgtatcataaatttacaatcgtaccttcggctcaatagaatgaattagagcgaaggtgcattaggaagggactacacgaatcactctttagccctccaaaaggtactttatgcaggtcaatgttcacctatttataggggatcgtacaactttgtatggaataacaaatatgcccacaagacttgtacatataatttacaaaacgatgcgagggcaatattgacttctgcctctaacagcttggacacggaaccgtggacgccttctcccggcaatgttctccttcgtctctatgtgttgttgtgacaaagcttaacaacttcgtctttatcttcatcctattccgaaggtattcaataccgaagttcctacaacacttgtgaacatgctgacaaccaataattaagtgtgtttttgagcaccttcgaaagacgaaggccccaacatac

SEQ ID NO: 2802 - DNA, 617 bp, Zea Mays
atggagcgaggagacgaggcatcgtcagtagtgagcaaggccagcacagcagagcagcgactcaccagggagcagcacggcgacggcgcggcgtggctgaacctgacgctgggcgcgagcgaatcgccgtcgccgtctccgtccccggacgccgcgagctgctccgcggactccgagtccgggtccgggtccgggtccgccgccaagccgcccccgcacaaggtgttctcctgcaacttctgcctgcgcaagttcttcagctcgcaggcgctgggcgggcaccagaacgcgcacaagcgggagcgcagcgccgccaagcgatcctcgtaccacgcgcagcgggtggtcgtgggcggcctgccgctgcacgcgcacgccgccctcatgcgctccctccgagccaacccggcgccggcgccggcggtcaggacggcggcgaggttcctcgagggcggcgtggcggcggcggcctgggcaacggtcccgtgcgaggaggcgccgagctcggcctggcctgggagcttcaggctgagagcgccgcactcggagtatgagcaagcgtgtgagccgattcagccgaggccttcgtcgaggttcatgttcatctgctgaataaa

SEQ ID NO: 2803 - DNA, 1727 bp, Zea Mays
taaatatcaaaatagactaggtaccacgtcatctctagtttatcttctattagttttgttggctaaagaagaaatattgtcgatatacatggccaatcatgtgtataaatagccatcaaattactagttaatccatcacccatattattgataccaactagcaacatacatagtgaagtacactagcaacatcttagcaccaatgggagccaagatttttgccctccttgccctccttgctctttcagcaagcgctgctacctcgacttttattccacaatgctcacaacaatacctctctccggtgacagccgcgggatttcaatacccaactatacaatcctacatggtacaagaggccatccaagcaagcatcttacggtcattagcattaaccctccaacaaccatatgctctattgcaacagccatccttagtgcatctgtatctccaaagaatcgcggcacaacaactacaacaacagttgctaccaacaatcaatcaagtagttgcagcgaaccttgctgcttacctccagcaacaacagtttcttccattcaatcaactagctggggtgaaccctgctatctacttgcaggcacaacagctactaccatttaaccaacttgtcgggagcccttatgccttcttacaacaacaacaattgctgccatttagccaacatgctttgacgaatcctaccaccttattgcaaccgcccaccattggtggtgccatcttctagattttttatgatttatactgtaataataaagttctcatgctgatatgtgcgacctctcagtaataaagtattagagatctatattttaaattcaaatgtatccaagtgtgttccattgctttttgtttccctaagaccaaatactaaaacctttgaatcatacctattgtatgatacctgaataattctacactaccgtgaataaacattatgaaggagctagtggctaggtggaggttgcagcctagaggatgagaatgatgatgtgttaaggttgtatagatgggcttaggataaaatttgttgttggtctagaatagtatctcagttatctaagatatgatggtaagcctaggccattgagaggctccttgatggcggtgcgttcaccctcaggtgactgtgtgcaccaatgaggggccccataggcggcactagcactccaccatgctctctcgaacttatatgagacagaaaagaaggtggatgaagagggaagactctcaagagtagaaggtggagaaagagcagagtgctacgaggagataaaaatgattaggtacatagcatttttatcctagtcattagatgagatcagatggtgcagagttgttaaggctacttctggctcaggcaagtgtaagaatttcctacctaggccaaagttgtggcctgggatgtgagtctacgtggggagcaggctagcaggccgaccactattgacagagataggcaatgccattgataatctgaagcatattggccctatgttggtaataaaaggaacacatgagacaactaataatgcagccttgacaatgacatatgattttcaacacattaagtgagatagatcaaattagaagtgtatgatggttattagaagctatattatagagtctattaggggagcaatcttgaatgtccaagtgccatagagtatcttgataaaattaagcaacaattcattggttcttctaat

SEQ ID NO: 2804 - DNA, 1168 bp, Zea Mays
agttaatccatcacccatattattgataccaactagcaacatacatagtgaagtacactagcaacatcttagcaccaatgggagccaagatttttgccctccttgccctccttgctctttcagcaagcgctgctacctcgacttttattccacaatgctcacaacaatacctctctccggtgacagccgcgggatttcaatacccaactatacaatcctacatggtacaagaggccatccaagcaagcatcttacggtcattagcattaaccctccaacaaccatatgctctattgcaacagccatccttagtgcatctgtatctccaaagaatcgcggcacaacaactacaacaacagttgctaccaacaatcaatcaagtagttgcagcgaaccttgctgcttacctccagcaacaacagtttcttccattcaatcaactagctggggtgaaccctgctatctacttgcaggcacaacagctactaccatttaaccaacttgtcgggagcccttatgccttcttgcaacagcaacaattgctgccattctacccacagaatgtggcaaacattgttgccttcttacaacaacaacaattgcttccatttagccaacttgctttgacgaatcctacctccttattgcagcagctgtcacacccggttttagaaggcaaaccgaatgcgaaccatgtacgtgccaggatcagttattcacgtacacagcagttacataacatggacatcatcacacagtgctcaaaatagtattaagaagggaaatagtcgattacatcatacgtttgagacgtccatatagttcttacaataaatcaaagtgcggaaaagaaacgtagataaccgcggccttcacaggcagccgactgggggttgccgctaacccacaactagaactcgtcgtagtcttggaactcctggaagtcaccttccacagcttcatcttcgcctgagcagtggttgcaatgctgacaacctggggatgggggggggggggggtttggtgtgtagagcaagggtgagtacacatcaacatactcagcaagtatcctgtctggctgtagtggactagctgtatgtggggataagtcaagcagttgcttttagttggtcagattattacttactagtagaaagccaagttttag

SEQ ID NO: 2805 - DNA, 1219 bp, Zea Mays
atcacccatattattgataccaactagcaacatacatagtgaagtacactagcaacatcttagcaccaatgggagccaagatttttgccctccttgccctccttgctctttcagcaagcgctgctacctcgacttttattccacaatgctcacaacaatacctctctccggtgacagccgcgggatttcaatacccaactatacaatcctacatggtacaagaggccatccaagcaagcatcttacggtcattagcattaaccctccaacaaccatatgctctattgcaacagccatccttagtgcatctgtatctccaaagaatcgcggcacaacaactacaacaacagttgctaccaacaatcaatcaagtagttgcagcgaaccttgctgcttacctccagcaacaacagtttcttccattcaatcaactagctggggtgaaccctgctatctacttgcaggcacaacagctactaccatttaaccaacttgtcgggagcccttatgccttcttactgcaacaacagcttctgccattccatctgcaagctgtggcaaacattgttgctttcttgagacaacaacatttgttgccattttacccacaagttgtgggaaacattaatgccttcttacaacaacaacaattgcttccatttagccaacttgctttgacgaatcctacctccttattgcagcagctgtcacacccggttttagaaggcaaaccgaatgcgaaccatgtacgtgccaggatcagttattcacgtacacagcagttacataacatggacatcatcacacagtgctcaaaatagtattaagaagggaaatagtcgattacatcatacgtttgagacgtccatatagttcttacaataaatcaaagtgcggaaaagaaacgtagataaccgcggccttcacaggcagccgactgggggttgccgctaacccacaactagaactcgtcgtagtcttggaactcctggaagtcaccttccacagcttcatcttcgcctgagcagtggttgcaatgctgacaacctggggatgggggggggggggggtttggtgtgtagagcaagggtgagtacacatcaacatactcagcaagtatcctgtctggctgtagtggactagctgtatgtggggataagtcaagcagttgcttttagttggtcagattattacttactagtagaaagccaagttttag

SEQ ID NO: 2806 - DNA, 1267 bp, Zea Mays
atcgataccaactagcaacatacatagtgaagtatactagaaacaacttagcaccaatggcagccaagatctttgccctccttgccctccttgctctttcagcaagcgctgctacctcgactattattccacaatactcacaacaatacctctctctggcgacagccgcgagatttcaatacccaactatacaaccctacatgctacaagaggccattgcagcaagcatcttacagtcattagcatttaccctccaacaaccatatgccctattgcagcaaccatccttagtgcatcagtatctccaaagaattgcgacacaacaactacaacaacaattgctaccaacaatcaatcaagtagttccagcgaaccctgctgcttacctccatcaacaatagtttcttccattcaatcaactagctggggtgaaccctgctgtctacttgcaggcacaacatctactaccatttaaccaacttgtcgggagccctgaaaccttcttactgcaacaacagttgctgccattccatcggcatgctatggcaaacattgctgctttcttgcaacaacaatagttgttgccattttacccacatgtggtgggaaacattactgccttcttgcaacagcaacaattgctgccattctacccacagaatgtggcaaacattgttgccttcttacaacaacaacaattgcttccatttagccaacttgctttgacgaatcctacctccttattgcagcagctgtcacacccggttttagaaggcaaaccgaatgcgaaccatgtacgtgccaggatcagttattcacgtacacagcagttacataacatggacatcatcacacagtgctcaaaatagtattaagaagggaaatagtcgattacatcatacgtttgagacgtccatatagttcttacaataaatcaaagtgcggaaaagaaacgtagataaccgcggccttcacaggcagccgactgggggttgccgctaacccacaactagaactcgtcgtagtcttggaactcctggaagtcaccttccacagcttcatcttcgcctgagcagtggttgcaatgctgacaacctggggatgggggggggggggggtttggtgtgtagagcaagggtgagtacacatcaacatactcagcaagtatcctgtctggctgtagtggactagctgtatgtggggataagtcaagcagttgcttttagttggtcagattattacttactagtagaaagccaagttttag

SEQ ID NO: 2807 - DNA, 1135 bp, Zea Mays
agattttgagtcggcatatatctatatttcaaataagtatcggtcattatatttatatgtgaatagcgacgcttcgtcggtcggcaattctcgctaatagcatctcatcgttagtcggaataaagaccaaagaccacagtcgccgcgcacccacgctcgtacactcagctgccgctgcgccaaggagaagctgtgcgcggtccaggcacaggtgcagggtgaacaggaggcggcgacaacactccagaggagggtggatgagctagagagcggcggataggagagggccggtgtgttggcggtggagggcgtggagctgcgcagggcaaacactgtgctagaggagaacaacagggagcttgccttgaggctgcaggacgcgatcgagcaggctactgcatctgcctccgctaatctagctcctaaggttcgacatgccccgtgcctaccatcactctcgatttgaagaagagtctcaagattttgcaggtgttgtgttactcctgattcagttaccttactggcagtaggatgccattgcaacaatctaaaagtgcaatcatctaattgaagctcttttacttatacaagatagatctagaattgttttacttgagattcaagcaatgttggatgtgtctgtctcagatcaattggtattgtgtgtttggtgatcctggtttatcctttgggatggttatgtgatagtatatttgacatcttattttgctggtgagctatgtaattgacccaaaaggcacttcaagcgggcaggaaagtctaaggcccttactaattacttccaagagggaggtcctagaggtagcaagcagatcgtggtggtacctatggatgagcgctatagcaagatcaaaagttcttgtggatggatgttattttgttttgtatttctcgaaaagagaaatttgcaagtgaacttaaaattgtgaagccacatgttctcatatgtggttgtactagctagtatctctgaggtttaacaagtcaaacttagggttgttgtctgcttattttgatctttattacgacaagagcaaacttgtgacctttatgtatgaatgcagtacaattgttattgccatgaatgaaaatatgagctatgtttgaccaaatc

SEQ ID NO: 2808 - DNA, 818 bp, Zea Mays
agattttgagtcggcatatatctatatttcaaataagtatcggtcattatatttatatgtgaatagcgacgcttcgtcggtcggcaattctcgctaatagcatctcatcgttagtcggaataaagaccaaagaccacagtcgccgcgcacccacgctcgtacactcagctgccgctgcgccaaggagaagctgtgcgcggtccaggcacaggtgcagggtgaacaggaggcggcgacaacactccagaggagggtggatgagctagagagcggcggataggagagggccggtgtgttggcggtggagggcgtggagctgcgcagggcaaacactgtgctagaggagaacaacagggagcttgccttgaggctgcaggacgcgatcgagcaggctactgcatctgcctccgctaatctagctcctaaggttcgacatgccccgtgcctaccatcactctcgatttgaagaagagtctcaagattttgcaggagggaggtcctagaggtagcaagcagatcgtggtggtacctatggatgagcgctatagcaagatcaaaagttcttgtggatggatgttattttgttttgtatttctcgaaaagagaaatttgcaagtgaacttaaaattgtgaagccacatgttctcatatgtggttgtactagctagtatctctgaggtttaacaagtcaaacttagggttgttgtctgcttattttgatctttattacgacaagagcaaacttgtgacctttatgtatgaatgcagtacaattgttattgccatgaatgaaaatatgagctatgtttgaccaaatc

SEQ ID NO: 2809 - DNA, 1523 bp, Zea Mays
agattttgagtcggcatatatctatatttcaaataagtatcggtcattatatttatatgtgaatagcgacgcttcgtcggtcggcaattctcgctaatagcatctcatcgttagtcggaataaagaccaaagaccacagtcgccgcgcacccacgctcgtacactcagctgccgctgcgccaaggagaagctgtgcgcggtccaggcacaggtgcagggtgaacaggaggcggcgacaacactccagaggagggtggatgagctagagagcggcggataggagagggccggtgtgttggcggtggagggcgtggagctgcgcagggcaaacactgtgctagaggagaacaacagggagcttgccttgaggctgcaggacgcgatcgagcaggctactgcatctgcctccgctaatctagctcctaaggttcgacatgccccgtgcctaccatcactctcgatttgaagaagagtctcaagattttgcaggtgttgtgttactcctgattcagttaccttactggcagtaggatgccattgcaacaatctaaaagtgcaatcatctaattgaagctcttttacttatacaagatagatctagaattgttttacttgagattcaagcaatgttggatgtgtctgtctcagatcaattggtattgtgtgtttggtgatcctggtttatcctttgggatggttatgtgatagtatatttgacatcttattttgctggtgagctatgtaattgacccaaaaggcacttcaagcgggcaggaaagtctaaggcccttactaattacttccaagtaagtagagcaatcaccatcacacagatttattcaaggtttttttgtgttaagccaattgttcgttttcatgtaatttttgtccactaatattttattgaataatttgtgtgtcgtcgcaacgcacgatcattgtactagtagtattgaatgctccatttgtagttcttgtgatattacagtactgcagtctaaaatactgaaacattgtacactgtaataccctgaaagactgggccaatcaattttgactcttctttacttgggcatgtgtttattcaaaaaattcttggtagctacggtctgatttggactctatattctatagtttatattgggaaggatttcttaaatagtctactaatgatttggtttttaatttggtcaggagggaggtcctagaggtagcaagcagatcgtggtggtacctatggatgagcgctatagcaagatcaaaagttcttgtggatggatgttattttgttttgtatttctcgaaaagagaaatttgcaagtgaacttaaaattgtgaagccacatgttctcatatgtggttgtactagctagtatctctgaggtttaacaagtcaaacttagggttgttgtctgcttattttgatctttattacgacaagagcaaacttgtgacctttatgtatgaatgcagtacaattgttattgccatgaatgaaaatatgagctatgtttgaccaaatc

SEQ ID NO: 2810 - DNA, 743 bp, Zea Mays
acttttcagccacagtcgccgcgcacccacgctcgtacactcagctgccgctgcgccaaggagaagctgtgcgcggtccaggcacaggtgcagggtgaacaggaggcggcgacaacactccagaggagggtggatgagctagagagcggcggataggagagggccggtgtgttggcggtggagggcgtggagctgcgcagggcaaacactgtgctagaggagaacaacagggagcttgccttgaggctgcaggacgcgatcgagcaggctactgcatctgcctccgctaatctagctcctaaggttcgacatgccccgtgcctaccatcactctcgatttgaagaagagtctcaagattttgcaggcacttcaagcgggcaggaaagtctaaggcccttactaattacttccaagagggaggtcctagaggtagcaagcagatcgtggtggtacctatggatgagcgctatagcaagatcaaaagttcttgtggatggatgttattttgttttgtatttctcgaaaagagaaatttgcaagtgaacttaaaattgtgaagccacatgttctcatatgtggttgtactagctagtatctctgaggtttaacaagtcaaacttagggttgttgtctgcttattttgatctttattacgacaagagcaaacttgtgacctttatgtatgaatgcagtacaattgttattgccatgaatgaaaatatgagctatgtttgaccaaatc

SEQ ID NO: 2811 - DNA, 386 bp, Zea Mays
gccaaaaggcacttcaagcgggcaggaaagtctaaggcccttactaattacttccaagagggaggtcctagaggtagcaagcagatcgtggtggtacctatggatgagcgctatagcaagatcaaaagttcttgtggatggatgttattttgttttgtatttctcgaaaagagaaatttgcaagtgaacttaaaattgtgaagccacatgttctcatatgtggttgtactagctagtatctctgaggtttaacaagtcaaacttagggttgttgtctgcttattttgatctttattacgacaagagcaaacttgtgacctttatgtatgaatgcagtacaattgttattgccatgaatgaaaatatgagctatgtttgaccaaatc

SEQ ID NO: 2812 - DNA, 653 bp, Zea Mays
agttaatccatcacccatattattgatacgaactagcaacatacatagtgaagtacactagcaacatcttagcaccaatggcagccaagatttttgccatccttgccctccttgctctttcagcaagcgttgctaccgcgactattattccacaatgctcacaacaatacctctctccggtgacagccgcgagatttgaatacccaactatacaatcctacaggctacaagaggccatcgcagcaagcatcttacggtcgttagcattgaccgtccaacaaccatatgccctattgcaacaaccatccttaatgaatctatatctccaaagaatcgcagcacaacaactacaacaacagttgcttccaataatcaatcaagtagttgcagcgaaccttgctgcttacctccagcaacaacaatttcttccattcaatcaactagctggggtgaaccctgctgcttacttgcaggcacaacagctactaccattcaaccaacttgtcaggagccctgctgccttcttgcaacagcaacaattgctgccattctacccacatgatgtggaaaacattgtcaccttcttacaacaacaacaatggttgccatttagccaacttgctttgacgaatcctaccaccttattgcagtag

SEQ ID NO: 2813 - DNA, 626 bp, Zea Mays
ccggcacttccctccggcgctgcctggtacacctgctatgacctcaaggggtttggttgagaaggacttcgtgcagattgccgagtaccttcaccgagctgtgaccatctgcttgagcatccaggcggagcatggcaagattctcaaggacttcaagaagggcttggtgcaaaacaaggacatagagaacctgagggcggaggtcgagaagttcgccacttcatttgacatgcctggcttcagggtgtctgacatgaagtacacagactagactgctgctgacttgggtgcaaaccgttgctcctgttacagtaacactggcaggctggtgcaatgcaaaccgttcttctgttacggtaatattaacgcctctgaaatgtcacgtgaatggtggtaaacctgaatttcacacgactagagggatggtttactttctattcagtgctctgccattctgttggcctgctattccgtcggtctattttgttggaactgataataatatgtttagagaataatgattgagaaagaaaatggcattgcactggagataattctgcttagctcggccttccagaagctctatgataaaccccccttgatttgttagttggcttgatatgaca

SEQ ID NO: 2814 - DNA, 3204 bp, Zea Mays
cacaggctcacagtcacaacccgcctgccacgtgcttaactgacatctgggacccaccgtacccaccacaacaattttccatcccaaccgcgatctcgttcttgtctttctcactcaccgtgcgcggcggcagctttgcttcttccaccactgaccagcgggtcccgcctcgccggtggagttttcagggagcttcttctgcccgccggcgcgatgatcctgtcggcgctcacgacgtcggtggggatcaacctggccctcaccgtgctcctcgccgcggcctactcgttgctccgtcgcaggccaccgtacgtcgaggtgtactccccgcgccggccctacgcgccgctcgagccgtggctcgctgcggcgtggcgccgtgccgaggaggacatccacgccgccgcggggctcgatggcgtcgtcttcatccgcatcttcgtattcagcatcagggtgttcgcggcggccgcggtgctcggggtcggcgtgctcctgccggtgaacttcctcggtgaccagctgcgggagatcgacttcaccgacctgcctaacaaatccatcgatctattcagcatctccaacgtccaggacggttccagcaagagtacaaatatatctctggcaagaggctagagtattttatgatctcaaagccattacctcagcacttcacagttcttgttcgagctattccagtatctgatggtgtttcagtgggtgatgctgttgataagttttttaaagagtatcatgcatccacgtacttatcacacacaattgttcgtcaaactggcaaacttcgccgtcttctgaacgatgctgagagtatttgtacaaagcttaccaacttaaaccatgtccgacggtcaactggagatcctccaagaaaacttggattatttagcagaaatgatcttgttggagaataccagaaaaggctggaagaccttgaagagaatgttagaatggaacagtcagatgctactaggagacaggaaattcctgctgcctttgtttcattcagatctcgatatagcgctgcaaatgcagtttacattagacagtcagacaacccaactgagtggcaaactgaggaagctcctgatcctcatgacgtttattggcctttcttttctacatccttcatggaaagatggattgccaagtttgtagtatttgtagcttcagttctcctgatacttgtctttctcctagttgtggcatttgttcaaggactcacctatctggaacaactagagaagtggttgccttttctgaggaacatactggaaattgctgttgtgagtcaactggttacaggatatcttcccagtgttattcttcacgttctttcatcttgtgtgccctcaataatgaagttattttcaactatgcaaggatttgtttctgttagtgggattgagcaaagtgcttgcaataagatgcttcggtttacaatatggactgcgttctttgccaatgttctcactggttcagccttagttcaattcgagattttccttaatccaaaggagctaccttcaaaacttgcagttcttgtaccagcgcaggcctctttctttattgcatatgtggtcacatcgtggacaagcataacatctgaactcactcaaattactgctcttttctgtcatctgtggggaaagtgtgcgaagtgttgcaagcgggattactccaaagctccatcaatgccttattatagtgaaattccacggattctcttgtttgggcttattggactcgcatattttattgtagccccccttatcctaccatttgtattggtctacttctgccttggctacttcatattccgtaatcagctttttaatgtatatgcgccaaagtatgatactggagggaaattttggcccgttgtgcacaacacaacgatattctctctggttgttctgcatataattgctattggagtatttgggataaagaagcttccccttgcgtccagtttgctacttcccctaccaccgctgacccttctgttcaacgaattctgccggaacagatttctgcctatctttgaagcatactctaccgagtcattgctaaagaaagatagagaagaacagagcaaaccagatatggcggagttcttcagtaatcttgtaacagcttactgtgacccagctctgaaacctttccaacgggcttctaactccgacgaacgcaccgcgccgctcttggcctctctgtctagctccagataagctgtggatggcagctgactccgctgtgtgaatttcgatttgattttggtgtttagatacggctagtagcataggtataattttatgctacattgtaagagtagaacttttgacagacatatagtttcttattgttgttgtctgttgtgcaattttttgcccttctggtgtgggggggagttcgttgtacatatgtgaatgtacatgatattttgtgcacttctcagagatgaattgctcgttttatgatgtgttggcaacgcaaacttatgcatcgttcgttcatgggttgtacggtaaactgcttgtaccttcagaattttcatcaacttcatttttaattcgagtaaactgctatgcatgtgaacatgtgaaccttttgcttcggttttcacattatgcatcctatgggcttgtttgccatttggagcatctgtgatgacgagcaactgctttactctatttatttgttttctttgtgctctacttgacatttttttgggaggccactatcatatagctgtcgctgtcaaagggttttgttttctgaaatctcaaatggtgtgagaaaatcatcacgtggaagcctgtcagcctgtggcgttgctacctggtttatatacgctgagaccattagacgcgctagttacactgactctactctgaaagtgtctcccgccgctggttgtttacctggttttaaatgtgatccaaaaagattcgcttgcacagctcgatcctctgagaacgacagcaggtgatacattaaaaattactacctccgttttcaaatattacctccgttttcaaatatttgtcgtcagatagttcatttttaactaaataacgacagataaaaaagaacggagagaataaataaaaaagaacggaggaagtatatcactgtactgattttacagcaggtaatccatcaacttttgaaaaaaaaaacaca

SEQ ID NO: 2815 - DNA, 3104 bp, Zea Mays
caattttccatcccaaccgcgatctcgttcttgtctttctcactcaccgtgcgcggcggcagctttgcttcttccaccactgaccagcgggtcccgcctcgccggtggagttttcagggagcttcttctgcccgccggcgcgatgatcctgtcggcgctcacgacgtcggtggggatcaacctggccctcaccgtgctcctcgccgcggcctactcgttgctccgtcgcaggccaccgtacgtcgaggtgtactccccgcgccggccctacgcgccgctcgagccgtggctcgctgcggcgtggcgccgtgccgaggaggacatccacgccgccgcggggctcgatggcgtcgtcttcatccgcatcttcgtattcagcatcagggtgttcgcggcggccgcggtgctcggggtcggcgtgctcctgccggtgaacttcctcggtgaccagctgcgggagatcgacttcaccgacctgcctaacaaatccatcgatctattcagcatctccaacgtccaggacggttccagcaagagtacaaatatatctctggcaagaggctagagtattttatgatctcaaagccattacctcagcacttcacagttcttgttcgagctattccagtatctgatggtgtttcagtgggtgatgctgttgataagttttttaaagagtatcatgcatccacgtacttatcacacacaattgttcgtcaaactggcaaacttcgccgtcttctgaacgatgctgagagtatttgtacaaagcttaccaacttaaaccatgtccgacggtcaactggagatcctccaagaaaacttggattatttagcagaaatgatcttgttggagaataccagaaaaggctggaagaccttgaagagaatgttagaatggaacagtcagatgctactaggagacagatctcgatatagcgctgcaaatgcagtttacattagacagtcagacaacccaactgagtggcaaactgaggaagctcctgatcctcatgacgtttattggcctttcttttctacatccttcatggaaagatggattgccaagtttgtagtatttgtagcttcagttctcctgatacttgtctttctcctagttgtggcatttgttcaaggactcacctatctggaacaactagagaagtggttgccttttctgaggaacatactggaaattgctgttgtgagtcaactggttacaggatatcttcccagtgttattcttcacgttctttcatcttgtgtgccctcaataatgaagttattttcaactatgcaaggatttgtttctgttagtgggattgagcaaagtgcttgcaataagatgcttcggtttacaatatggactgcgttctttgccaatgttctcactggttcagccttagttcaattcgagattttccttaatccaaaggagctaccttcaaaacttgcagttcttgtaccagcgcaggcctctttctttattgcatatgtggtcacatcgtggacaagcataacatctgaactcactcaaattactgctcttttctgtcatctgtggggaaagtgtgcgaagtgttgcaagcgggattactccaaagctccatcaatgccttattatagtgaaattccacggattctcttgtttgggcttattggactcgcatattttattgtagccccccttatcctaccatttgtattggtctacttctgccttggctacttcatattccgtaatcagctttttaatgtatatgcgccaaagtatgatactggagggaaattttggcccgttgtgcacaacacaacgatattctctctggttgttctgcatataattgctattggagtatttgggataaagaagcttccccttgcgtccagtttgctacttcccctaccaccgctgacccttctgttcaacgaattctgccggaacagatttctgcctatctttgaagcatactctaccgagtcattgctaaagaaagatagagaagaacagagcaaaccagatatggcggagttcttcagtaatcttgtaacagcttactgtgacccagctctgaaacctttccaacgggcttctaactccgacgaacgcaccgcgccgctcttggcctctctgtctagctccagataagctgtggatggcagctgactccgctgtgtgaatttcgatttgattttggtgtttagatacggctagtagcataggtataattttatgctacattgtaagagtagaacttttgacagacatatagtttcttattgttgttgtctgttgtgcaattttttgcccttctggtgtgggggggagttcgttgtacatatgtgaatgtacatgatattttgtgcacttctcagagatgaattgctcgttttatgatgtgttggcaacgcaaacttatgcatcgttcgttcatgggttgtacggtaaactgcttgtaccttcagaattttcatcaacttcatttttaattcgagtaaactgctatgcatgtgaacatgtgaaccttttgcttcggttttcacattatgcatcctatgggcttgtttgccatttggagcatctgtgatgacgagcaactgctttactctatttatttgttttctttgtgctctacttgacatttttttgggaggccactatcatatagctgtcgctgtcaaagggttttgttttctgaaatctcaaatggtgtgagaaaatcatcacgtggaagcctgtcagcctgtggcgttgctacctggtttatatacgctgagaccattagacgcgctagttacactgactctactctgaaagtgtctcccgccgctggttgtttacctggttttaaatgtgatccaaaaagattcgcttgcacagctcgatcctctgagaacgacagcaggtgatacattaaaaattactacctccgttttcaaatattacctccgttttcaaatatttgtcgtcagatagttcatttttaactaaataacgacagataaaaaagaacggagagaataaataaaaaagaacggaggaagtatatcactgtactgattttacagcaggtaatccatcaacttttgaaaaaaaaaacaca

SEQ ID NO: 2816 - DNA, 3172 bp, Zea Mays
atctcgttcttgtctttctcactcaccgtgcgcggcggcagctttgcttcttccaccactgaccagcgggtcccgcctcgccggtggagttttcagggagcttcttctgcccgccggcgcgatgatcctgtcggcgctcacgacgtcggtggggatcaacctggccctcaccgtgctcctcgccgcggcctactcgttgctccgtcgcaggccaccgtacgtcgaggtgtactccccgcgccggccctacgcgccgctcgagccgtggctcgctgcggcgtggcgccgtgccgaggaggacatccacgccgccgcggggctcgatggcgtcgtcttcatccgcatcttcgtattcagcatcagggtgttcgcggcggccgcggtgctcggggtcggcgtgctcctgccggtgaacttcctcggtgaccagctgcgggagatcgacttcaccgacctgcctaacaaatccatcgatctattcagcatctccaacgtccaggacggttccaattgtggcttcacttttcagctgtgtatatcataactggaattacatgctacctactgtatcatgagtacaaatatatctctggcaagaggctagagtattttatgatctcaaagccattacctcagcacttcacagttcttgttcgagctattccagtatctgatggtgtttcagtgggtgatgctgttgataagttttttaaagagtatcatgcatccacgtacttatcacacacaattgttcgtcaaactggcaaacttcgccgtcttctgaacgatgctgagagtatttgtacaaagcttaccaacttaaaccatgtccgacggtcaactggagatcctccaagaaaacttggattatttagcagaaatgatcttgttggagaataccagaaaaggctggaagaccttgaagagaatgttagaatggaacagtcagatgctactaggagacaggaaattcctgctgcctttgtttcattcagatctcgatatagcgctgcaaatgcagtttacattagacagtcagacaacccaactgagtggcaaactgaggaagctcctgatcctcatgacgtttattggcctttcttttctacatccttcatggaaagatggattgccaagtttgtagtatttgtagcttcagttctcctgatacttgtctttctcctagttgtggcatttgttcaaggactcacctatctggaacaactagagaagtggttgccttttctgaggaacatactggaaattgctgttgtgagtcaactggttacaggatatcttcccagtgttattcttcacgttctttcatcttgtgtgccctcaataatgaagttattttcaactatgcaaggatttgtttctgttagtgggattgagcaaagtgcttgcaataagatgcttcggtttacaatatggactgcgttctttgccaatgttctcactggttcagccttagttcaattcgagattttccttaatccaaaggagctaccttcaaaacttgcagttcttgtaccagcgcaggcctctttctttattgcatatgtggtcacatcgtggacaagcataacatctgaactcactcaaattactgctcttttctgtcatctgtggggaaagtgtgcgaagtgttgcaagcgggattactccaaagctccatcaatgccttattatagtgaaattccacggattctcttgtttgggcttattggactcgcatattttattgtagccccccttatcctaccatttgtattggtctacttctgccttggctacttcatattccgtaatcagctttttaatgtatatgcgccaaagtatgatactggagggaaattttggcccgttgtgcacaacacaacgatattctctctggttgttctgcatataattgctattggagtatttgggataaagaagcttccccttgcgtccagtttgctacttcccctaccaccgctgacccttctgttcaacgaattctgccggaacagatttctgcctatctttgaagcatactctaccgagtcattgctaaagaaagatagagaagaacagagcaaaccagatatggcggagttcttcagtaatcttgtaacagcttactgtgacccagctctgaaacctttccaacgggcttctaactccgacgaacgcaccgcgccgctcttggcctctctgtctagctccagataagctgtggatggcagctgactccgctgtgtgaatttcgatttgattttggtgtttagatacggctagtagcataggtataattttatgctacattgtaagagtagaacttttgacagacatatagtttcttattgttgttgtctgttgtgcaattttttgcccttctggtgtgggggggagttcgttgtacatatgtgaatgtacatgatattttgtgcacttctcagagatgaattgctcgttttatgatgtgttggcaacgcaaacttatgcatcgttcgttcatgggttgtacggtaaactgcttgtaccttcagaattttcatcaacttcatttttaattcgagtaaactgctatgcatgtgaacatgtgaaccttttgcttcggttttcacattatgcatcctatgggcttgtttgccatttggagcatctgtgatgacgagcaactgctttactctatttatttgttttctttgtgctctacttgacatttttttgggaggccactatcatatagctgtcgctgtcaaagggttttgttttctgaaatctcaaatggtgtgagaaaatcatcacgtggaagcctgtcagcctgtggcgttgctacctggtttatatacgctgagaccattagacgcgctagttacactgactctactctgaaagtgtctcccgccgctggttgtttacctggttttaaatgtgatccaaaaagattcgcttgcacagctcgatcctctgagaacgacagcaggtgatacattaaaaattactacctccgttttcaaatattacctccgttttcaaatatttgtcgtcagatagttcatttttaactaaataacgacagataaaaaagaacggagagaataaataaaaaagaacggaggaagtatatcactgtactgattttacagcaggtaatccatcaacttttgaaaaaaaaaacaca

SEQ ID NO: 2817 - DNA, 3835 bp, Zea Mays
ctcgttcttgtctttctcactcaccgtgcgcggcggcagctttgcttcttccaccactgaccagcgggtcccgcctcgccggtggagttttcagggagcttcttctgcccgccggcgcgatgatcctgtcggcgctcacgacgtcggtggggatcaacctggccctcaccgtgctcctcgccgcggcctactcgttgctccgtcgcaggccaccgtacgtcgaggtgtactccccgcgccggccctacgcgccgctcgagccgtggctcgctgcggcgtggcgccgtgccgaggaggacatccacgccgccgcggggctcgatggcgtcgtcttcatccgcatcttcgtattcagcatcagggtgttcgcggcggccgcggtgctcggggtcggcgtgctcctgccggtgaacttcctcggtgaccagctgcgggagatcgacttcaccgacctgcctaacaaatccatcgatctattcagcatctccaacgtccaggacggttccagcaaattgtggcttcacttttcagctgtgtatatcataactggaattacatgctacctactgtatcatgagtacaaatatatctctggcaagaggctagagtattttatgatctcaaagccattacctcagcacttcacagttcttgttcgagctattccagtatctgatggtgtttcagtgggtgatgctgttgataagttttttaaagagtatcatgcatccacgtacttatcacacacaattgttcgtcaaactggcaaacttcgccgtcttctgaacgatgctgagagtatttgtacaaagcttaccaacttaaaccatgtccgacggtcaactggagatcctccaagaaaacttggattatttagcagaaatgatcttgttggagaataccagaaaaggctggaagaccttgaagagaatgttagaatggaacagtcagatgctactaggagacaggaaattcctgctgcctttgtttcattcagatctcgatatagcgctgcaaatgcagtttacattagacagtcagacaacccaactgagtggcaaactgaggaagctcctgatcctcatgacgtttattggcctttcttttctacatccttcatggaaagatggattgccaagtttgtagtatttgtagcttcagttctcctgatacttgtctttctcctagttgtggcatttgttcaaggactcacctatctggaacaactagagaagtggttgccttttctgaggaacatactggaaattgctgttgtgagtcaactggttacaggatatcttcccagtgttattcttcacgttctttcatcttgtgtgccctcaataatgaagttattttcaactatgcaaggatttgtttctgttagtgggattgagcaaagtgcttgcaataagatgcttcggtttacaatatggactgcgttctttgccaatgttctcactggttcagccttagttcaattcgagattttccttaatccaaaggagctaccttcaaaacttgcagttcttgtaccagcgcaggcctctttctttattgcatatgtggtcacatcgtggacaagcataacatctgaactcactcaaattactgctcttttctgtcatctgtggggaaagtgtgcgaagtgttgcaagcgggattactccaaagctccatcaatgccttattatagtgaaattccacggattctcttgtttgggcttattggactcgcatattttattgtagccccccttatcctaccatttgtattggtctacttctgccttggctacttcatattccgtaatcaggtgagaacattgcagttattttcagttcttaaaaagtcttcataaatcctcaacatattgtcacgcaacctgcatggattttgagaggttagtgatattgatatctaattgtgttcatgttttggaaggcagatagatctcaaagaaaaaagatatgtcttcatacttttgaaaaaaagaactggaaattgctttattccgcctaagaatttactggatttgattcttctgagttaatatgttaagtgaactaattataaaacaaaatacttgcaaaatcctgacaatatgggcgtaatacataaaattactaacttctccattaatgatgttcatatggaatactaaatttgttgaactaaagtggggtgatagagttagaaacccttggtcaccggttcaggcccttattaacaactcctaaatactacacatgttttctaggtttctaggagtggaatattctcttaccagacaaatacagtattcttcaatctaaaatttgaaatgctctttccaacattgtagttgatcaagcagtgccagcagaagaacagtatatttgttttagaaacggtctagctttgtttttccagctattttgaccagatttttgcaccctgcacatatttgactgtaacttcaaacggtacaaatgcagctttttaatgtatatgcgccaaagtatgatactggagggaaattttggcccgttgtgcacaacacaacgatattctctctggttgttctgcatataattgctattggagtatttgggataaagaagcttccccttgcgtccagtttgctacttcccctaccaccgctgacccttctgttcaacgaattctgccggaacagatttctgcctatctttgaagcatactctaccgagtcattgctaaagaaagatagagaagaacagagcaaaccagatatggcggagttcttcagtaatcttgtaacagcttactgtgacccagctctgaaacctttccaacgggcttctaactccgacgaacgcaccgcgccgctcttggcctctctgtctagctccagataagctgtggatggcagctgactccgctgtgtgaatttcgatttgattttggtgtttagatacggctagtagcataggtataattttatgctacattgtaagagtagaacttttgacagacatatagtttcttattgttgttgtctgttgtgcaattttttgcccttctggtgtgggggggagttcgttgtacatatgtgaatgtacatgatattttgtgcacttctcagagatgaattgctcgttttatgatgtgttggcaacgcaaacttatgcatcgttcgttcatgggttgtacggtaaactgcttgtaccttcagaattttcatcaacttcatttttaattcgagtaaactgctatgcatgtgaacatgtgaaccttttgcttcggttttcacattatgcatcctatgggcttgtttgccatttggagcatctgtgatgacgagcaactgctttactctatttatttgttttctttgtgctctacttgacatttttttgggaggccactatcatatagctgtcgctgtcaaagggttttgttttctgaaatctcaaatggtgtgagaaaatcatcacgtggaagcctgtcagcctgtggcgttgctacctggtttatatacgctgagaccattagacgcgctagttacactgactctactctgaaagtgtctcccgccgctggttgtttacctggttttaaatgtgatccaaaaagattcgcttgcacagctcgatcctctgagaacgacagcaggtgatacattaaaaattactacctccgttttcaaatattacctccgttttcaaatatttgtcgtcagatagttcatttttaactaaataacgacagataaaaaagaacggagagaataaataaaaaagaacggaggaagtatatcactgtactgattttacagcaggtaatccatcaacttttgaaaaaaaaaacaca

SEQ ID NO: 2818 - DNA, 3145 bp, Zea Mays
ggcagctttgcttcttccaccactgaccagcgggtcccgcctcgccggtggagttttcagggagcttcttctgcccgccggcgcgatgatcctgtcggcgctcacgacgtcggtggggatcaacctggccctcaccgtgctcctcgccgcggcctactcgttgctccgtcgcaggccaccgtacgtcgaggtgtactccccgcgccggccctacgcgccgctcgagccgtggctcgctgcggcgtggcgccgtgccgaggaggacatccacgccgccgcggggctcgatggcgtcgtcttcatccgcatcttcgtattcagcatcagggtgttcgcggcggccgcggtgctcggggtcggcgtgctcctgccggtgaacttcctcggtgaccagctgcgggagatcgacttcaccgacctgcctaacaaatccatcgatctattcagcatctccaacgtccaggacggttccagcaaattgtggcttcacttttcagctgtgtatatcataactggaattacatgctacctactgtatcatgagtacaaatatatctctggcaagaggctagagtattttatgatctcaaagccattacctcagcacttcacagttcttgttcgagctattccagtatctgatggtgtttcagtgggtgatgctgttgataagttttttaaagagtatcatgcatccacgtacttatcacacacaattgttcgtcaaactggcaaacttcgccgtcttctggtaagaacgatgctgagagtatttgtacaaagcttaccaacttaaaccatgtccgacggtcaactggagatcctccaagaaaacttggattatttagcagaaatgatcttgttggagaataccagaaaaggctggaagaccttgaagagaatgttagaatggaacagtcagatgctactaggagacaggaaattcctgctgcctttgtttcattcagatctcgatatagcgctgcaaatgcagtttacattagacagtcagacaacccaactgagtggcaaactgaggaagctcctgatcctcatgacgtttattggcctttcttttctacatccttcatggaaagatggattgccaagtttgtagtatttgtagcttcagttctcctgatacttgtctttctcctagttgtggcatttgttcaaggactcacctatctggaacaactagagaagtggttgccttttctgaggaacatactggaaattgctgttgtgagtcaactggttacaggatatcttcccagtgttattcttcacgttctttcatcttgtgtgccctcaataatgaagttattttcaactatgcaaggatttgtttctgttagtgggattgagcaaagtgcttgcaataagatgcttcggtttacaatatggactgcgttctttgccaatgttctcactggttcagccttagttcaattcgagattttccttaatccaaaggagctaccttcaaaacttgcagttcttgtaccagcgcaggcctctttctttattgcatatgtggtcacatcgtggacaagcataacatctgaactcactcaaattactgctcttttctgtcatctgtggggaaagtgtgcgaagtgttgcaagcgggattactccaaagctccatcaatgccttattatagtgaaattccacggattctcttgtttgggcttattggactcgcatattttattgtagccccccttatcctaccatttgtattggtctacttctgccttggctacttcatattccgtaatcagctttttaatgtatatgcgccaaagtatgatactggagggaaattttggcccgttgtgcacaacacaacgatattctctctggttgttctgcatataattgctattggagtatttgggataaagaagcttccccttgcgtccagtttgctacttcccctaccaccgctgacccttctgttcaacgaattctgccggaacagatttctgcctatctttgaagcatactctaccgagtcattgctaaagaaagatagagaagaacagagcaaaccagatatggcggagttcttcagtaatcttgtaacagcttactgtgacccagctctgaaacctttccaacgggcttctaactccgacgaacgcaccgcgccgctcttggcctctctgtctagctccagataagctgtggatggcagctgactccgctgtgtgaatttcgatttgattttggtgtttagatacggctagtagcataggtataattttatgctacattgtaagagtagaacttttgacagacatatagtttcttattgttgttgtctgttgtgcaattttttgcccttctggtgtgggggggagttcgttgtacatatgtgaatgtacatgatattttgtgcacttctcagagatgaattgctcgttttatgatgtgttggcaacgcaaacttatgcatcgttcgttcatgggttgtacggtaaactgcttgtaccttcagaattttcatcaacttcatttttaattcgagtaaactgctatgcatgtgaacatgtgaaccttttgcttcggttttcacattatgcatcctatgggcttgtttgccatttggagcatctgtgatgacgagcaactgctttactctatttatttgttttctttgtgctctacttgacatttttttgggaggccactatcatatagctgtcgctgtcaaagggttttgttttctgaaatctcaaatggtgtgagaaaatcatcacgtggaagcctgtcagcctgtggcgttgctacctggtttatatacgctgagaccattagacgcgctagttacactgactctactctgaaagtgtctcccgccgctggttgtttacctggttttaaatgtgatccaaaaagattcgcttgcacagctcgatcctctgagaacgacagcaggtgatacattaaaaattactacctccgttttcaaatattacctccgttttcaaatatttgtcgtcagatagttcatttttaactaaataacgacagataaaaaagaacggagagaataaataaaaaagaacggaggaagtatatcactgtactgattttacagcaggtaatccatcaacttttgaaaaaaaaaacaca

SEQ ID NO: 2819 - DNA, 2979 bp, Zea Mays
ctttgcttcttccaccactgaccagcgggtcccgcctcgccggtggagttttcagggagcttcttctgcccgccggcgcgatgatcctgtcggcgctcacgacgtcggtggggatcaacctggccctcaccgtgctcctcgccgcggcctactcgttgctccgtcgcaggccaccgtacgtcgaggtgtactccccgcgccggccctacgcgccgctcgagccgtggctcgctgcggcgtggcgccgtgccgaggaggacatccacgccgccgcggggctcgatggcgtcgtcttcatccgcatcttcgtattcagattgtggcttcacttttcagctgtgtatatcataactggaattacatgctacctactgtatcatgagtacaaatatatctctggcaagaggctagagtattttatgatctcaaagccattacctcagcacttcacagttcttgttcgagctattccagtatctgatggtgtttcagtgggtgatgctgttgataagttttttaaagagtatcatgcatccacgtacttatcacacacaattgttcgtcaaactggcaaacttcgccgtcttctgaacgatgctgagagtatttgtacaaagcttaccaacttaaaccatgtccgacggtcaactggagatcctccaagaaaacttggattatttagcagaaatgatcttgttggagaataccagaaaaggctggaagaccttgaagagaatgttagaatggaacagtcagatgctactaggagacaggaaattcctgctgcctttgtttcattcagatctcgatatagcgctgcaaatgcagtttacattagacagtcagacaacccaactgagtggcaaactgaggaagctcctgatcctcatgacgtttattggcctttcttttctacatccttcatggaaagatggattgccaagtttgtagtatttgtagcttcagttctcctgatacttgtctttctcctagttgtggcatttgttcaaggactcacctatctggaacaactagagaagtggttgccttttctgaggaacatactggaaattgctgttgtgagtcaactggttacaggatatcttcccagtgttattcttcacgttctttcatcttgtgtgccctcaataatgaagttattttcaactatgcaaggatttgtttctgttagtgggattgagcaaagtgcttgcaataagatgcttcggtttacaatatggactgcgttctttgccaatgttctcactggttcagccttagttcaattcgagattttccttaatccaaaggagctaccttcaaaacttgcagttcttgtaccagcgcaggcctctttctttattgcatatgtggtcacatcgtggacaagcataacatctgaactcactcaaattactgctcttttctgtcatctgtggggaaagtgtgcgaagtgttgcaagcgggattactccaaagctccatcaatgccttattatagtgaaattccacggattctcttgtttgggcttattggactcgcatattttattgtagccccccttatcctaccatttgtattggtctacttctgccttggctacttcatattccgtaatcagctttttaatgtatatgcgccaaagtatgatactggagggaaattttggcccgttgtgcacaacacaacgatattctctctggttgttctgcatataattgctattggagtatttgggataaagaagcttccccttgcgtccagtttgctacttcccctaccaccgctgacccttctgttcaacgaattctgccggaacagatttctgcctatctttgaagcatactctaccgagtcattgctaaagaaagatagagaagaacagagcaaaccagatatggcggagttcttcagtaatcttgtaacagcttactgtgacccagctctgaaacctttccaacgggcttctaactccgacgaacgcaccgcgccgctcttggcctctctgtctagctccagataagctgtggatggcagctgactccgctgtgtgaatttcgatttgattttggtgtttagatacggctagtagcataggtataattttatgctacattgtaagagtagaacttttgacagacatatagtttcttattgttgttgtctgttgtgcaattttttgcccttctggtgtgggggggagttcgttgtacatatgtgaatgtacatgatattttgtgcacttctcagagatgaattgctcgttttatgatgtgttggcaacgcaaacttatgcatcgttcgttcatgggttgtacggtaaactgcttgtaccttcagaattttcatcaacttcatttttaattcgagtaaactgctatgcatgtgaacatgtgaaccttttgcttcggttttcacattatgcatcctatgggcttgtttgccatttggagcatctgtgatgacgagcaactgctttactctatttatttgttttctttgtgctctacttgacatttttttgggaggccactatcatatagctgtcgctgtcaaagggttttgttttctgaaatctcaaatggtgtgagaaaatcatcacgtggaagcctgtcagcctgtggcgttgctacctggtttatatacgctgagaccattagacgcgctagttacactgactctactctgaaagtgtctcccgccgctggttgtttacctggttttaaatgtgatccaaaaagattcgcttgcacagctcgatcctctgagaacgacagcaggtgatacattaaaaattactacctccgttttcaaatattacctccgttttcaaatatttgtcgtcagatagttcatttttaactaaataacgacagataaaaaagaacggagagaataaataaaaaagaacggaggaagtatatcactgtactgattttacagcaggtaatccatcaacttttgaaaaaaaaaacaca

SEQ ID NO: 2820 - DNA, 2915 bp, Zea Mays
ctttgcttcttccaccactgaccagcgggtcccgcctcgccggtggagttttcagggagcttcttctgcccgccggcgcgatgatcctgtcggcgctcacgacgtcggtggggatcaacctggccctcaccgtgctcctcgccgcggcctactcgttgctccgtcgcaggccaccgtacgtcgaggtgtactccccgcgccggccctacgcgccgctcgagccgtggctcgctgcggcgtggcgccgtgccgaggaggacatccacgccgccgcggggctcgatggcgtcgtcttcatccgcatcttcgtattcagcatcagggtgttcgcggcggccgcggtgctcggggtcggcgtgctcctgccggtgaacttcctcggtgaccagctgcgggagatcgacttcaccgacctgcctaacaaatccatcgatctattcagcatctccaacgtccaggacggttccagcaaattgtggcttcacttttcagctgtgtatatcataactggaattacatgctacctactgtatcatgagtacaaatatatctctggcaagaggctagagtattttatgatctcaaagccattacctcagcacttcacagttcttgttcgagctattccagtatctgatggtgtttcagtgggtgatgctgttgataagttttttaaagagtatcatgcatccacgtacttatcacacacaattgttcgtcaaactggcaaacttcgccgtcttctgaacgatgctgagagtatttgtacaaagcttaccaacttaaaccatgtccgacggtcaactggagatcctccaagaaaacttggattatttagcagaaatgatcttgttggagaataccagaaaaggctggaagaccttgaagagaatgttagaatggaacagtcagatgctactaggagacagttgtggcatttgttcaaggactcacctatctggaacaactagagaagtggttgccttttctgaggaacatactggaaattgctgttgtgagtcaactggttacaggatatcttcccagtgttattcttcacgttctttcatcttgtgtgccctcaataatgaagttattttcaactatgcaaggatttgtttctgttagtgggattgagcaaagtgcttgcaataagatgcttcggtttacaatatggactgcgttctttgccaatgttctcactggttcagccttagttcaattcgagattttccttaatccaaaggagctaccttcaaaacttgcagttcttgtaccagcgcaggcctctttctttattgcatatgtggtcacatcgtggacaagcataacatctgaactcactcaaattactgctcttttctgtcatctgtggggaaagtgtgcgaagtgttgcaagcgggattactccaaagctccatcaatgccttattatagtgaaattccacggattctcttgtttgggcttattggactcgcatattttattgtagccccccttatcctaccatttgtattggtctacttctgccttggctacttcatattccgtaatcagctttttaatgtatatgcgccaaagtatgatactggagggaaattttggcccgttgtgcacaacacaacgatattctctctggttgttctgcatataattgctattggagtatttgggataaagaagcttccccttgcgtccagtttgctacttcccctaccaccgctgacccttctgttcaacgaattctgccggaacagatttctgcctatctttgaagcatactctaccgagtcattgctaaagaaagatagagaagaacagagcaaaccagatatggcggagttcttcagtaatcttgtaacagcttactgtgacccagctctgaaacctttccaacgggcttctaactccgacgaacgcaccgcgccgctcttggcctctctgtctagctccagataagctgtggatggcagctgactccgctgtgtgaatttcgatttgattttggtgtttagatacggctagtagcataggtataattttatgctacattgtaagagtagaacttttgacagacatatagtttcttattgttgttgtctgttgtgcaattttttgcccttctggtgtgggggggagttcgttgtacatatgtgaatgtacatgatattttgtgcacttctcagagatgaattgctcgttttatgatgtgttggcaacgcaaacttatgcatcgttcgttcatgggttgtacggtaaactgcttgtaccttcagaattttcatcaacttcatttttaattcgagtaaactgctatgcatgtgaacatgtgaaccttttgcttcggttttcacattatgcatcctatgggcttgtttgccatttggagcatctgtgatgacgagcaactgctttactctatttatttgttttctttgtgctctacttgacatttttttgggaggccactatcatatagctgtcgctgtcaaagggttttgttttctgaaatctcaaatggtgtgagaaaatcatcacgtggaagcctgtcagcctgtggcgttgctacctggtttatatacgctgagaccattagacgcgctagttacactgactctactctgaaagtgtctcccgccgctggttgtttacctggttttaaatgtgatccaaaaagattcgcttgcacagctcgatcctctgagaacgacagcaggtgatacattaaaaattactacctccgttttcaaatattacctccgttttcaaatatttgtcgtcagatagttcatttttaactaaataacgacagataaaaaagaacggagagaataaataaaaaagaacggaggaagtatatcactgtactgattttacagcaggtaatccatcaacttttgaaaaaaaaaacaca

SEQ ID NO: 2821 - DNA, 2908 bp, Zea Mays
ctcccttccccaaaacaagaactgtcaatgcatgcagtccatccagccctctctctctcatcagccgtcctgcccagcccagatccaccccatcaaccagcaggtccagtccagccatccaactccagcacagaacgagaacagcaccactgctgctgtactgcttgctgttcgcctcccagcagtggaacaccagcacttccccttcagcgtccagccgtcgaccgagcacacggccagagcggtgcctcgcttctgctttggacgcttgtgatccagtagagtaaccaggaaggaagcaaatcaacacggctgctaaaaagaaaccggcgattaaaccaggtgccgcaaggctacaaaatcccctgcttgtcctgttgcgccccgccgccgctgggttccgagggagggccagccgtagaaaggagataagaagcgagaagagagcacaggcagagggagtgagggaaaaggcgagagcgtagaaagtccggtcggagaagcggaagttcgcgttgctttgctgatccaatgggggagaccaacgagctaccgccgccacccgtggccgcgccgccgcccatgatgccgatgcagtccatgatggtcggcgcaggcgccatccacccgccccacgagcagttccaccatctcaactactgcgtccactcaaatccatcctggggtggcagcacttgcattccttcactatcttgtgatgttgggttctaccgtcatgcttgcaacagctattgttcctgcgatgggtggtaacgctggtgacaaggctcgagttattcaatcgttcctctttatgagtggcataaacacactgctgcaaacacttattggaacgagacttccaacagttatgaatgcctcttttgcatttgttgtcccagtgctgtcaatagcaaaagagattgaatcaaataacttcctgaatgatcatgagagatttaaacacacaatgagaacagcacaaggagctctgattgtggcatccatcctcaacatgattcttgggttcagcacgatatggggggcatatgccaaaaagttcagtccggtgataatgacccctgttgtttgtgttgttggtcttggactattccaacttggctttccccaggttgggaaatgtgtggagattgggcttccaatgctaattcttgcggtggttgtgcaacagtatgtgccaaattacttcagttatatccatcaacgggtcaccttcttgtttgagaggtattcgttgcttctttgtatcggcatcgtgtgggcctttgcagctatccttactgctgcgggtgcatatgaccatgcttcacctaagacacaacagcactgccgcactgataagtctttcctcatgtcatcggcaccatggattaaaattccattaccattcgaatggggtcctccaatcttcactgctggtcattcatttggaatgatgggtgctgtacttgttgcagccttcgagtcaactggagcacactttgctactgctcgtctagcgggtgctacaccacctccagcttatgtccttagtcggagcgttggcttgcaggttggatctgtaccatagtttcctcttggaagactagtgctactaacacattgttacatcgtttattgtcgtgcttccatctgatcgtggatccaggagatacttctctgttactaacctttgacaaactgagattctaaatttggtcctttgtaaatactctcatttttttctttgttgcttaccaaaatgctttgactggtgatatgttctattctagcgtagctccttacactagtgtgatgcgaccatttcttgtgcttacaaaatttcgagccttctaataagatgttttcatacagggtattggaatgttcttggaggggatctttagtgttccagcaggttcatctgtatcagttgaaaacattggcctccttgggctgacaaaagttggaagtaggagggtgatccagatatcaactgggtttatgatattcttctccatatttgggaaatttggggccttctttgcatcgatcccactgccgatctttgcagcaatttactgcatcttgttcggcattgtagctgctgtgggagtctcgttcatgcagtttgccaacaagaactcgatgaggaacatctatatcatcggactctcgttgttccttggcatctcggtccctcaatacttcaacggatacacttcttcagctggcggccacggacctgcccggacaaatgctggatggttcaacgacattataaacaccgtgtttgcttccgggccgacggtggcgctaattgtcgcttctgtcctggacaacacgctggagttcaggggctacgaggccgaccgggggctctcgtggttccagccgttcctgcgccgccataagggatactcggaccccagaaacgaggagttctacagcttcccaatcagcgtctatgacgtcatcccagaccgatttcggcgctgactccaaatgaccgctgttaccccgcagctgtgcatgtaaatccccgtgagtcttgttagtcttactcctgtgacttgtagcggctggttctagggggatatgggtaaaagaatgcttagggcaattgcttggtttgactcttttcgggataagaaacgggttacatgataatgtagagctctgtgccggatacattggttttgggaagggttacagaagaatactagcaccttacatgttgatgggcatttagttgaaggcattggctatttgtttttttgcccaatatatggctgttggagcttgatctgctgactgggaaaagggggcagtactttggatgtggttgtgttcatcttgcagtctcctggttctgattcgcggcatgtgttcatctattaatcttaaa

SEQ ID NO: 2822 - DNA, 3089 bp, Zea Mays
ctcccttccccaaaacaagaactgtcaatgcatgcagtccatccagccctctctctctcatcagccgtcctgcccagcccagatccaccccatcaaccagcaggtccagtccagccatccaactccagcacagaacgagaacagcaccactgctgctgtactgcttgctgttcgcctcccagcagtggaacaccagcacttccccttcagcgtccagccgtcgaccgagcacacggccagagcggtgcctcgcttctgctttggacgcttgtgatccagtagagtaaccaggaaggaagcaaatcaacacggctgctaaaaagaaaccggcgattaaaccaggtgccgcaaggctacaaaatcccctgcttgtcctgttgcgccccgccgccgctgggttccgagggagggccagccgtagaaaggagataagaagcgagaagagagcacaggcagagggagtgagggaaaaggcgagagcgtagaaaggtgagagcttttttcttttcttttttcatccgattgctcctcgcactcgcacagtcgcgcatcttttccgcccccacctcaatctctctggattctctcgaagtttcttccttttcgagaggtgggagagaagagacgcccgcagcggcacgagcttctgaattcctgtttttttgttcctggttttttgcttttgtttctgttcttgttcttgtgtgcgggtttggtttggtttccgtgcgccttttctctttattctagtgcgccgatgacgtgaggcgccgggttttcaatacttgcatccttttcgctgcatttgtttagcgggagttcttcgaacaagcagcgctgccgctgcttgcgcgaatctttggagtgaagctccccgtcacatcagtcctcttcttccccggtcgtcgtcctatgcttgtccctgtctcggcaattctgggatactaaagaggaatcggtgaagcagtccggtcggagaagcggaagttcgcgttgctttgctgatccaatgggggagaccaacgagctaccgccgccacccgtggccgcgccgccgcccatgatgccgatgcagtccatgatggtcggcgcaggcgccatccacccgccccacgagcagttccaccatctcaactactgcgtccactcaaatccatcctgggttcaggtggcagcacttgcattccttcactatcttgtgatgttgggttctaccgtcatgcttgcaacagctattgttcctgcgatgggtggtaacgctggtgacaaggctcgagttattcaatcgttcctctttatgagtggcataaacacactgctgcaaacacttattggaacgagacttccaacagttatgaatgcctcttttgcatttgttgtcccagtgctgtcaatagcaaaagagattgaatcaaataacttcctgaatgatcatgagagatttaaacacacaatgagaacagcacaaggagctctgattgtggcatccatcctcaacatgattcttgggttcagcacgatatggggggcatatgccaaaaagttcagtccggtgataatgacccctgttgtttgtgttgttggtcttggactattccaacttggctttccccaggttgggaaatgtgtggagattgggcttccaatgctaattcttgcggtggttgtgcaacagtatgtgccaaattacttcagttatatccatcaacgggtcaccttcttgtttgagaggtattcgttgcttctttgtatcggcatcgtgtgggcctttgcagctatccttactgctgcgggtgcatatgaccatgcttcacctaagacacaacagcactgccgcactgataagtctttcctcatgtcatcggcaccatggattaaaattccattaccattcgaatggggtcctccaatcttcactgctggtcattcatttggaatgatgggtgctgtacttgttgcagccttcgagtcaactggagcacactttgctactgctcgtctagcgggtgctacaccacctccagcttatgtccttagtcggagcgttggcttgcagggtattggaatgttcttggaggggatctttagtgttccagcaggttcatctgtatcagttgaaaacattggcctccttgggctgacaaaagttggaagtaggagggtgatccagatatcaactgggtttatgatattcttctccatatttgggaaatttggggccttctttgcatcgatcccactgccgatctttgcagcaatttactgcatcttgttcggcattgtagctgctgtgggagtctcgttcatgcagtttgccaacaagaactcgatgaggaacatctatatcatcggactctcgttgttccttggcatctcggtccctcaatacttcaacggatacacttcttcagctggcggccacggacctgcccggacaaatgctggatggttcaacgacattataaacaccgtgtttgcttccgggccgacggtggcgctaattgtcgcttctgtcctggacaacacgctggagttcaggggctacgaggccgaccgggggctctcgtggttccagccgttcctgcgccgccataagggatactcggaccccagaaacgaggagttctacagcttcccaatcagcgtctatgacgtcatcccagaccgatttcggcgctgactccaaatgaccgctgttaccccgcagctgtgcatgtaaatccccgtgagtcttgttagtcttactcctgtgacttgtagcggctggttctagggggatatgggtaaaagaatgcttagggcaattgcttggtttgactcttttcgggataagaaacgggttacatgataatgtagagctctgtgccggatacattggttttgggaagggttacagaagaatactagcaccttacatgttgatgggcatttagttgaaggcattggctatttgtttttttgcccaatatatggctgttggagcttgatctgctgactgggaaaagggggcagtactttggatgtggttgtgttcatcttgcagtctcctggttctgattcgcggcatgtgttcatctattaatcttaaa

SEQ ID NO: 2823 - DNA, 3086 bp, Zea Mays
ctcccttccccaaaacaagaactgtcaatgcatgcagtccatccagccctctctctctcatcagccgtcctgcccagcccagatccaccccatcaaccagcaggtccagtccagccatccaactccagcacagaacgagaacagcaccactgctgctgtactgcttgctgttcgcctcccagcagtggaacaccagcacttccccttcagcgtccagccgtcgaccgagcacacggccagagcggtgcctcgcttctgctttggacgcttgtgatccagtagagtaaccaggaaggaagcaaatcaacacggctgctaaaaagaaaccggcgattaaaccaggtgccgcaaggctacaaaatcccctgcttgtcctgttgcgccccgccgccgctgggttccgagggagggccagccgtagaaaggagataagaagcgagaagagagcacaggcagagggagtgagggaaaaggcgagagcgtagaaaggtgagagcttttttcttttcttttttcatccgattgctcctcgcactcgcacagtcgcgcatcttttccgcccccacctcaatctctctggattctctcgaagtttcttccttttcgagaggtgggagagaagagacgcccgcagcggcacgagcttctgaattcctgtttttttgttcctggttttttgcttttgtttctgttcttgttcttgtgtgcgggtttggtttggtttccgtgcgccttttctctttattctagtgcgccgatgacgtgaggcgccgggttttcaatacttgcatccttttcgctgcatttgtttagcgggagttcttcgaacaagcagcgctgccgctgcttgcgcgaatctttggagtgaagctccccgtcacatcagtcctcttcttccccggtcgtcgtcctatgcttgtccctgtctcggcaattctgggatactaaagaggaatcggtgaagtccggtcggagaagcggaagttcgcgttgctttgctgatccaatgggggagaccaacgagctaccgccgccacccgtggccgcgccgccgcccatgatgccgatgcagtccatgatggtcggcgcaggcgccatccacccgccccacgagcagttccaccatctcaactactgcgtccactcaaatccatcctgggttcaggtggcagcacttgcattccttcactatcttgtgatgttgggttctaccgtcatgcttgcaacagctattgttcctgcgatgggtggtaacgctggtgacaaggctcgagttattcaatcgttcctctttatgagtggcataaacacactgctgcaaacacttattggaacgagacttccaacagttatgaatgcctcttttgcatttgttgtcccagtgctgtcaatagcaaaagagattgaatcaaataacttcctgaatgatcatgagagatttaaacacacaatgagaacagcacaaggagctctgattgtggcatccatcctcaacatgattcttgggttcagcacgatatggggggcatatgccaaaaagttcagtccggtgataatgacccctgttgtttgtgttgttggtcttggactattccaacttggctttccccaggttgggaaatgtgtggagattgggcttccaatgctaattcttgcggtggttgtgcaacagtatgtgccaaattacttcagttatatccatcaacgggtcaccttcttgtttgagaggtattcgttgcttctttgtatcggcatcgtgtgggcctttgcagctatccttactgctgcgggtgcatatgaccatgcttcacctaagacacaacagcactgccgcactgataagtctttcctcatgtcatcggcaccatggattaaaattccattaccattcgaatggggtcctccaatcttcactgctggtcattcatttggaatgatgggtgctgtacttgttgcagccttcgagtcaactggagcacactttgctactgctcgtctagcgggtgctacaccacctccagcttatgtccttagtcggagcgttggcttgcagggtattggaatgttcttggaggggatctttagtgttccagcaggttcatctgtatcagttgaaaacattggcctccttgggctgacaaaagttggaagtaggagggtgatccagatatcaactgggtttatgatattcttctccatatttgggaaatttggggccttctttgcatcgatcccactgccgatctttgcagcaatttactgcatcttgttcggcattgtagctgctgtgggagtctcgttcatgcagtttgccaacaagaactcgatgaggaacatctatatcatcggactctcgttgttccttggcatctcggtccctcaatacttcaacggatacacttcttcagctggcggccacggacctgcccggacaaatgctggatggttcaacgacattataaacaccgtgtttgcttccgggccgacggtggcgctaattgtcgcttctgtcctggacaacacgctggagttcaggggctacgaggccgaccgggggctctcgtggttccagccgttcctgcgccgccataagggatactcggaccccagaaacgaggagttctacagcttcccaatcagcgtctatgacgtcatcccagaccgatttcggcgctgactccaaatgaccgctgttaccccgcagctgtgcatgtaaatccccgtgagtcttgttagtcttactcctgtgacttgtagcggctggttctagggggatatgggtaaaagaatgcttagggcaattgcttggtttgactcttttcgggataagaaacgggttacatgataatgtagagctctgtgccggatacattggttttgggaagggttacagaagaatactagcaccttacatgttgatgggcatttagttgaaggcattggctatttgtttttttgcccaatatatggctgttggagcttgatctgctgactgggaaaagggggcagtactttggatgtggttgtgttcatcttgcagtctcctggttctgattcgcggcatgtgttcatctattaatcttaaa

SEQ ID NO: 2824 - DNA, 3223 bp, Zea Mays
ctcccttccccaaaacaagaactgtcaatgcatgcagtccatccagccctctctctctcatcagccgtcctgcccagcccagatccaccccatcaaccagcaggtccagtccagccatccaactccagcacagaacgagaacagcaccactgctgctgtactgcttgctgttcgcctcccagcagtggaacaccagcacttccccttcagcgtccagccgtcgaccgagcacacggccagagcggtgcctcgcttctgctttggacgcttgtgatccagtagagtaaccaggaaggaagcaaatcaacacggctgctaaaaagaaaccggcgattaaaccaggtgccgcaaggctacaaaatcccctgcttgtcctgttgcgccccgccgccgctgggttccgagggagggccagccgtagaaaggagataagaagcgagaagagagcacaggcagagggagtgagggaaaaggcgagagcgtagaaaggtgagagcttttttcttttcttttttcatccgattgctcctcgcactcgcacagtcgcgcatcttttccgcccccacctcaatctctctggattctctcgaagtttcttccttttcgagaggtgggagagaagagacgcccgcagcggcacgagcttctgaattcctgtttttttgttcctggttttttgcttttgtttctgttcttgttcttgtgtgcgggtttggtttggtttccgtgcgccttttctctttattctagtgcgccgatgacgtgaggcgccgggttttcaatacttgcatccttttcgctgcatttgtttagcgggagttcttcgaacaagcagcgctgccgctgcttgcgcgaatctttggagtgaagctccccgtcacatcagtcctcttcttccccggtcgtcgtcctatgcttgtccctgtctcggcaattctgggatactaaagaggaatcggtgaaggtccggtcttcgattccccgagatttgcatctgaatcttcttcttcttcttctcttttgcctccatggagtctcttgctgcgtgccactccatcgagcgagtctagcgcgcgcgacacagtagcagcagcaaagcagtccggtcggagaagcggaagttcgcgttgctttgctgatccaatgggggagaccaacgagctaccgccgccacccgtggccgcgccgccgcccatgatgccgatgcagtccatgatggtcggcgcaggcgccatccacccgccccacgagcagttccaccatctcaactactgcgtccactcaaatccatcctgggttcaggtggcagcacttgcattccttcactatcttgtgatgttgggttctaccgtcatgcttgcaacagctattgttcctgcgatgggtggtaacgctggtgacaaggctcgagttattcaatcgttcctctttatgagtggcataaacacactgctgcaaacacttattggaacgagacttccaacagttatgaatgcctcttttgcatttgttgtcccagtgctgtcaatagcaaaagagattgaatcaaataacttcctgaatgatcatgagagatttaaacacacaatgagaacagcacaaggagctctgattgtggcatccatcctcaacatgattcttgggttcagcacgatatggggggcatatgccaaaaagttcagtccggtgataatgacccctgttgtttgtgttgttggtcttggactattccaacttggctttccccaggttgggaaatgtgtggagattgggcttccaatgctaattcttgcggtggttgtgcaacagtatgtgccaaattacttcagttatatccatcaacgggtcaccttcttgtttgagaggtattcgttgcttctttgtatcggcatcgtgtgggcctttgcagctatccttactgctgcgggtgcatatgaccatgcttcacctaagacacaacagcactgccgcactgataagtctttcctcatgtcatcggcaccatggattaaaattccattaccattcgaatggggtcctccaatcttcactgctggtcattcatttggaatgatgggtgctgtacttgttgcagccttcgagtcaactggagcacactttgctactgctcgtctagcgggtgctacaccacctccagcttatgtccttagtcggagcgttggcttgcagggtattggaatgttcttggaggggatctttagtgttccagcaggttcatctgtatcagttgaaaacattggcctccttgggctgacaaaagttggaagtaggagggtgatccagatatcaactgggtttatgatattcttctccatatttgggaaatttggggccttctttgcatcgatcccactgccgatctttgcagcaatttactgcatcttgttcggcattgtagctgctgtgggagtctcgttcatgcagtttgccaacaagaactcgatgaggaacatctatatcatcggactctcgttgttccttggcatctcggtccctcaatacttcaacggatacacttcttcagctggcggccacggacctgcccggacaaatgctggatggttcaacgacattataaacaccgtgtttgcttccgggccgacggtggcgctaattgtcgcttctgtcctggacaacacgctggagttcaggggctacgaggccgaccgggggctctcgtggttccagccgttcctgcgccgccataagggatactcggaccccagaaacgaggagttctacagcttcccaatcagcgtctatgacgtcatcccagaccgatttcggcgctgactccaaatgaccgctgttaccccgcagctgtgcatgtaaatccccgtgagtcttgttagtcttactcctgtgacttgtagcggctggttctagggggatatgggtaaaagaatgcttagggcaattgcttggtttgactcttttcgggataagaaacgggttacatgataatgtagagctctgtgccggatacattggttttgggaagggttacagaagaatactagcaccttacatgttgatgggcatttagttgaaggcattggctatttgtttttttgcccaatatatggctgttggagcttgatctgctgactgggaaaagggggcagtactttggatgtggttgtgttcatcttgcagtctcctggttctgattcgcggcatgtgttcatctattaatcttaaa

SEQ ID NO: 2825 - DNA, 3218 bp, Zea Mays
ctcccttccccaaaacaagaactgtcaatgcatgcagtccatccagccctctctctctcatcagccgtcctgcccagcccagatccaccccatcaaccagcaggtccagtccagccatccaactccagcacagaacgagaacagcaccactgctgctgtactgcttgctgttcgcctcccagcagtggaacaccagcacttccccttcagcgtccagccgtcgaccgagcacacggccagagcggtgcctcgcttctgctttggacgcttgtgatccagtagagtaaccaggaaggaagcaaatcaacacggctgctaaaaagaaaccggcgattaaaccaggtgccgcaaggctacaaaatcccctgcttgtcctgttgcgccccgccgccgctgggttccgagggagggccagccgtagaaaggagataagaagcgagaagagagcacaggcagagggagtgagggaaaaggcgagagcgtagaaaggtgagagcttttttcttttcttttttcatccgattgctcctcgcactcgcacagtcgcgcatcttttccgcccccacctcaatctctctggattctctcgaagtttcttccttttcgagaggtgggagagaagagacgcccgcagcggcacgagcttctgaattcctgtttttttgttcctggttttttgcttttgtttctgttcttgttcttgtgtgcgggtttggtttggtttccgtgcgccttttctctttattctagtgcgccgatgacgtgaggcgccgggttttcaatacttgcatccttttcgctgcatttgtttagcgggagttcttcgaacaagcagcgctgccgctgcttgcgcgaatctttggagtgaagctccccgtcacatcagtcctcttcttccccggtcgtcgtcctatgcttgtccctgtctcggcaattctgggatactaaagaggaatcggtgaaggtccggtcttcgattccccgagatttgcatctgaatcttcttcttcttcttctcttttgcctccatggagtctcttgctgcgtgccactccatcgagcgagtctagcgcgcgcgacacagtagcagcagcaaagcagtccggtcggagaagcggaagttcgcgttgctttgctgatccaatgggggagaccaacgagctaccgccgccacccgtggccgcgccgccgcccatgatgccgatgcagtccatgatggtcggcgcaggcgccatccacccgccccacgagcagttccaccatctcaactactgcgtccactcaaatccatcctggggtggcagcacttgcattccttcactatcttgtgatgttgggttctaccgtcatgcttgcaacagctattgttcctgcgatgggtggtaacgctggtgacaaggctcgagttattcaatcgttcctctttatgagtggcataaacacactgctgcaaacacttattggaacgagacttccaacagttatgaatgcctcttttgcatttgttgtcccagtgctgtcaatagcaaaagagattgaatcaaataacttcctgaatgatcatgagagatttaaacacacaatgagaacagcacaaggagctctgattgtggcatccatcctcaacatgattcttgggttcagcacgatatggggggcatatgccaaaaagttcagtccggtgataatgacccctgttgtttgtgttgttggtcttggactattccaacttggctttccccaggttgggaaatgtgtggagattgggcttccaatgctaattcttgcggtggttgtgcaacagtatgtgccaaattacttcagttatatccatcaacgggtcaccttcttgtttgagaggtattcgttgcttctttgtatcggcatcgtgtgggcctttgcagctatccttactgctgcgggtgcatatgaccatgcttcacctaagacacaacagcactgccgcactgataagtctttcctcatgtcatcggcaccatggattaaaattccattaccattcgaatggggtcctccaatcttcactgctggtcattcatttggaatgatgggtgctgtacttgttgcagccttcgagtcaactggagcacactttgctactgctcgtctagcgggtgctacaccacctccagcttatgtccttagtcggagcgttggcttgcagggtattggaatgttcttggaggggatctttagtgttccagcaggttcatctgtatcagttgaaaacattggcctccttgggctgacaaaagttggaagtaggagggtgatccagatatcaactgggtttatgatattcttctccatatttgggaaatttggggccttctttgcatcgatcccactgccgatctttgcagcaatttactgcatcttgttcggcattgtagctgctgtgggagtctcgttcatgcagtttgccaacaagaactcgatgaggaacatctatatcatcggactctcgttgttccttggcatctcggtccctcaatacttcaacggatacacttcttcagctggcggccacggacctgcccggacaaatgctggatggttcaacgacattataaacaccgtgtttgcttccgggccgacggtggcgctaattgtcgcttctgtcctggacaacacgctggagttcaggggctacgaggccgaccgggggctctcgtggttccagccgttcctgcgccgccataagggatactcggaccccagaaacgaggagttctacagcttcccaatcagcgtctatgacgtcatcccagaccgatttcggcgctgactccaaatgaccgctgttaccccgcagctgtgcatgtaaatccccgtgagtcttgttagtcttactcctgtgacttgtagcggctggttctagggggatatgggtaaaagaatgcttagggcaattgcttggtttgactcttttcgggataagaaacgggttacatgataatgtagagctctgtgccggatacattggttttgggaagggttacagaagaatactagcaccttacatgttgatgggcatttagttgaaggcattggctatttgtttttttgcccaatatatggctgttggagcttgatctgctgactgggaaaagggggcagtactttggatgtggttgtgttcatcttgcagtctcctggttctgattcgcggcatgtgttcatctattaatcttaaa

SEQ ID NO: 2826 - DNA, 2202 bp, Zea Mays
cgcactcgcacagtcgcgcatcttttccgcccccacctcaatctctctggattctctcgaagtttcttccttttcgagagtccggtcggagaagcggaagttcgcgttgctttgctgatccaatgggggagaccaacgagctaccgccgccacccgtggccgcgccgccgcccatgatgccgatgcagtccatgatggtcggcgcaggcgccatccacccgccccacgagcagttccaccatctcaactactgcgtccactcaaatccatcctgggttcaggtggcagcacttgcattccttcactatcttgtgatgttgggttctaccgtcatgcttgcaacagctattgttcctgcgatgggtggtaacgctggtgacaaggctcgagttattcaatcgttcctctttatgagtggcataaacacactgctgcaaacacttattggaacgagacttccaacagttatgaatgcctcttttgcatttgttgtcccagtgctgtcaatagcaaaagagattgaatcaaataacttcctgaatgatcatgagagatttaaacacacaatgagaacagcacaaggagctctgattgtggcatccatcctcaacatgattcttgggttcagcacgatatggggggcatatgccaaaaagttcagtccggtgataatgacccctgttgtttgtgttgttggtcttggactattccaacttggctttccccaggttgggaaatgtgtggagattgggcttccaatgctaattcttgcggtggttgtgcaacagtatgtgccaaattacttcagttatatccatcaacgggtcaccttcttgtttgagaggtattcgttgcttctttgtatcggcatcgtgtgggcctttgcagctatccttactgctgcgggtgcatatgaccatgcttcacctaagacacaacagcactgccgcactgataagtctttcctcatgtcatcggcaccatggattaaaattccattaccattcgaatggggtcctccaatcttcactgctggtcattcatttggaatgatgggtgctgtacttgttgcagccttcgagtcaactggagcacactttgctactgctcgtctagcgggtgctacaccacctccagcttatgtccttagtcggagcgttggcttgcagggtattggaatgttcttggaggggatctttagtgttccagcaggttcatctgtatcagttgaaaacattggcctccttgggctgacaaaagttggaagtaggagggtgatccagatatcaactgggtttatgatattcttctccatatttgggaaatttggggccttctttgcatcgatcccactgccgatctttgcagcaatttactgcatcttgttcggcattgtagctgctgtgggagtctcgttcatgcagtttgccaacaagaactcgatgaggaacatctatatcatcggactctcgttgttccttggcatctcggtccctcaatacttcaacggatacacttcttcagctggcggccacggacctgcccggacaaatgctggatggttcaacgacattataaacaccgtgtttgcttccgggccgacggtggcgctaattgtcgcttctgtcctggacaacacgctggagttcaggggctacgaggccgaccgggggctctcgtggttccagccgttcctgcgccgccataagggatactcggaccccagaaacgaggagttctacagcttcccaatcagcgtctatgacgtcatcccagaccgatttcggcgctgactccaaatgaccgctgttaccccgcagctgtgcatgtaaatccccgtgagtcttgttagtcttactcctgtgacttgtagcggctggttctagggggatatgggtaaaagaatgcttagggcaattgcttggtttgactcttttcgggataagaaacgggttacatgataatgtagagctctgtgccggatacattggttttgggaagggttacagaagaatactagcaccttacatgttgatgggcatttagttgaaggcattggctatttgtttttttgcccaatatatggctgttggagcttgatctgctgactgggaaaagggggcagtactttggatgtggttgtgttcatcttgcagtctcctggttctgattcgcggcatgtgttcatctattaatcttaaa

SEQ ID NO: 2827 - DNA, 2176 bp, Zea Mays
cccccacctcaatctctctggattctctcgaagtttcttccttttcgagagcagtccggtcggagaagcggaagttcgcgttgctttgctgatccaatgggggagaccaacgagctaccgccgccacccgtggccgcgccgccgcccatgatgccgatgcagtccatgatggtcggcgcaggcgccatccacccgccccacgagcagttccaccatctcaactactgcgtccactcaaatccatcctgggttcaggtggcagcacttgcattccttcactatcttgtgatgttgggttctaccgtcatgcttgcaacagctattgttcctgcgatgggtggtaacgctggtgacaaggctcgagttattcaatcgttcctctttatgagtggcataaacacactgctgcaaacacttattggaacgagacttccaacagttatgaatgcctcttttgcatttgttgtcccagtgctgtcaatagcaaaagagattgaatcaaataacttcctgaatgatcatgagagatttaaacacacaatgagaacagcacaaggagctctgattgtggcatccatcctcaacatgattcttgggttcagcacgatatggggggcatatgccaaaaagttcagtccggtgataatgacccctgttgtttgtgttgttggtcttggactattccaacttggctttccccaggttgggaaatgtgtggagattgggcttccaatgctaattcttgcggtggttgtgcaacagtatgtgccaaattacttcagttatatccatcaacgggtcaccttcttgtttgagaggtattcgttgcttctttgtatcggcatcgtgtgggcctttgcagctatccttactgctgcgggtgcatatgaccatgcttcacctaagacacaacagcactgccgcactgataagtctttcctcatgtcatcggcaccatggattaaaattccattaccattcgaatggggtcctccaatcttcactgctggtcattcatttggaatgatgggtgctgtacttgttgcagccttcgagtcaactggagcacactttgctactgctcgtctagcgggtgctacaccacctccagcttatgtccttagtcggagcgttggcttgcagggtattggaatgttcttggaggggatctttagtgttccagcaggttcatctgtatcagttgaaaacattggcctccttgggctgacaaaagttggaagtaggagggtgatccagatatcaactgggtttatgatattcttctccatatttgggaaatttggggccttctttgcatcgatcccactgccgatctttgcagcaatttactgcatcttgttcggcattgtagctgctgtgggagtctcgttcatgcagtttgccaacaagaactcgatgaggaacatctatatcatcggactctcgttgttccttggcatctcggtccctcaatacttcaacggatacacttcttcagctggcggccacggacctgcccggacaaatgctggatggttcaacgacattataaacaccgtgtttgcttccgggccgacggtggcgctaattgtcgcttctgtcctggacaacacgctggagttcaggggctacgaggccgaccgggggctctcgtggttccagccgttcctgcgccgccataagggatactcggaccccagaaacgaggagttctacagcttcccaatcagcgtctatgacgtcatcccagaccgatttcggcgctgactccaaatgaccgctgttaccccgcagctgtgcatgtaaatccccgtgagtcttgttagtcttactcctgtgacttgtagcggctggttctagggggatatgggtaaaagaatgcttagggcaattgcttggtttgactcttttcgggataagaaacgggttacatgataatgtagagctctgtgccggatacattggttttgggaagggttacagaagaatactagcaccttacatgttgatgggcatttagttgaaggcattggctatttgtttttttgcccaatatatggctgttggagcttgatctgctgactgggaaaagggggcagtactttggatgtggttgtgttcatcttgcagtctcctggttctgattcgcggcatgtgttcatctattaatcttaaa

SEQ ID NO: 2828 - DNA, 998 bp, Zea Mays
gtgaggtttttcattctagagaagtgaaaacattggcctccttgggctgacaaaagttggaagtaggagggtgatccagatatcaactgggtttatgatattcttctccatatttgggaaatttggggccttctttgcatcgatcccactgccgatctttgcagcaatttactgcatcttgttcggcattgtagctgctgtgggagtctcgttcatgcagtttgccaacaagaactcgatgaggaacatctatatcatcggactctcgttgttccttggcatctcggtccctcaatacttcaacggatacacttcttcagctggcggccacggacctgcccggacaaatgctggatggttcaacgacattataaacaccgtgtttgcttccgggccgacggtggcgctaattgtcgcttctgtcctggacaacacgctggagttcaggggctacgaggccgaccgggggctctcgtggttccagccgttcctgcgccgccataagggatactcggaccccagaaacgaggagttctacagcttcccaatcagcgtctatgacgtcatcccagaccgatttcggcgctgactccaaatgaccgctgttaccccgcagctgtgcatgtaaatccccgtgagtcttgttagtcttactcctgtgacttgtagcggctggttctagggggatatgggtaaaagaatgcttagggcaattgcttggtttgactcttttcgggataagaaacgggttacatgataatgtagagctctgtgccggatacattggttttgggaagggttacagaagaatactagcaccttacatgttgatgggcatttagttgaaggcattggctatttgtttttttgcccaatatatggctgttggagcttgatctgctgactgggaaaagggggcagtactttggatgtggttgtgttcatcttgcagtctcctggttctgattcgcggcatgtgttcatctattaatcttaaa

SEQ ID NO: 2829 - DNA, 230 bp, Zea Mays
gtgaagagcaggtagcctaggaggaggactactacgaggagtacgaggaagtctaggtggcgtctcctagtcagtttaatggcaccaaggaataatattagttcgctttattgttatcatttgtttttgtcagacacttccgctatgtaataatgtttgtgacatttatatctatacacttggtcattatatgtgttgttcttttttggtgcatatatgagacgcacccg

SEQ ID NO: 2830 - DNA, 547 bp, Zea Mays
gttggccgcaattttacacaccccaaggtctcgcaaatcaggttgcggtcctcgtaccaaccctggccatgttcggttcggttgcctatcgcctcctcctgctcctcttccgccgccgccgctgccgctgctccctaggtgaacccgtcgtcgcctcgcctgggcccacaacgccctcctccgcctgtgagcaaggcacccctctcagtcttgtgcagggcgagttgctgccatggcggttgttttttgcgggcacgagctctgcccgcctccagtcttggatgtcgtggccaggtgcctacttccccctccctccctccactcgagactccacgtcgccgccacacgacactacgcatccgctcttcttcctcccctcgtctcggcggctagcgtccgctccctcgacgcctccgtccatgcccggctccagcactcgctggctccccgagggagttgaatgaagaaaggaagaatgatattgagctcctggccttcctgttggccatacgagaatgaggtgtataggtagaagtccaagagaaac

SEQ ID NO: 2831 - DNA, 267 bp, Zea Mays
ctcacctacccagtgggcccaggcgccaggccgcaccatgtctcacgcgcgtgctcgtcgcgcggacgcgcagcagcccatcagctgctccaagttctcctcttgtccaaaactgcttctctcgcgcagcagagcaaccgcgccaggcttcttctccagattgcgatctgttcccgagcttcgaggaatcgacggacaagcttcagcgaccaagagatcgaactcttcgagttctacgaggctgaagattctgagcatctgtttggt

SEQ ID NO: 2832 - DNA, 2720 bp, Zea Mays
gaaaaaaaaacctcatgctcagtcactccccgtctcacaaaacgccgcccttggatgagccaatcttcctctcgcacggcccactccttacccccgtctcacaaaacgccgccgccgccgtcgacagccaactccccgcgcccccaccgcctccgcgcaccgccccacacctgattgcgcgtccagaggtattcagagctctctgctgtgggagcaacgagggcagggatgagggaggtggtgacggtgcaggtcggcggtttcgcgaacttcgtcggctcccacttttggaacttccaggatgagctgctcgggctcgccgacgaccccggcgccgacccggtattcaggaccgccgcgctcgacatggacgtcctgtaccgcgccggcgagacacaccagtatagtggtgatttaattctgagtgatgagagagcacaaatccgtaacagtgtgataggatcatggaatcttgtgataactggtctcagttgttgcaggtctggaaaggtaacaaaatcagtagcaaaacctcatgagcgaaacttgttcctacaaagtttatctgaagaagaacagaacccaagctctagcgatggccaaaacaatgctagtgttgaagataaggacctggtcgcaaatctggagaatggagtcaaattttggactgattattcaaaagttcagtatcaccctcagagcttatatgagttgtatggatcatggacagactttgacaggtttgataactatggaactgcaaaggaggtggtttcagaatggtcccaaatggaggaaatgaatgagaggctaaggttctttgttgaagaatgtgaccatatccagggtatccagtttcttgtggatgattctggaggctttgccagtgtagctgcacagtttttggagagtattgttgatgattacacaaatacccctgtaatgctgtattgtgtgcggaatccagactcctatgggtcttccagaaatcagtgtgaaaccatcataagatctttgcatgatgctgtatcgttgtcgaaactttcatactactgcaatctgatggttacttgtcacctttgctttctataaaagatgagaagcacttccactccagtgccatttgtgcagcagcaatgcattcattatctattccattcaggctacaacacgtgggcccggcctcagattcagcgcattcatctggtaagcttgatattggtgagcttgtgcacatattatctgatcaagggaggcagaacatgatcactgcgctggatgtagcaatgcctgccccttctttgacagatagaacagatttgaggaacatacagaggagcttgcattctctgacacctgaaatcagcgacgaggatgaagatccttacgctgttgaatccatggtggttcatggagtcctagatgcaggcgggaaaagggcttccatatctcaggtgaaggaatccatctgttcagcactggaaggcagggcgacgaaacccaagttctcccacctctcggtatcgcggtgccccctcccaatcccgctcccgttcccgtcaatcttcagcagcagtgttggccagcagggcgagatcctcggcaccagccacgcaggagcccggccaaagggtccgcttgccgtcggctcggtgccgatggcagcgcgcctgaggtcgagcagcgccatagcgccattcatcgagaggaggtcggcgagcctccagaggctcggtgtcgccaggggcacgctgggctcgcaggtcctccacgactggggcttcgggagggaggaggtcgaggacatggctgagcacctggcgaagatgttgcgcccgttttacccggaaatggacctgacgtcggattctgatgattaggtttcactgtcattgtgtctcgtattaccggatggtaagcagctgggttttagtctgtgggaactagaaattgtgatgcagatgcagctggcgtgagacgccgtgctgcgatgcattcctctggtctgtgttgaagggatgcagagtactggaaacgagatctgagagagcctgggcgtgtgaccgtgtcattcagcgctccgcatgtgatgcacatgcatttgggcgacgacgcggacgtccgccgccatgggcagttgttgttgtggtaacattgtgcaatgatccagccctgatgcagatgtccagatctgtgctgtacttacctgcaaaccacacagctaatgaaactaaagaacagtctttctggtctgagatgttttctttgttcgttttaacttcgcgagcaccagaactgtaaacctggcattttttctagtatgaaaaaatagcattatttggctcgacaaaccgcattgttcagttggatcttcatatcatcacagccagaacaagagggcaaatgcagcattcttgcatgtgttggggttccctgaaattttgtatggtagtgtcaccgtaattgatctctggaatatgtaatgtaaccccctctgttgtcgtgtgcatgaatttcttcagtctgtgcatcgctcgcacgcatgcacatggtcgcaactcgcaacattctgcgatctgatgttccagacaagctcaagatccagatcagatacccaaccaggccaccttttccaatttatttcctggggacaaaaagagaaaaggcttgtactgtatcactgttcttctcatatagtacaatgtatcggtatggtctca

SEQ ID NO: 2833 - DNA, 2745 bp, Zea Mays
gaaaaaaaaacctcatgctcagtcactccccgtctcacaaaacgccgcccttggatgagccaatcttcctctcgcacggcccactccttacccccgtctcacaaaacgccgccgccgccgtcgacagccaactccccgcgcccccaccgcctccgcgcaccgccccacacctgattgcgcgtccagaggtattcagagctctctgctgtgggagcaacgagggcagggatgagggaggtggtgacggtgcaggtcggcggtttcgcgaacttcgtcggctcccacttttggaacttccaggatgagctgctcgggctcgccgacgaccccggcgccgacccggtattcaggaccgccgcgctcgacatggacgtcctgtaccgcgccggcgagacacaccagtatagtggtgatttaattctgagtgatgagagagcacaaatccgtaacagtgtgataggatcatggaatcttgtgataactggtctcagttgttgcaggtctggaaaggtaacaaaatcagtagcaaaacctcatgagcgaaacttgttcctacaaagtttatctgaagaagaacagaacccaagctctagcgatggccaaaacaatgctagtgttgaagataaggacctggtcgcaaatctggagaatggagtcaaattttggactgattattcaaaagttcagtatcaccctcagagcttatatgagttgtatggatcatggacagactttgacaggtttgataactatggaactgcaaaggaggtggtttcagaatggtcccaaatggaggaaatgaatgagaggctaaggttctttgttgaagaatgtgaccatatccagggtatccagtttcttgtggatgattctggaggctttgccagtgtagctgcacagtttttggagagtattgttgatgattacacaaatacccctgtaatgctgtattgtgtgcggaatccagactcctatgggtcttccagaaatcagtgtgaaaccatcataagatctttgcatgatgctgtatcgttgtcgaaactttcatactactgcaatctgatggtaccaataggactgccttctttaagttacttgtcacctttgctttctataaaagatgagaagcacttccactccagtgccatttgtgcagcagcaatgcattcattatctattccattcaggctacaacacgtgggcccggcctcagattcagcgcattcatctggtaagcttgatattggtgagcttgtgcacatattatctgatcaagggaggcagaacatgatcactgcgctggatgtagcaatgcctgccccttctttgacagatagaacagatttgaggaacatacagaggagcttgcattctctgacacctgaaatcagcgacgaggatgaagatccttacgctgttgaatccatggtggttcatggagtcctagatgcaggcgggaaaagggcttccatatctcaggtgaaggaatccatctgttcagcactggaaggcagggcgacgaaacccaagttctcccacctctcggtatcgcggtgccccctcccaatcccgctcccgttcccgtcaatcttcagcagcagtgttggccagcagggcgagatcctcggcaccagccacgcaggagcccggccaaagggtccgcttgccgtcggctcggtgccgatggcagcgcgcctgaggtcgagcagcgccatagcgccattcatcgagaggaggtcggcgagcctccagaggctcggtgtcgccaggggcacgctgggctcgcaggtcctccacgactggggcttcgggagggaggaggtcgaggacatggctgagcacctggcgaagatgttgcgcccgttttacccggaaatggacctgacgtcggattctgatgattaggtttcactgtcattgtgtctcgtattaccggatggtaagcagctgggttttagtctgtgggaactagaaattgtgatgcagatgcagctggcgtgagacgccgtgctgcgatgcattcctctggtctgtgttgaagggatgcagagtactggaaacgagatctgagagagcctgggcgtgtgaccgtgtcattcagcgctccgcatgtgatgcacatgcatttgggcgacgacgcggacgtccgccgccatgggcagttgttgttgtggtaacattgtgcaatgatccagccctgatgcagatgtccagatctgtgctgtacttacctgcaaaccacacagctaatgaaactaaagaacagtctttctggtctgagatgttttctttgttcgttttaacttcgcgagcaccagaactgtaaacctggcattttttctagtatgaaaaaatagcattatttggctcgacaaaccgcattgttcagttggatcttcatatcatcacagccagaacaagagggcaaatgcagcattcttgcatgtgttggggttccctgaaattttgtatggtagtgtcaccgtaattgatctctggaatatgtaatgtaaccccctctgttgtcgtgtgcatgaatttcttcagtctgtgcatcgctcgcacgcatgcacatggtcgcaactcgcaacattctgcgatctgatgttccagacaagctcaagatccagatcagatacccaaccaggccaccttttccaatttatttcctggggacaaaaagagaaaaggcttgtactgtatcactgttcttctcatatagtacaatgtatcggtatggtctca

SEQ ID NO: 2834 - DNA, 2768 bp, Zea Mays
aaaaaacctcatgctcagtcactccccgtctcacaaaacgccgcccttggatgagccaatcttcctctcgcacggcccactccttacccccgtctcacaaaacgccgccgccgccgtcgacagccaactccccgcgcccccaccgcctccgcgcaccgccccacacctgattgcgcgtccagaggtattcagagctctctgctgtgggagcaacgagggcagggatgagggaggtggtgacggtgcaggtcggcggtttcgcgaacttcgtcggctcccacttttggaacttccaggatgagctgctcgggctcgccgacgaccccggcgccgacccggtattcaggaccgccgcgctcgacatggacgtcctgtaccgcgccggcgagacacaccagagcgtcgccagctactgccctcgcttggtatcagtcggttctcgagggtctcttggctcgttaagttcctctggcactctaggttcgagcagtgcagctgcagatgagcccaacatcttcacatggtctggaaaggtaacaaaatcagtagcaaaacctcatgagcgaaacttgttcctacaaagtttatctgaagaagaacagaacccaagctctagcgatggccaaaacaatgctagtgttgaagataaggacctggtcgcaaatctggagaatggagtcaaattttggactgattattcaaaagttcagtatcaccctcagagcttatatgagttgtatggatcatggacagactttgacaggtttgataactatggaactgcaaaggaggtggtttcagaatggtcccaaatggaggaaatgaatgagaggctaaggttctttgttgaagaatgtgaccatatccagggtatccagtttcttgtggatgattctggaggctttgccagtgtagctgcacagtttttggagagtattgttgatgattacacaaatacccctgtaatgctgtattgtgtgcggaatccagactcctatgggtcttccagaaatcagtgtgaaaccatcataagatctttgcatgatgctgtatcgttgtcgaaactttcatactactgcaatctgatggtaccaataggactgccttctttaagttacttgtcacctttgctttctataaaagatgagaagcacttccactccagtgccatttgtgcagcagcaatgcattcattatctattccattcaggctacaacacgtgggcccggcctcagattcagcgcattcatctggtaagcttgatattggtgagcttgtgcacatattatctgatcaagggaggcagaacatgatcactgcgctggatgtagcaatgcctgccccttctttgacagatagaacagatttgaggaacatacagaggagcttgcattctctgacacctgaaatcagcgacgaggatgaagatccttacgctgttgaatccatggtggttcatggagtcctagatgcaggcgggaaaagggcttccatatctcaggtgaaggaatccatctgttcagcactggaaggcagggcgacgaaacccaagttctcccacctctcggtatcgcggtgccccctcccaatcccgctcccgttcccgtcaatcttcagcagcagtgttggccagcagggcgagatcctcggcaccagccacgcaggagcccggccaaagggtccgcttgccgtcggctcggtgccgatggcagcgcgcctgaggtcgagcagcgccatagcgccattcatcgagaggaggtcggcgagcctccagaggctcggtgtcgccaggggcacgctgggctcgcaggtcctccacgactggggcttcgggagggaggaggtcgaggacatggctgagcacctggcgaagatgttgcgcccgttttacccggaaatggacctgacgtcggattctgatgattaggtttcactgtcattgtgtctcgtattaccggatggtaagcagctgggttttagtctgtgggaactagaaattgtgatgcagatgcagctggcgtgagacgccgtgctgcgatgcattcctctggtctgtgttgaagggatgcagagtactggaaacgagatctgagagagcctgggcgtgtgaccgtgtcattcagcgctccgcatgtgatgcacatgcatttgggcgacgacgcggacgtccgccgccatgggcagttgttgttgtggtaacattgtgcaatgatccagccctgatgcagatgtccagatctgtgctgtacttacctgcaaaccacacagctaatgaaactaaagaacagtctttctggtctgagatgttttctttgttcgttttaacttcgcgagcaccagaactgtaaacctggcattttttctagtatgaaaaaatagcattatttggctcgacaaaccgcattgttcagttggatcttcatatcatcacagccagaacaagagggcaaatgcagcattcttgcatgtgttggggttccctgaaattttgtatggtagtgtcaccgtaattgatctctggaatatgtaatgtaaccccctctgttgtcgtgtgcatgaatttcttcagtctgtgcatcgctcgcacgcatgcacatggtcgcaactcgcaacattctgcgatctgatgttccagacaagctcaagatccagatcagatacccaaccaggccaccttttccaatttatttcctggggacaaaaagagaaaaggcttgtactgtatcactgttcttctcatatagtacaatgtatcggtatggtctca

SEQ ID NO: 2835 - DNA, 2743 bp, Zea Mays
aaaaaacctcatgctcagtcactccccgtctcacaaaacgccgcccttggatgagccaatcttcctctcgcacggcccactccttacccccgtctcacaaaacgccgccgccgccgtcgacagccaactccccgcgcccccaccgcctccgcgcaccgccccacacctgattgcgcgtccagaggtattcagagctctctgctgtgggagcaacgagggcagggatgagggaggtggtgacggtgcaggtcggcggtttcgcgaacttcgtcggctcccacttttggaacttccaggatgagctgctcgggctcgccgacgaccccggcgccgacccggtattcaggaccgccgcgctcgacatggacgtcctgtaccgcgccggcgagacacaccagagcgtcgccagctactgccctcgcttggtatcagtcggttctcgagggtctcttggctcgttaagttcctctggcactctaggttcgagcagtgcagctgcagatgagcccaacatcttcacatggtctggaaaggtaacaaaatcagtagcaaaacctcatgagcgaaacttgttcctacaaagtttatctgaagaagaacagaacccaagctctagcgatggccaaaacaatgctagtgttgaagataaggacctggtcgcaaatctggagaatggagtcaaattttggactgattattcaaaagttcagtatcaccctcagagcttatatgagttgtatggatcatggacagactttgacaggtttgataactatggaactgcaaaggaggtggtttcagaatggtcccaaatggaggaaatgaatgagaggctaaggttctttgttgaagaatgtgaccatatccagggtatccagtttcttgtggatgattctggaggctttgccagtgtagctgcacagtttttggagagtattgttgatgattacacaaatacccctgtaatgctgtattgtgtgcggaatccagactcctatgggtcttccagaaatcagtgtgaaaccatcataagatctttgcatgatgctgtatcgttgtcgaaactttcatactactgcaatctgatggttacttgtcacctttgctttctataaaagatgagaagcacttccactccagtgccatttgtgcagcagcaatgcattcattatctattccattcaggctacaacacgtgggcccggcctcagattcagcgcattcatctggtaagcttgatattggtgagcttgtgcacatattatctgatcaagggaggcagaacatgatcactgcgctggatgtagcaatgcctgccccttctttgacagatagaacagatttgaggaacatacagaggagcttgcattctctgacacctgaaatcagcgacgaggatgaagatccttacgctgttgaatccatggtggttcatggagtcctagatgcaggcgggaaaagggcttccatatctcaggtgaaggaatccatctgttcagcactggaaggcagggcgacgaaacccaagttctcccacctctcggtatcgcggtgccccctcccaatcccgctcccgttcccgtcaatcttcagcagcagtgttggccagcagggcgagatcctcggcaccagccacgcaggagcccggccaaagggtccgcttgccgtcggctcggtgccgatggcagcgcgcctgaggtcgagcagcgccatagcgccattcatcgagaggaggtcggcgagcctccagaggctcggtgtcgccaggggcacgctgggctcgcaggtcctccacgactggggcttcgggagggaggaggtcgaggacatggctgagcacctggcgaagatgttgcgcccgttttacccggaaatggacctgacgtcggattctgatgattaggtttcactgtcattgtgtctcgtattaccggatggtaagcagctgggttttagtctgtgggaactagaaattgtgatgcagatgcagctggcgtgagacgccgtgctgcgatgcattcctctggtctgtgttgaagggatgcagagtactggaaacgagatctgagagagcctgggcgtgtgaccgtgtcattcagcgctccgcatgtgatgcacatgcatttgggcgacgacgcggacgtccgccgccatgggcagttgttgttgtggtaacattgtgcaatgatccagccctgatgcagatgtccagatctgtgctgtacttacctgcaaaccacacagctaatgaaactaaagaacagtctttctggtctgagatgttttctttgttcgttttaacttcgcgagcaccagaactgtaaacctggcattttttctagtatgaaaaaatagcattatttggctcgacaaaccgcattgttcagttggatcttcatatcatcacagccagaacaagagggcaaatgcagcattcttgcatgtgttggggttccctgaaattttgtatggtagtgtcaccgtaattgatctctggaatatgtaatgtaaccccctctgttgtcgtgtgcatgaatttcttcagtctgtgcatcgctcgcacgcatgcacatggtcgcaactcgcaacattctgcgatctgatgttccagacaagctcaagatccagatcagatacccaaccaggccaccttttccaatttatttcctggggacaaaaagagaaaaggcttgtactgtatcactgttcttctcatatagtacaatgtatcggtatggtctca

SEQ ID NO: 2836 - DNA, 3094 bp, Zea Mays
aaaacctcatgctcagtcactccccgtctcacaaaacgccgcccttggatgagccaatcttcctctcgcacggcccactccttacccccgtctcacaaaacgccgccgccgccgtcgacagccaactccccgcgcccccaccgcctccgcgcaccgccccacacctgattgcgcgtccagaggtattcagagctctctgctgtgggagcaacgagggcagggatgagggaggtggtgacggtgcaggtcggcggtttcgcgaacttcgtcggctcccacttttggaacttccaggatgagctgctcgggctcgccgacgaccccggcgccgacccggtattcaggaccgccgcgctcgacatggacgtcctgtaccgcgccggcgagacacaccagagcgtcgccagctactgccctcgcttggtatcagtcggttctcgagggtctcttggctcgttaagttcctctggcactctaggttcgagcagtgcagctgcagatgagcccaacatcttcacatggtctggaaaggtaacaaaatcagtagcaaaacctcatgagcgaaacttgttcctacaaagtttatctgaagaagaacagaacccaagctctagcgatggccaaaacaatgctagtgttgaagataaggacctggtcgcaaatctggagaatggagtcaaattttggactgattattcaaaagttcagtatcaccctcagagcttatatgagttgtatggatcatggacagactttgacaggtttgataactatggaactgcaaaggaggtggtttcagaatggtcccaaatggaggaaatgaatgagaggctaaggttctttgttgaagaatgtgaccatatccagggtatccagtttcttgtggatgattctggaggctttgccagtgtagctgcacagtttttggagagtattgttgatgattacacaaatacccctgtaatgctgtattgtgtgcggaatccagactcctatgggtcttccagaaatcagtgtgaaaccatcataagatctttgcatgatgctgtatcgttgtcgaaactttcatactactgcaatctgatggtaccaataggactgccttctttaagtatgcttctgattgcttataatcttttacgtagactgccatataacatgtgattctcttatccattctccattgtagcatgttcgtatgtgcagatccttataattctactgaatgtacagtaaactcataattggacttgtgattctttttagtaatttgaggcttcttatagcagtgcttggaccttagttttgcaaatgtttcatttcctgatctttgatcataagctaaataaacattcagatgttgcattcttcacctcaaataactcacacacctactgttggcgaatgcaatgctcattctattataacccagccctatggttacttgtcacctttgctttctataaaagatgagaagcacttccactccagtgccatttgtgcagcagcaatgcattcattatctattccattcaggctacaacacgtgggcccggcctcagattcagcgcattcatctggtaagcttgatattggtgagcttgtgcacatattatctgatcaagggaggcagaacatgatcactgcgctggatgtagcaatgcctgccccttctttgacagatagaacagatttgaggaacatacagaggagcttgcattctctgacacctgaaatcagcgacgaggatgaagatccttacgctgttgaatccatggtggttcatggagtcctagatgcaggcgggaaaagggcttccatatctcaggtgaaggaatccatctgttcagcactggaaggcagggcgacgaaacccaagttctcccacctctcggtatcgcggtgccccctcccaatcccgctcccgttcccgtcaatcttcagcagcagtgttggccagcagggcgagatcctcggcaccagccacgcaggagcccggccaaagggtccgcttgccgtcggctcggtgccgatggcagcgcgcctgaggtcgagcagcgccatagcgccattcatcgagaggaggtcggcgagcctccagaggctcggtgtcgccaggggcacgctgggctcgcaggtcctccacgactggggcttcgggagggaggaggtcgaggacatggctgagcacctggcgaagatgttgcgcccgttttacccggaaatggacctgacgtcggattctgatgattaggtttcactgtcattgtgtctcgtattaccggatggtaagcagctgggttttagtctgtgggaactagaaattgtgatgcagatgcagctggcgtgagacgccgtgctgcgatgcattcctctggtctgtgttgaagggatgcagagtactggaaacgagatctgagagagcctgggcgtgtgaccgtgtcattcagcgctccgcatgtgatgcacatgcatttgggcgacgacgcggacgtccgccgccatgggcagttgttgttgtggtaacattgtgcaatgatccagccctgatgcagatgtccagatctgtgctgtacttacctgcaaaccacacagctaatgaaactaaagaacagtctttctggtctgagatgttttctttgttcgttttaacttcgcgagcaccagaactgtaaacctggcattttttctagtatgaaaaaatagcattatttggctcgacaaaccgcattgttcagttggatcttcatatcatcacagccagaacaagagggcaaatgcagcattcttgcatgtgttggggttccctgaaattttgtatggtagtgtcaccgtaattgatctctggaatatgtaatgtaaccccctctgttgtcgtgtgcatgaatttcttcagtctgtgcatcgctcgcacgcatgcacatggtcgcaactcgcaacattctgcgatctgatgttccagacaagctcaagatccagatcagatacccaaccaggccaccttttccaatttatttcctggggacaaaaagagaaaaggcttgtactgtatcactgttcttctcatatagtacaatgtatcggtatggtctca

SEQ ID NO: 2837 - DNA, 3060 bp, Zea Mays
catgctcagtcactccccgtctcacaaaacgccgcccttggatgagccaatcttcctctcgcacggcccactccttacccccgtctcacaaaacgccgccgccgccgtcgacagccaactccccgcgcccccaccgcctccgcgcaccgccccacacctgattgcgcgtccagaggtattcagagctctctgctgtgggagcaacgagggcagggatgagggaggtggtgacggtgcaggtcggcggtttcgcgaacttcgtcggctcccacttttggaacttccaggatgagctgctcgggctcgccgacgaccccggcgccgacccggtattcaggaccgccgcgctcgacatggacgtcctgtaccgcgccggcgagacacaccagtatagtggtgatttaattctgagtgatgagagagcacaaatccgtaacagtgtgataggatcatggaatcttgtgataactggtctcagttgttgcaggtctggaaaggtaacaaaatcagtagcaaaacctcatgagcgaaacttgttcctacaaagtttatctgaagaagaacagaacccaagctctagcgatggccaaaacaatgctagtgttgaagataaggacctggtcgcaaatctggagaatggagtcaaattttggactgattattcaaaagttcagtatcaccctcagagcttatatgagttgtatggatcatggacagactttgacaggtttgataactatggaactgcaaaggaggtggtttcagaatggtcccaaatggaggaaatgaatgagaggctaaggttctttgttgaagaatgtgaccatatccagggtatccagtttcttgtggatgattctggaggctttgccagtgtagctgcacagtttttggagagtattgttgatgattacacaaatacccctgtaatgctgtattgtgtgcggaatccagactcctatgggtcttccagaaatcagtgtgaaaccatcataagatctttgcatgatgctgtatcgttgtcgaaactttcatactactgcaatctgatggtaccaataggactgccttctttaagtatgcttctgattgcttataatcttttacgtagactgccatataacatgtgattctcttatccattctccattgtagcatgttcgtatgtgcagatccttataattctactgaatgtacagtaaactcataattggacttgtgattctttttagtaatttgaggcttcttatagcagtgcttggaccttagttttgcaaatgtttcatttcctgatctttgatcataagctaaataaacattcagatgttgcattcttcacctcaaataactcacacacctactgttggcgaatgcaatgctcattctattataacccagccctatggttacttgtcacctttgctttctataaaagatgagaagcacttccactccagtgccatttgtgcagcagcaatgcattcattatctattccattcaggctacaacacgtgggcccggcctcagattcagcgcattcatctggtaagcttgatattggtgagcttgtgcacatattatctgatcaagggaggcagaacatgatcactgcgctggatgtagcaatgcctgccccttctttgacagatagaacagatttgaggaacatacagaggagcttgcattctctgacacctgaaatcagcgacgaggatgaagatccttacgctgttgaatccatggtggttcatggagtcctagatgcaggcgggaaaagggcttccatatctcaggtgaaggaatccatctgttcagcactggaaggcagggcgacgaaacccaagttctcccacctctcggtatcgcggtgccccctcccaatcccgctcccgttcccgtcaatcttcagcagcagtgttggccagcagggcgagatcctcggcaccagccacgcaggagcccggccaaagggtccgcttgccgtcggctcggtgccgatggcagcgcgcctgaggtcgagcagcgccatagcgccattcatcgagaggaggtcggcgagcctccagaggctcggtgtcgccaggggcacgctgggctcgcaggtcctccacgactggggcttcgggagggaggaggtcgaggacatggctgagcacctggcgaagatgttgcgcccgttttacccggaaatggacctgacgtcggattctgatgattaggtttcactgtcattgtgtctcgtattaccggatggtaagcagctgggttttagtctgtgggaactagaaattgtgatgcagatgcagctggcgtgagacgccgtgctgcgatgcattcctctggtctgtgttgaagggatgcagagtactggaaacgagatctgagagagcctgggcgtgtgaccgtgtcattcagcgctccgcatgtgatgcacatgcatttgggcgacgacgcggacgtccgccgccatgggcagttgttgttgtggtaacattgtgcaatgatccagccctgatgcagatgtccagatctgtgctgtacttacctgcaaaccacacagctaatgaaactaaagaacagtctttctggtctgagatgttttctttgttcgttttaacttcgcgagcaccagaactgtaaacctggcattttttctagtatgaaaaaatagcattatttggctcgacaaaccgcattgttcagttggatcttcatatcatcacagccagaacaagagggcaaatgcagcattcttgcatgtgttggggttccctgaaattttgtatggtagtgtcaccgtaattgatctctggaatatgtaatgtaaccccctctgttgtcgtgtgcatgaatttcttcagtctgtgcatcgctcgcacgcatgcacatggtcgcaactcgcaacattctgcgatctgatgttccagacaagctcaagatccagatcagatacccaaccaggccaccttttccaatttatttcctggggacaaaaagagaaaaggcttgtactgtatcactgttcttctcatatagtacaatgtatcggtatggtctca

SEQ ID NO: 2838 - DNA, 2743 bp, Zea Mays
cgtctcacaaaacgccgcccttggatgagccaatcttcctctcgcacggcccactccttacccccgtctcacaaaacgccgccgccgccgtcgacagccaactccccgcgcccccaccgcctccgcgcaccgccccacacctgattgcgcgtccagaggtattcagagctctctgctgtgggagcaacgagggcagggatgagggaggtggtgacggtgcaggtcggcggtttcgcgaacttcgtcggctcccacttttggaacttccaggatgagctgctcgggctcgccgacgaccccggcgccgacccggtattcaggaccgccgcgctcgacatggacgtcctgtaccgcgccggcgagacacaccaggagcgtcgccagctactgccctcgcttggtatcagtcggttctcgagggtctcttggctcgttaagttcctctggcactctaggttcgagcagtgcagctgcagatgagcccaacatcttcacatggtctggaaaggtaacaaaatcagtagcaaaacctcatgagcgaaacttgttcctacaaagtttatctgaagaagaacagaacccaagctctagcgatggccaaaacaatgctagtgttgaagataaggacctggtcgcaaatctggagaatggagtcaaattttggactgattattcaaaagttcagtatcaccctcagagcttatatgagttgtatggatcatggacagactttgacaggtttgataactatggaactgcaaaggaggtggtttcagaatggtcccaaatggaggaaatgaatgagaggctaaggttctttgttgaagaatgtgaccatatccagggtatccagtttcttgtggatgattctggaggctttgccagtgtagctgcacagtttttggagagtattgttgatgattacacaaatacccctgtaatgctgtattgtgtgcggaatccagactcctatgggtcttccagaaatcagtgtgaaaccatcataagatctttgcatgatgctgtatcgttgtcgaaactttcatactactgcaatctgatggtaccaataggactgccttctttaagttacttgtcacctttgctttctataaaagatgagaagcacttccactccagtgccatttgtgcagcagcaatgcattcattatctattccattcaggctacaacacgtgggcccggcctcagattcagcgcattcatctggtaagcttgatattggtgagcttgtgcacatattatctgatcaagggaggcagaacatgatcactgcgctggatgtagcaatgcctgccccttctttgacagatagaacagatttgaggaacatacagaggagcttgcattctctgacacctgaaatcagcgacgaggatgaagatccttacgctgttgaatccatggtggttcatggagtcctagatgcaggcgggaaaagggcttccatatctcaggtgaaggaatccatctgttcagcactggaaggcagggcgacgaaacccaagttctcccacctctcggtatcgcggtgccccctcccaatcccgctcccgttcccgtcaatcttcagcagcagtgttggccagcagggcgagatcctcggcaccagccacgcaggagcccggccaaagggtccgcttgccgtcggctcggtgccgatggcagcgcgcctgaggtcgagcagcgccatagcgccattcatcgagaggaggtcggcgagcctccagaggctcggtgtcgccaggggcacgctgggctcgcaggtcctccacgactggggcttcgggagggaggaggtcgaggacatggctgagcacctggcgaagatgttgcgcccgttttacccggaaatggacctgacgtcggattctgatgattaggtttcactgtcattgtgtctcgtattaccggatggtaagcagctgggttttagtctgtgggaactagaaattgtgatgcagatgcagctggcgtgagacgccgtgctgcgatgcattcctctggtctgtgttgaagggatgcagagtactggaaacgagatctgagagagcctgggcgtgtgaccgtgtcattcagcgctccgcatgtgatgcacatgcatttgggcgacgacgcggacgtccgccgccatgggcagttgttgttgtggtaacattgtgcaatgatccagccctgatgcagatgtccagatctgtgctgtacttacctgcaaaccacacagctaatgaaactaaagaacagtctttctggtctgagatgttttctttgttcgttttaacttcgcgagcaccagaactgtaaacctggcattttttctagtatgaaaaaatagcattatttggctcgacaaaccgcattgttcagttggatcttcatatcatcacagccagaacaagagggcaaatgcagcattcttgcatgtgttggggttccctgaaattttgtatggtagtgtcaccgtaattgatctctggaatatgtaatgtaaccccctctgttgtcgtgtgcatgaatttcttcagtctgtgcatcgctcgcacgcatgcacatggtcgcaactcgcaacattctgcgatctgatgttccagacaagctcaagatccagatcagatacccaaccaggccaccttttccaatttatttcctggggacaaaaagagaaaaggcttgtactgtatcactgttcttctcatatagtacaatgtatcggtatggtctca

SEQ ID NO: 2839 - DNA, 3065 bp, Zea Mays
caaaacgccgcccttggatgagccaatcttcctctcgcacggcccactccttacccccgtctcacaaaacgccgccgccgccgtcgacagccaactccccgcgcccccaccgcctccgcgcaccgccccacacctgattgcgcgtccagaggtattcagagctctctgctgtgggagcaacgagggcagggatgagggaggtggtgacggtgcaggtcggcggtttcgcgaacttcgtcggctcccacttttggaacttccaggatgagctgctcgggctcgccgacgaccccggcgccgacccggtattcaggaccgccgcgctcgacatggacgtcctgtaccgcgccggcgagacacaccagagcgtcgccagctactgccctcgcttggtatcagtcggttctcgagagggtctcttggctcgttaagttcctctggcactctaggttcgagcagtgcagctgcagatgagcccaacatcttcacatggtctggaaaggtaacaaaatcagtagcaaaacctcatgagcgaaacttgttcctacaaagtttatctgaagaagaacagaacccaagctctagcgatggccaaaacaatgctagtgttgaagataaggacctggtcgcaaatctggagaatggagtcaaattttggactgattattcaaaagttcagtatcaccctcagagcttatatgagttgtatggatcatggacagactttgacaggtttgataactatggaactgcaaaggaggtggtttcagaatggtcccaaatggaggaaatgaatgagaggctaaggttctttgttgaagaatgtgaccatatccagggtatccagtttcttgtggatgattctggaggctttgccagtgtagctgcacagtttttggagagtattgttgatgattacacaaatacccctgtaatgctgtattgtgtgcggaatccagactcctatgggtcttccagaaatcagtgtgaaaccatcataagatctttgcatgatgctgtatcgttgtcgaaactttcatactactgcaatctgatggtaccaataggactgccttctttaagtatgcttctgattgcttataatcttttacgtagactgccatataacatgtgattctcttatccattctccattgtagcatgttcgtatgtgcagatccttataattctactgaatgtacagtaaactcataattggacttgtgattctttttagtaatttgaggcttcttatagcagtgcttggaccttagttttgcaaatgtttcatttcctgatctttgatcataagctaaataaacattcagatgttgcattcttcacctcaaataactcacacacctactgttggcgaatgcaatgctcattctattataacccagccctatggttacttgtcacctttgctttctataaaagatgagaagcacttccactccagtgccatttgtgcagcagcaatgcattcattatctattccattcaggctacaacacgtgggcccggcctcagattcagcgcattcatctggtaagcttgatattggtgagcttgtgcacatattatctgatcaagggaggcagaacatgatcactgcgctggatgtagcaatgcctgccccttctttgacagatagaacagatttgaggaacatacagaggagcttgcattctctgacacctgaaatcagcgacgaggatgaagatccttacgctgttgaatccatggtggttcatggagtcctagatgcaggcgggaaaagggcttccatatctcaggtgaaggaatccatctgttcagcactggaaggcagggcgacgaaacccaagttctcccacctctcggtatcgcggtgccccctcccaatcccgctcccgttcccgtcaatcttcagcagcagtgttggccagcagggcgagatcctcggcaccagccacgcaggagcccggccaaagggtccgcttgccgtcggctcggtgccgatggcagcgcgcctgaggtcgagcagcgccatagcgccattcatcgagaggaggtcggcgagcctccagaggctcggtgtcgccaggggcacgctgggctcgcaggtcctccacgactggggcttcgggagggaggaggtcgaggacatggctgagcacctggcgaagatgttgcgcccgttttacccggaaatggacctgacgtcggattctgatgattaggtttcactgtcattgtgtctcgtattaccggatggtaagcagctgggttttagtctgtgggaactagaaattgtgatgcagatgcagctggcgtgagacgccgtgctgcgatgcattcctctggtctgtgttgaagggatgcagagtactggaaacgagatctgagagagcctgggcgtgtgaccgtgtcattcagcgctccgcatgtgatgcacatgcatttgggcgacgacgcggacgtccgccgccatgggcagttgttgttgtggtaacattgtgcaatgatccagccctgatgcagatgtccagatctgtgctgtacttacctgcaaaccacacagctaatgaaactaaagaacagtctttctggtctgagatgttttctttgttcgttttaacttcgcgagcaccagaactgtaaacctggcattttttctagtatgaaaaaatagcattatttggctcgacaaaccgcattgttcagttggatcttcatatcatcacagccagaacaagagggcaaatgcagcattcttgcatgtgttggggttccctgaaattttgtatggtagtgtcaccgtaattgatctctggaatatgtaatgtaaccccctctgttgtcgtgtgcatgaatttcttcagtctgtgcatcgctcgcacgcatgcacatggtcgcaactcgcaacattctgcgatctgatgttccagacaagctcaagatccagatcagatacccaaccaggccaccttttccaatttatttcctggggacaaaaagagaaaaggcttgtactgtatcactgttcttctcatatagtacaatgtatcggtatggtctca

SEQ ID NO: 2840 - DNA, 2711 bp, Zea Mays
caaaacgccgcccttggatgagccaatcttcctctcgcacggcccactccttacccccgtctcacaaaacgccgccgccgccgtcgacagccaactccccgcgcccccaccgcctccgcgcaccgccccacacctgattgcgcgtccagaggtattcagagctctctgctgtgggagcaacgagggcagggatgagggaggtggtgacggtgcaggtcggcggtttcgcgaacttcgtcggctcccacttttggaacttccaggatgagctgctcgggctcgccgacgaccccggcgccgacccggtattcaggaccgccgcgctcgacatggacgtcctgtaccgcgccggcgagacacaccagagcgtcgccagctactgccctcgcttggtatcagtcggttctcgaggggtctcttggctcgttaagttcctctggcactctaggttcgagcagtgcagctgcagatgagcccaacatcttcacatggtctggaaaggtaacaaaatcagtagcaaaacctcatgagcgaaacttgttcctacaaagtttatctgaagaagaacagaacccaagctctagcgatggccaaaacaatgctagtgttgaagataaggacctggtcgcaaatctggagaatggagtcaaattttggactgattattcaaaagttcagtatcaccctcagagcttatatgagttgtatggatcatggacagactttgacaggtttgataactatggaactgcaaaggaggtggtttcagaatggtcccaaatggaggaaatgaatgagaggctaaggttctttgttgaagaatgtgaccatatccagggtatccagtttcttgtggatgattctggaggctttgccagtgtagctgcacagtttttggagagtattgttgatgattacacaaatacccctgtaatgctgtattgtgtgcggaatccagactcctatgggtcttccagaaatcagtgtgaaaccatcataagatctttgcatgatgctgtatcgttgtcgaaactttcatactactgcaatctgatggttacttgtcacctttgctttctataaaagatgagaagcacttccactccagtgccatttgtgcagcagcaatgcattcattatctattccattcaggctacaacacgtgggcccggcctcagattcagcgcattcatctggtaagcttgatattggtgagcttgtgcacatattatctgatcaagggaggcagaacatgatcactgcgctggatgtagcaatgcctgccccttctttgacagatagaacagatttgaggaacatacagaggagcttgcattctctgacacctgaaatcagcgacgaggatgaagatccttacgctgttgaatccatggtggttcatggagtcctagatgcaggcgggaaaagggcttccatatctcaggtgaaggaatccatctgttcagcactggaaggcagggcgacgaaacccaagttctcccacctctcggtatcgcggtgccccctcccaatcccgctcccgttcccgtcaatcttcagcagcagtgttggccagcagggcgagatcctcggcaccagccacgcaggagcccggccaaagggtccgcttgccgtcggctcggtgccgatggcagcgcgcctgaggtcgagcagcgccatagcgccattcatcgagaggaggtcggcgagcctccagaggctcggtgtcgccaggggcacgctgggctcgcaggtcctccacgactggggcttcgggagggaggaggtcgaggacatggctgagcacctggcgaagatgttgcgcccgttttacccggaaatggacctgacgtcggattctgatgattaggtttcactgtcattgtgtctcgtattaccggatggtaagcagctgggttttagtctgtgggaactagaaattgtgatgcagatgcagctggcgtgagacgccgtgctgcgatgcattcctctggtctgtgttgaagggatgcagagtactggaaacgagatctgagagagcctgggcgtgtgaccgtgtcattcagcgctccgcatgtgatgcacatgcatttgggcgacgacgcggacgtccgccgccatgggcagttgttgttgtggtaacattgtgcaatgatccagccctgatgcagatgtccagatctgtgctgtacttacctgcaaaccacacagctaatgaaactaaagaacagtctttctggtctgagatgttttctttgttcgttttaacttcgcgagcaccagaactgtaaacctggcattttttctagtatgaaaaaatagcattatttggctcgacaaaccgcattgttcagttggatcttcatatcatcacagccagaacaagagggcaaatgcagcattcttgcatgtgttggggttccctgaaattttgtatggtagtgtcaccgtaattgatctctggaatatgtaatgtaaccccctctgttgtcgtgtgcatgaatttcttcagtctgtgcatcgctcgcacgcatgcacatggtcgcaactcgcaacattctgcgatctgatgttccagacaagctcaagatccagatcagatacccaaccaggccaccttttccaatttatttcctggggacaaaaagagaaaaggcttgtactgtatcactgttcttctcatatagtacaatgtatcggtatggtctca

SEQ ID NO: 2841 - DNA, 2712 bp, Zea Mays
caaaacgccgcccttggatgagccaatcttcctctcgcacggcccactccttacccccgtctcacaaaacgccgccgccgccgtcgacagccaactccccgcgcccccaccgcctccgcgcaccgccccacacctgattgcgcgtccagaggtattcagagctctctgctgtgggagcaacgagggcagggatgagggaggtggtgacggtgcaggtcggcggtttcgcgaacttcgtcggctcccacttttggaacttccaggatgagctgctcgggctcgccgacgaccccggcgccgacccggtattcaggaccgccgcgctcgacatggacgtcctgtaccgcgccggcgagacacaccagagcgtcgccagctactgccctcgcttggtatcagtcggttctcgagagggtctcttggctcgttaagttcctctggcactctaggttcgagcagtgcagctgcagatgagcccaacatcttcacatggtctggaaaggtaacaaaatcagtagcaaaacctcatgagcgaaacttgttcctacaaagtttatctgaagaagaacagaacccaagctctagcgatggccaaaacaatgctagtgttgaagataaggacctggtcgcaaatctggagaatggagtcaaattttggactgattattcaaaagttcagtatcaccctcagagcttatatgagttgtatggatcatggacagactttgacaggtttgataactatggaactgcaaaggaggtggtttcagaatggtcccaaatggaggaaatgaatgagaggctaaggttctttgttgaagaatgtgaccatatccagggtatccagtttcttgtggatgattctggaggctttgccagtgtagctgcacagtttttggagagtattgttgatgattacacaaatacccctgtaatgctgtattgtgtgcggaatccagactcctatgggtcttccagaaatcagtgtgaaaccatcataagatctttgcatgatgctgtatcgttgtcgaaactttcatactactgcaatctgatggttacttgtcacctttgctttctataaaagatgagaagcacttccactccagtgccatttgtgcagcagcaatgcattcattatctattccattcaggctacaacacgtgggcccggcctcagattcagcgcattcatctggtaagcttgatattggtgagcttgtgcacatattatctgatcaagggaggcagaacatgatcactgcgctggatgtagcaatgcctgccccttctttgacagatagaacagatttgaggaacatacagaggagcttgcattctctgacacctgaaatcagcgacgaggatgaagatccttacgctgttgaatccatggtggttcatggagtcctagatgcaggcgggaaaagggcttccatatctcaggtgaaggaatccatctgttcagcactggaaggcagggcgacgaaacccaagttctcccacctctcggtatcgcggtgccccctcccaatcccgctcccgttcccgtcaatcttcagcagcagtgttggccagcagggcgagatcctcggcaccagccacgcaggagcccggccaaagggtccgcttgccgtcggctcggtgccgatggcagcgcgcctgaggtcgagcagcgccatagcgccattcatcgagaggaggtcggcgagcctccagaggctcggtgtcgccaggggcacgctgggctcgcaggtcctccacgactggggcttcgggagggaggaggtcgaggacatggctgagcacctggcgaagatgttgcgcccgttttacccggaaatggacctgacgtcggattctgatgattaggtttcactgtcattgtgtctcgtattaccggatggtaagcagctgggttttagtctgtgggaactagaaattgtgatgcagatgcagctggcgtgagacgccgtgctgcgatgcattcctctggtctgtgttgaagggatgcagagtactggaaacgagatctgagagagcctgggcgtgtgaccgtgtcattcagcgctccgcatgtgatgcacatgcatttgggcgacgacgcggacgtccgccgccatgggcagttgttgttgtggtaacattgtgcaatgatccagccctgatgcagatgtccagatctgtgctgtacttacctgcaaaccacacagctaatgaaactaaagaacagtctttctggtctgagatgttttctttgttcgttttaacttcgcgagcaccagaactgtaaacctggcattttttctagtatgaaaaaatagcattatttggctcgacaaaccgcattgttcagttggatcttcatatcatcacagccagaacaagagggcaaatgcagcattcttgcatgtgttggggttccctgaaattttgtatggtagtgtcaccgtaattgatctctggaatatgtaatgtaaccccctctgttgtcgtgtgcatgaatttcttcagtctgtgcatcgctcgcacgcatgcacatggtcgcaactcgcaacattctgcgatctgatgttccagacaagctcaagatccagatcagatacccaaccaggccaccttttccaatttatttcctggggacaaaaagagaaaaggcttgtactgtatcactgttcttctcatatagtacaatgtatcggtatggtctca

SEQ ID NO: 2842 - DNA, 2714 bp, Zea Mays
caaaacgccgcccttggatgagccaatcttcctctcgcacggcccactccttacccccgtctcacaaaacgccgccgccgccgtcgacagccaactccccgcgcccccaccgcctccgcgcaccgccccacacctgattgcgcgtccagaggtattcagagctctctgctgtgggagcaacgagggcagggatgagggaggtggtgacggtgcaggtcggcggtttcgcgaacttcgtcggctcccacttttggaacttccaggatgagctgctcgggctcgccgacgaccccggcgccgacccggtattcaggaccgccgcgctcgacatggacgtcctgtaccgcgccggcgagacacaccagagcgtcgccagctactgccctcgcttggtatcagtcggttctcgagggtctcttggctcgttaagttcctctggcactctaggttcgagcagtgcagctgcagatgagcccaacatcttcacatggcaagtctggaaaggtaacaaaatcagtagcaaaacctcatgagcgaaacttgttcctacaaagtttatctgaagaagaacagaacccaagctctagcgatggccaaaacaatgctagtgttgaagataaggacctggtcgcaaatctggagaatggagtcaaattttggactgattattcaaaagttcagtatcaccctcagagcttatatgagttgtatggatcatggacagactttgacaggtttgataactatggaactgcaaaggaggtggtttcagaatggtcccaaatggaggaaatgaatgagaggctaaggttctttgttgaagaatgtgaccatatccagggtatccagtttcttgtggatgattctggaggctttgccagtgtagctgcacagtttttggagagtattgttgatgattacacaaatacccctgtaatgctgtattgtgtgcggaatccagactcctatgggtcttccagaaatcagtgtgaaaccatcataagatctttgcatgatgctgtatcgttgtcgaaactttcatactactgcaatctgatggttacttgtcacctttgctttctataaaagatgagaagcacttccactccagtgccatttgtgcagcagcaatgcattcattatctattccattcaggctacaacacgtgggcccggcctcagattcagcgcattcatctggtaagcttgatattggtgagcttgtgcacatattatctgatcaagggaggcagaacatgatcactgcgctggatgtagcaatgcctgccccttctttgacagatagaacagatttgaggaacatacagaggagcttgcattctctgacacctgaaatcagcgacgaggatgaagatccttacgctgttgaatccatggtggttcatggagtcctagatgcaggcgggaaaagggcttccatatctcaggtgaaggaatccatctgttcagcactggaaggcagggcgacgaaacccaagttctcccacctctcggtatcgcggtgccccctcccaatcccgctcccgttcccgtcaatcttcagcagcagtgttggccagcagggcgagatcctcggcaccagccacgcaggagcccggccaaagggtccgcttgccgtcggctcggtgccgatggcagcgcgcctgaggtcgagcagcgccatagcgccattcatcgagaggaggtcggcgagcctccagaggctcggtgtcgccaggggcacgctgggctcgcaggtcctccacgactggggcttcgggagggaggaggtcgaggacatggctgagcacctggcgaagatgttgcgcccgttttacccggaaatggacctgacgtcggattctgatgattaggtttcactgtcattgtgtctcgtattaccggatggtaagcagctgggttttagtctgtgggaactagaaattgtgatgcagatgcagctggcgtgagacgccgtgctgcgatgcattcctctggtctgtgttgaagggatgcagagtactggaaacgagatctgagagagcctgggcgtgtgaccgtgtcattcagcgctccgcatgtgatgcacatgcatttgggcgacgacgcggacgtccgccgccatgggcagttgttgttgtggtaacattgtgcaatgatccagccctgatgcagatgtccagatctgtgctgtacttacctgcaaaccacacagctaatgaaactaaagaacagtctttctggtctgagatgttttctttgttcgttttaacttcgcgagcaccagaactgtaaacctggcattttttctagtatgaaaaaatagcattatttggctcgacaaaccgcattgttcagttggatcttcatatcatcacagccagaacaagagggcaaatgcagcattcttgcatgtgttggggttccctgaaattttgtatggtagtgtcaccgtaattgatctctggaatatgtaatgtaaccccctctgttgtcgtgtgcatgaatttcttcagtctgtgcatcgctcgcacgcatgcacatggtcgcaactcgcaacattctgcgatctgatgttccagacaagctcaagatccagatcagatacccaaccaggccaccttttccaatttatttcctggggacaaaaagagaaaaggcttgtactgtatcactgttcttctcatatagtacaatgtatcggtatggtctca

SEQ ID NO: 2843 - DNA, 2338 bp, Zea Mays
cagctactgccctcgcttggtatcagtcggttctcgaggggtctcttggctcgttaagttcctctggcactctaggttcgagcagtgcagctgcagatgagcccaacatcttcacatggtctggaaaggtaacaaaatcagtagcaaaacctcatgagcgaaacttgttcctacaaagtttatctgaagaagaacagaacccaagctctagcgatggccaaaacaatgctagtgttgaagataaggacctggtcgcaaatctggagaatggagtcaaattttggactgattattcaaaagttcagtatcaccctcagagcttatatgagttgtatggatcatggacagactttgacaggtttgataactatggaactgcaaaggaggtggtttcagaatggtcccaaatggaggaaatgaatgagaggctaaggttctttgttgaagaatgtgaccatatccagggtatccagtttcttgtggatgattctggaggctttgccagtgtagctgcacagtttttggagagtattgttgatgattacacaaatacccctgtaatgctgtattgtgtgcggaatccagactcctatgggtcttccagaaatcagtgtgaaaccatcataagatctttgcatgatgctgtatcgttgtcgaaactttcatactactgcaatctgatggttacttgtcacctttgctttctataaaagatgagaagcacttccactccagtgccatttgtgcagcagcaatgcattcattatctattccattcaggctacaacacgtgggcccggcctcagattcagcgcattcatctggtaagcttgatattggtgagcttgtgcacatattatctgatcaagggaggcagaacatgatcactgcgctggatgtagcaatgcctgccccttctttgacagatagaacagatttgaggaacatacagaggagcttgcattctctgacacctgaaatcagcgacgaggatgaagatccttacgctgttgaatccatggtggttcatggagtcctagatgcaggcgggaaaagggcttccatatctcaggtgaaggaatccatctgttcagcactggaaggcagggcgacgaaacccaagttctcccacctctcggtatcgcggtgccccctcccaatcccgctcccgttcccgtcaatcttcagcagcagtgttggccagcagggcgagatcctcggcaccagccacgcaggagcccggccaaagggtccgcttgccgtcggctcggtgccgatggcagcgcgcctgaggtcgagcagcgccatagcgccattcatcgagaggaggtcggcgagcctccagaggctcggtgtcgccaggggcacgctgggctcgcaggtcctccacgactggggcttcgggagggaggaggtcgaggacatggctgagcacctggcgaagatgttgcgcccgttttacccggaaatggacctgacgtcggattctgatgattaggtttcactgtcattgtgtctcgtattaccggatggtaagcagctgggttttagtctgtgggaactagaaattgtgatgcagatgcagctggcgtgagacgccgtgctgcgatgcattcctctggtctgtgttgaagggatgcagagtactggaaacgagatctgagagagcctgggcgtgtgaccgtgtcattcagcgctccgcatgtgatgcacatgcatttgggcgacgacgcggacgtccgccgccatgggcagttgttgttgtggtaacattgtgcaatgatccagccctgatgcagatgtccagatctgtgctgtacttacctgcaaaccacacagctaatgaaactaaagaacagtctttctggtctgagatgttttctttgttcgttttaacttcgcgagcaccagaactgtaaacctggcattttttctagtatgaaaaaatagcattatttggctcgacaaaccgcattgttcagttggatcttcatatcatcacagccagaacaagagggcaaatgcagcattcttgcatgtgttggggttccctgaaattttgtatggtagtgtcaccgtaattgatctctggaatatgtaatgtaaccccctctgttgtcgtgtgcatgaatttcttcagtctgtgcatcgctcgcacgcatgcacatggtcgcaactcgcaacattctgcgatctgatgttccagacaagctcaagatccagatcagatacccaaccaggccaccttttccaatttatttcctggggacaaaaagagaaaaggcttgtactgtatcactgttcttctcatatagtacaatgtatcggtatggtctca

SEQ ID NO: 2844 - DNA, 2414 bp, Zea Mays
ctgccctcgcttggtatcagtcggttctcgaggggtctcttggctcgttaagttcctctggcactctaggttcgagcagtgcagctgcagatgagcccaacatcttcacatggtctggaaaggtaacaaaatcagtagcaaaacctcatgagcgaaacttgttcctacaaagtttatctgaagaagaacagaacccaagctctagcgatggccaaaacaatgctagtgttgaagataaggacctggtcgcaaatctggagaatggagtcaaattttggactgattattcaaaagttcagtatcaccctcagagcttatatgagttgtatggatcatggacagactttgacaggtttgataactatggaactgcaaaggaggtggtttcagaatggtcccaaatggaggaaatgaatgagaggctaaggttctttgttgaagaatgtgaccatatccagggtatccagtttcttgtggatgattctggaggctttgccagtgtagctgcacagtttttggagagtattgttgatgattacacaaatacccctgtaatgctgtattgtgtgcggaatccagactcctatgggtcttccagaaatcagtgtgaaaccatcataagatctttgcatgatgctgtatcgttgtcgaaactttcatactactgcaatctgatgatgttgcattcttcacctcaaataactcacacacctactgttggcgaatgcaatgctcattctattataacccagccctatggttacttgtcacctttgctttctataaaagatgagaagcacttccactccagtgccatttgtgcagcagcaatgcattcattatctattccattcaggctacaacacgtgggcccggcctcagattcagcgcattcatctggtaagcttgatattggtgagcttgtgcacatattatctgatcaagggaggcagaacatgatcactgcgctggatgtagcaatgcctgccccttctttgacagatagaacagatttgaggaacatacagaggagcttgcattctctgacacctgaaatcagcgacgaggatgaagatccttacgctgttgaatccatggtggttcatggagtcctagatgcaggcgggaaaagggcttccatatctcaggtgaaggaatccatctgttcagcactggaaggcagggcgacgaaacccaagttctcccacctctcggtatcgcggtgccccctcccaatcccgctcccgttcccgtcaatcttcagcagcagtgttggccagcagggcgagatcctcggcaccagccacgcaggagcccggccaaagggtccgcttgccgtcggctcggtgccgatggcagcgcgcctgaggtcgagcagcgccatagcgccattcatcgagaggaggtcggcgagcctccagaggctcggtgtcgccaggggcacgctgggctcgcaggtcctccacgactggggcttcgggagggaggaggtcgaggacatggctgagcacctggcgaagatgttgcgcccgttttacccggaaatggacctgacgtcggattctgatgattaggtttcactgtcattgtgtctcgtattaccggatggtaagcagctgggttttagtctgtgggaactagaaattgtgatgcagatgcagctggcgtgagacgccgtgctgcgatgcattcctctggtctgtgttgaagggatgcagagtactggaaacgagatctgagagagcctgggcgtgtgaccgtgtcattcagcgctccgcatgtgatgcacatgcatttgggcgacgacgcggacgtccgccgccatgggcagttgttgttgtggtaacattgtgcaatgatccagccctgatgcagatgtccagatctgtgctgtacttacctgcaaaccacacagctaatgaaactaaagaacagtctttctggtctgagatgttttctttgttcgttttaacttcgcgagcaccagaactgtaaacctggcattttttctagtatgaaaaaatagcattatttggctcgacaaaccgcattgttcagttggatcttcatatcatcacagccagaacaagagggcaaatgcagcattcttgcatgtgttggggttccctgaaattttgtatggtagtgtcaccgtaattgatctctggaatatgtaatgtaaccccctctgttgtcgtgtgcatgaatttcttcagtctgtgcatcgctcgcacgcatgcacatggtcgcaactcgcaacattctgcgatctgatgttccagacaagctcaagatccagatcagatacccaaccaggccaccttttccaatttatttcctggggacaaaaagagaaaaggcttgtactgtatcactgttcttctcatatagtacaatgtatcggtatggtctca

SEQ ID NO: 2845 - DNA, 4074 bp, Zea Mays
ttttgtggattggatgatataatgatgaaacccataaataataatgataaaattacaaatgactcatttattaatataacagctgatcggacgataattactgcaggcaggaaccactggagacgagggactgacgactctcgccggcgccgcgacatcgacttgtgtcgtcaccctcccaccccaatttccccgcagcttccttccagtgtcgctgccgcagtcatcactctgcagtcagtctgcacccctccctccctccctccttccctccctgcctgttggccgcggctcgcgggaaccaacaccccatcgccacgccgatcccccaccgaccagccaagccgctacaagtcagccgtgccccgcacgcgtgcacctgattggtgcttggccggccggctgacccacccggggcggaaggaggaaggaaggaccggagaagctgcttccttgccgtcgcccagggggacagggtaagcaaaggagcgggatggagagctacctggaggagcggttcggcggtgtgcaggccaagaactcctccgaggaggcgctccgccgctggcgccgcctctgcagcgtcgtcaagaaccccaagcgccgcttccgcttcacggccaacctcgagaagcgcggcgaggccgaggccatcaagcacgccaaccacgagaagctgcgtgtcgctgtgctcgtctcaaaggctgcactgcagtttctacatggcctcacccttcgaagcgagtacgtcgtccctgaggaagtcaaggctgcagggtttcagatctgtgccgacgagctggggtctattgttgagggtcatgatagtaagaagctcatcacccaaggtggagttgatggaattgcggaaaaacttgcaacttcgaagacggatgggctaagcacagccgatgatagtattaagcgcaggcaagacatatatggagtaaacaggttcacagaaagtgaggtccgtagtttctgggtgtttgtatgggaagcgcttcaagatacaactcttataattcttgctgtctgtgcgttcgtatcgctggttgttggcattgtggtggaagggtggccaaaaggtgctcatgatggtcttggaattgttgcaagtatcctcttggttgtgtttgtcactgcaacaagtgactaccggcagtcactgcagttcaaggacctggacaaggagaaaaagaaaatccatgtacaggttacaaggaatggttttaggcaaaggctatcgatatatgatcttcttcctggtgatgttgtccatttagcaattggggatcaggtccctgcagatgggctcttcatttatggattctctctgttgatcaatgagtccagcctaactggtgaaagtgaacctgttgctgtaaatgaagataaccctttccttttgtctgggaccaaagtacaagatggctcctgcaagatgctggtaacaactgttggcatgcgcacccaatggggaaaactgatggccactctcagtgaaggcggcgatgatgaaaccccactgcaagtcaaacttaatggagttgcaactattattggccagattggattattttttgctgttataactttcattgtcctgtcgcaagggctattcagcaagaaataccatgagcagatgcttttaagctggtcaggagatgatgcattggagctgctggagcattttgctattgcagttactattgttgttgttgctgttcccgagggattgccgttagcagtcacgctgagtcttgcatttgccatgaagaaaatgatgaatgacaaggcacttgttcgccacttagctgcatgtgagactatgggttcggctactaccatctgcagtgacaagacaggaacactgacaactaatcatatggccgttgttaaggcctgcatctgtggaaacatcaaggaagttaatggttctcagaatgcatccaagttacgctctgagcttccagagattgttattaaaactcttttggagtctatatttaacaatacaggtggtgaggttgtaattaaccaggatggtaaatatcagatcctgggtacccccacggagacagctttactagagtttgcattgtcactaggcggagattttaaggcaaaacgtgatgaaactaagattgtgaaagtggagcctttcaattcaacaaaaaagaggatgagtgtcattcttgagcttccaggaggaggatgccgtgcacactgtaaaggtgcttcagagatagtcttggctgcctgtgataaattcgtagatgagacaggtggtgttcatcctctggataaaataactgctgacaagctcaatggtattattgatagttttgctggtgaagctcttagaacattatgccttgcttataaggatatggaagaaggtttttccaacgcagaccatataccgctacaagggtacacatgcattggaattataggtataaaagatcctgtccgcccaggggtgaaggagtctgttgctacttgccgggctgctggaattatggtgagaatggtcacaggagataacataaatacagcgaaggcaattgctcgtgaatgtggtatacttactgaagatggcatagctattgaaggaccagagttcagagagaaaagcctagctgaactccttgaactggttccaaaaatacaggtaatggcccgatcatcaccacttgacaagcatacacttgtaaagcatttgcgcacaacattcaatgatgttgttgctgttactggtgatggaacaaatgatgctcctgcattgcatgaagcagatattggacttgcaatgggcattgctgggactgaggtggcaaaagagagcgctgatgttataattctggacgacaacttctccacgattgtaactgttgccaagtggggacgatctgtttacatcaatattcaaaagtttgtgcagtttcagctgactgtcaatgtagtggcactgctagtgaacttctcttcagcctgctttacaggaaatgcaccactaacagctgttcagcttctttgggttaacatgatcatggacacccttggcgcgcttgccttagccacggagccacctaatgatgacttgatgaagagagagccagtaggaaggacagggaaattcattacaaatgtgatgtggaggaacattcttggtcagtctttctaccagttctttgtgatgtggtatctccaaacgcaagggaaaaatttctttgggcttgaaggctctggtactgatattgttctgaatacgataattttcaactcattcgtcttctgtcaggtgttcaatgaaataagctctcgggagatggagaagatcaacgtgctcaagggcatgacaaggaactacgtgttcatggctgtcctcagcagcacggtgatcttccagttcatcatggtgcagtttctaggagagttcgccaacacgacgcccctgaccatacaccagtggctagccagcgtgctcctcggtctggccgggatgcccatcgctgccgccgtcaagctgatcccagtcggctcgtcatgataccattgaagattgctgctgcctgggatgggaagcacggcatgaaaagcgtcaggctgtccaagctgcatggtattcggtggagctgagctctctctctgtctctctgtgtgcgtaaacttttggaatgcacggagggcaggctagggaaatggagcagccgctgcagtttgagaagttttgtagcctggaaatgtggctagattgcctcggacctgtaagaaacatcgtgtttgttggcgccgggaaaaaagcagctagctgtggtggtggtgcagcagagttgttagattgacttcgaaatggaatttagactgcaggatatttatggtggatgaatggacggaaaacatggttcgttggttatttttactcttgcttattagagctctggtttggtctttttaccttagtagttgaaaaagagtaaaatttagcatcgggtcgtcgaagccaaagttgtcttgaaggcgtcatttatgtctacaaaaaaaacgtaaaatgtatttttgggctcc

SEQ ID NO: 2846 - DNA, 3895 bp, Zea Mays
ttttgtggattggatgatataatgatgaaacccataaataataatgataaaattacaaatgactcatttattaatataacagctgatcggacgataattactgcaggcaggaaccactggagacgagggactgacgactctcgccggcgccgcgacatcgacttgtgtcgtcaccctcccaccccaatttccccgcagcttccttccagtgtcgctgccgcagtcatcactctgcagtcagtctgcacccctccctccctccctccttccctccctgcctgttggccgcggctcgcgggaaccaacaccccatcgccacgccgatcccccaccgaccagccaagccgctacaagtcagccgtgccccgcacgcgtgcacctgattggtgcttggccggccggctgacccacccggggcggaaggaggaaggaaggaccggagaagctgcttccttgccgtcgcccagggggacagggtaagcaaaggagcgggatggagagctacctggaggagcggttcggcggtgtgcaggccaagaactcctccgaggaggcgctccgccgctggcgccgcctctgcagcgtcgtcaagaaccccaagcgccgcttccgcttcacggccaacctcgagaagcgcggcgaggccgaggccatcaagcacgccaaccacgcctcacccttcgaagcgagtacgtcgtccctgaggaagtcaaggctgcagggtttcagatctgtgccgacgagctggggtctattgttgagggtcatgatagtaagaagctcatcacccaaggtggagttgatggaattgcggaaaaacttgcaacttcgaagacggatgggctaagcacagccgatgatagtattaagcgcaggcaagacatatatggagtaaacaggttcacagaaagtgaggtccgtagtttctgggtgtttgtatgggaagcgcttcaagatacaactcttataattcttgctgtctgtgcgttcgtatcgctggttgttggcattgtggtggaagggtggccaaaaggtgctcatgatggtcttggaattgttgcaagtatcctcttggttgtgtttgtcactgcaacaagtgactaccggcagtcactgcagttcaaggacctggacaaggagaaaaagaaaatccatgtacaggttacaaggaatggttttaggcaaaggctatcgatatatgatcttcttcctggtgatgttgtccatttagcaattggggatcaggtccctgcagatgggctcttcatttatggattctctctgttgatcaatgagtccagcctaactggtgaaagtgaacctgttgctgtaaatgaagataaccctttccttttgtctgggaccaaagtacaagatggctcctgcaagatgctggtaacaactgttggcatgcgcacccaatggggaaaactgatggccactctcagtgaaggcggcgatgatgaaaccccactgcaagtcaaacttaatggagttgcaactattattggccagattggattattttttgctgttataactttcattgtcctgtcgcaagggctattcagcaagaaataccatgagcagatgcttttaagctggtcaggagatgatgcattggagctgctggagcattttgctattgcagttactattgttgttgttgctgttcccgagggattgccgttagcagtcacgctgagtcttgcatttgccatgaagaaaatgatgaatgacaaggcacttgttcgccacttagctgcatgtgagactatgggttcggctactaccatctgcagtgacaagacaggaacactgacaactaatcatatggccgttgttaaggcctgcatctgtggaaacatcaaggaagttaatggttctcagaatgcatccaagttacgctctgagcttccagagattgttattaaaactcttttggagtctatatttaacaatacaggtggtgaggttgtaattaaccaggatggtaaatatcagatcctgggtacccccacggagacagctttactagagtttgcattgtcactaggcggagattttaaggcaaaacgtgatgaaactaagattgtgaaagtggagcctttcaattcaacaaaaaagaggatgagtgtcattcttgagcttccaggaggaggatgccgtgcacactgtaaaggtgcttcagagatagtcttggctgcctgtgataaattcgtagatgagacaggtggtgttcatcctctggataaaataactgctgacaagctcaatggtattattgatagttttgctggtgaagctcttagaacattatgccttgcttataaggatatggaagaaggtttttccaacgcagaccatataccgctacaagggtacacatgcattggaattataggtataaaagatcctgtccgcccaggggtgaaggagtctgttgctacttgccgggctgctggaattatggtgagaatggtcacaggagataacataaatacagcgaaggcaattgctcgtgaatgtggtatacttactgaagatggcatagctattgaaggaccagagttcagagagaaaagcctagctgaactccttgaactggttccaaaaatacagatattggacttgcaatgggcattgctgggactgaggtggcaaaagagagcgctgatgttataattctggacgacaacttctccacgattgtaactgttgccaagtggggacgatctgtttacatcaatattcaaaagtttgtgcagtttcagctgactgtcaatgtagtggcactgctagtgaacttctcttcagcctgctttacaggaaatgcaccactaacagctgttcagcttctttgggttaacatgatcatggacacccttggcgcgcttgccttagccacggagccacctaatgatgacttgatgaagagagagccagtaggaaggacagggaaattcattacaaatgtgatgtggaggaacattcttggtcagtctttctaccagttctttgtgatgtggtatctccaaacgcaagggaaaaatttctttgggcttgaaggctctggtactgatattgttctgaatacgataattttcaactcattcgtcttctgtcaggtgttcaatgaaataagctctcgggagatggagaagatcaacgtgctcaagggcatgacaaggaactacgtgttcatggctgtcctcagcagcacggtgatcttccagttcatcatggtgcagtttctaggagagttcgccaacacgacgcccctgaccatacaccagtggctagccagcgtgctcctcggtctggccgggatgcccatcgctgccgccgtcaagctgatcccagtcggctcgtcatgataccattgaagattgctgctgcctgggatgggaagcacggcatgaaaagcgtcaggctgtccaagctgcatggtattcggtggagctgagctctctctctgtctctctgtgtgcgtaaacttttggaatgcacggagggcaggctagggaaatggagcagccgctgcagtttgagaagttttgtagcctggaaatgtggctagattgcctcggacctgtaagaaacatcgtgtttgttggcgccgggaaaaaagcagctagctgtggtggtggtgcagcagagttgttagattgacttcgaaatggaatttagactgcaggatatttatggtggatgaatggacggaaaacatggttcgttggttatttttactcttgcttattagagctctggtttggtctttttaccttagtagttgaaaaagagtaaaatttagcatcgggtcgtcgaagccaaagttgtcttgaaggcgtcatttatgtctacaaaaaaaacgtaaaatgtatttttgggctcc

SEQ ID NO: 2847 - DNA, 3943 bp, Zea Mays
ttttgtggattggatgatataatgatgaaacccataaataataatgataaaattacaaatgactcatttattaatataacagctgatcggacgataattactgcaggcaggaaccactggagacgagggactgacgactctcgccggcgccgcgacatcgacttgtgtcgtcaccctcccaccccaatttccccgcagcttccttccagtgtcgctgccgcagtcatcactctgcagtcagtctgcacccctccctccctccctccttccctccctgcctgttggccgcggctcgcgggaaccaacaccccatcgccacgccgatcccccaccgaccagccaagccgctacaagtcagccgtgccccgcacgcgtgcacctgattggtgcttggccggccggctgacccacccggggcggaaggaggaaggaaggaccggagaagctgcttccttgccgtcgcccagggggacagggtaagcaaaggagcgggatggagagctacctggaggagcggttcggcggtgtgcaggccaagaactcctccgaggaggcgctccgccgctggcgccgcctctgcagcgtcgtcaagaaccccaagcgccgcttccgcttcacggccaacctcgagaagcgcggcgaggccgaggccatcaagcacgccaaccacgagaagctgcgtgtcgctgtgctcgtctcaaaggctgcactgcagtttctacatggcctcacccttcgaagcgagtacgtcgtccctgaggaagtcaaggctgcagggtttcagatctgtgccgacgagctggggtctattgttgagggtcatgatagtaagaagctcatcacccaaggtggagttgatggaattgcggaaaaacttgcaacttcgaagacggatgggctaagcacagccgatgatagtattaagcgcaggcaagacatatatggagtaaacaggttcacagaaagtgaggtccgtagtttctgggtgtttgtatgggaagcgcttcaagatacaactcttataattcttgctgtctgtgcgttcgtatcgctggttgttggcattgtggtggaagggtggccaaaaggtgctcatgatggtcttggaattgttgcaagtatcctcttggttgtgtttgtcactgcaacaagtgactaccggcagtcactgcagttcaaggacctggacaaggagaaaaagaaaatccatgtacaggttacaaggaatggttttaggcaaaggctatcgatatatgatcttcttcctggtgatgttgtccatttagcaattggggatcaggtccctgcagatgggctcttcatttatggattctctctgttgatcaatgagtccagcctaactggtgaaagtgaacctgttgctgtaaatgaagataaccctttccttttgtctgggaccaaagtacaagatggctcctgcaagatgctggtaacaactgttggcatgcgcacccaatggggaaaactgatggccactctcagtgaaggcggcgatgatgaaaccccactgcaagtcaaacttaatggagttgcaactattattggccagattggattattttttgctgttataactttcattgtcctgtcgcaagggctattcagcaagaaataccatgagcagatgcttttaagctggtcaggagatgatgcattggagctgctggagcattttgctattgcagttactattgttgttgttgctgttcccgagggattgccgttagcagtcacgctgagtcttgcatttgccatgaagaaaatgatgaatgacaaggcacttgttcgccacttagctgcatgtgagactatgggttcggctactaccatctgcagtgacaagacaggaacactgacaactaatcatatggccgttgttaaggcctgcatctgtggaaacatcaaggaagttaatggttctcagaatgcatccaagttacgctctgagcttccagagattgttattaaaactcttttggagtctatatttaacaatacaggtggtgaggttgtaattaaccaggatggtaaatatcagatcctgggtacccccacggagacagctttactagagtttgcattgtcactaggcggagattttaaggcaaaacgtgatgaaactaagattgtgaaagtggagcctttcaattcaacaaaaaagaggatgagtgtcattcttgagcttccaggaggaggatgccgtgcacactgtaaaggtgcttcagagatagtcttggctgcctgtgataaattcgtagatgagacaggtggtgttcatcctctggataaaataactgctgacaagctcaatggtattattgatagttttgctggtgaagctcttagaacattatgccttgcttataaggatatggaagaaggtttttccaacgcagaccatataccgctacaagggtacacatgcattggaattataggtataaaagatcctgtccgcccaggggtgaaggagtctgttgctacttgccgggctgctggaattatggtgagaatggtcacaggagataacataaatacagcgaaggcaattgctcgtgaatgtggtatacttactgaagatggcatagctattgaaggaccagagttcagagagaaaagcctagctgaactccttgaactggttccaaaaatacaggtaatggcccgatcatcaccacttgacaagcatacacttgtaaagcatttgcgcacaacattcaatgatgttgttgctgttactggtgatggaacaaatgatgctcctgcattgcatgaagcagatattggacttgcaatgggcattgctgggactgaggtggcaaaagagagcgctgatgttataattctggacgacaacttctccacgattgtaactgttgccaagtggggacgatctgtttacatcaatattcaaaagtttgtgcagtttcagctgactgtcaatgtagtggcactgctagtgaacttctcttcagcctgctttacaggaaatgcaccactaacagctgttcagcttctttgggttaacatgatcatggacacccttggcgcgcttgccttagccacggagccacctaatgatgacttgatgaagagagagccagtaggaaggacagggaaattcattacaaatgtgatgtggaggaacattcttggtgttcaatgaaataagctctcgggagatggagaagatcaacgtgctcaagggcatgacaaggaactacgtgttcatggctgtcctcagcagcacggtgatcttccagttcatcatggtgcagtttctaggagagttcgccaacacgacgcccctgaccatacaccagtggctagccagcgtgctcctcggtctggccgggatgcccatcgctgccgccgtcaagctgatcccagtcggctcgtcatgataccattgaagattgctgctgcctgggatgggaagcacggcatgaaaagcgtcaggctgtccaagctgcatggtattcggtggagctgagctctctctctgtctctctgtgtgcgtaaacttttggaatgcacggagggcaggctagggaaatggagcagccgctgcagtttgagaagttttgtagcctggaaatgtggctagattgcctcggacctgtaagaaacatcgtgtttgttggcgccgggaaaaaagcagctagctgtggtggtggtgcagcagagttgttagattgacttcgaaatggaatttagactgcaggatatttatggtggatgaatggacggaaaacatggttcgttggttatttttactcttgcttattagagctctggtttggtctttttaccttagtagttgaaaaagagtaaaatttagcatcgggtcgtcgaagccaaagttgtcttgaaggcgtcatttatgtctacaaaaaaaacgtaaaatgtatttttgggctcc

SEQ ID NO: 2848 - DNA, 4275 bp, Zea Mays
ttttgtggattggatgatataatgatgaaacccataaataataatgataaaattacaaatgactcatttattaatataacagctgatcggacgataattactgcaggcaggaaccactggagacgagggactgacgactctcgccggcgccgcgacatcgacttgtgtcgtcaccctcccaccccaatttccccgcagcttccttccagtgtcgctgccgcagtcatcactctgcagtcagtctgcacccctccctccctccctccttccctccctgcctgttggccgcggctcgcgggaaccaacaccccatcgccacgccgatcccccaccgaccagccaagccgctacaagtcagccgtgccccgcacgcgtgcacctgattggtgcttggccggccggctgacccacccggggcggaaggaggaaggaaggaccggagaagctgcttccttgccgtcgcccagggggacagggtaagcaaaggagcgggatggagagctacctggaggagcggttcggcggtgtgcaggccaagaactcctccgaggaggcgctccgccgctggcgccgcctctgcagcgtcgtcaagaaccccaagcgccgcttccgcttcacggccaacctcgagaagcgcggcgaggccgaggccatcaagcacgccaaccacgagaagctgcgtgtcgctgtgctcgtctcaaaggctgcactgcagtttctacatggcctcacccttcgaagcgagtacgtcgtccctgaggaagtcaaggctgcagggtttcagatctgtgccgacgagctggggtctattgttgagggtcatgatagtaagaagctcatcacccaaggtggagttgatggaattgcggaaaaacttgcaacttcgaagacggatgggctaagcacagccgatgatagtattaagcgcaggcaagacatatatggagtaaacaggttcacagaaagtgaggtccgtagtttctgggtgtttgtatgggaagcgcttcaagatacaactcttataattcttgctgtctgtgcgttcgtatcgctggttgttggcattgtggtggaagggtggccaaaaggtgctcatgatggtcttggaattgttgcaagtatcctcttggttgtgtttgtcactgcaacaagtgactaccggcagtcactgcagttcaaggacctggacaaggagaaaaagaaaatccatgtacaggttacaaggaatggttttaggcaaaggctatcgatatatgatcttcttcctggtgatgttgtccatttagcaattggggatcaggtccctgcagatgggctcttcatttatggattctctctgttgatcaatgagtccagcctaactggtgaaagtgaacctgttgctgtaaatgaagataaccctttccttttgtctgggaccaaagtacaagatggctcctgcaagatgctggtaacaactgttggcatgcgcacccaatggggaaaactgatggccactctcagtgaaggcggcgatgatgaaaccccactgcaagtcaaacttaatggagttgcaactattattggccagattggattattttttgctgttataactttcattgtcctgtcgcaagggctattcagcaagaaataccatgagcagatgcttttaagctggtcaggagatgatgcattggagctgctggagcattttgctattgcagttactattgttgttgttgctgttcccgagggattgccgttagcagtcacgctgagtcttgcatttgccatgaagaaaatgatgaatgacaaggcacttgttcgccacttagctgcatgtgagactatgggttcggctactaccatctgcagtgacaagacaggaacactgacaactaatcatatggccgttgttaaggcctgcatctgtggaaacatcaaggaagttaatggttctcagaatgcatccaagttacgctctgagcttccagagattgttattaaaactcttttggagtctatatttaacaatacaggtggtgaggttgtaattaaccaggatggtaaatatcagatcctgggtacccccacggagacagctttactagagtttgcattgtcactaggcggagattttaaggcaaaacgtgatgaaactaagattgtgaaagtggagcctttcaattcaacaaaaaagaggatgagtgtcattcttgagcttccaggaggaggatgccgtgcacactgtaaaggtgcttcagagatagtcttggctgcctgtgataaattcgtagatgagacaggtggtgttcatcctctggataaaataactgctgacaagctcaatggtattattgatagttttgctggtgaagctcttagaacattatgccttgcttataaggatatggaagaaggtttttccaacgcagaccatataccgctacaagggtacacatgcattggaattataggtataaaagatcctgtccgcccaggggtgaaggagtctgttgctacttgccgggctgctggaattatggtgagaatggtcacaggagataacataaatacagcgaaggcaattgctcgtgaatgtggtatacttactgaagatggcatagctattgaaggaccagagttcagagagaaaagcctagctgaactccttgaactggttccaaaaatacaggtaatggcccgatcatcaccacttgacaagcatacacttgtaaagcatttgcgcacaacattcaatgatgttgttgctgttactggtgatggaacaaatgatgctcctgcattgcatgaagcagatattggacttgcaatgggcattgctgggactgaggtgtgaatgcttattgttaaggagaccaaatcaagtttattcagtaaagggcagatatgccatggtggcatgtactattgttctaaatagtacatgcaattatgatatgtccatcgtattgaacctgagtattgctaattttgtaccataacctgctatcatagccatgccatccagtggagctaatataatctttttcaggtggcaaaagagagcgctgatgttataattctggacgacaacttctccacgattgtaactgttgccaagtggggacgatctgtttacatcaatattcaaaagtttgtgcagtttcagctgactgtcaatgtagtggcactgctagtgaacttctcttcagcctgctttacaggaaatgcaccactaacagctgttcagcttctttgggttaacatgatcatggacacccttggcgcgcttgccttagccacggagccacctaatgatgacttgatgaagagagagccagtaggaaggacagggaaattcattacaaatgtgatgtggaggaacattcttggtcagtctttctaccagttctttgtgatgtggtatctccaaacgcaagggaaaaatttctttgggcttgaaggctctggtactgatattgttctgaatacgataattttcaactcattcgtcttctgtcaggtgttcaatgaaataagctctcgggagatggagaagatcaacgtgctcaagggcatgacaaggaactacgtgttcatggctgtcctcagcagcacggtgatcttccagttcatcatggtgcagtttctaggagagttcgccaacacgacgcccctgaccatacaccagtggctagccagcgtgctcctcggtctggccgggatgcccatcgctgccgccgtcaagctgatcccagtcggctcgtcatgataccattgaagattgctgctgcctgggatgggaagcacggcatgaaaagcgtcaggctgtccaagctgcatggtattcggtggagctgagctctctctctgtctctctgtgtgcgtaaacttttggaatgcacggagggcaggctagggaaatggagcagccgctgcagtttgagaagttttgtagcctggaaatgtggctagattgcctcggacctgtaagaaacatcgtgtttgttggcgccgggaaaaaagcagctagctgtggtggtggtgcagcagagttgttagattgacttcgaaatggaatttagactgcaggatatttatggtggatgaatggacggaaaacatggttcgttggttatttttactcttgcttattagagctctggtttggtctttttaccttagtagttgaaaaagagtaaaatttagcatcgggtcgtcgaagccaaagttgtcttgaaggcgtcatttatgtctacaaaaaaaacgtaaaatgtatttttgggctcc

SEQ ID NO: 2849 - DNA, 3804 bp, Zea Mays
atttgcttctcgcaccatttcacactgctgcgacaacacgcctttggatctgctctgttttagtgctgccagtttgggaaatatcagtctttttcactaattattattatgtgctaccttaattacctcccattttcagtaggttcttgcaactggctactatcaactccactcatagttaagactaattagaaccactgcagcaaccataaacttgaaccactttccattactctgctatcagatcctgaaccagtgcagcaacatgcctagttatgccctcccgtttttctgatttgagcagttaacctcgcaatccaactgggtggctgtcttaactctgttactaccgccaccaataccttcggttactcaagttaacactgctgctgtgtgacaggagaagctgcgtgtcgctgtgctcgtctcaaaggctgcactgcagtttctacatggcctcacccttcgaagcgagtacgtcgtccctgaggaagtcaaggctgcagggtttcagatctgtgccgacgagctggggtctattgttgagggtcatgatagtaagaagctcatcacccaaggtggagttgatggaattgcggaaaaacttgcaacttcgaagacggatgggctaagcacagccgatgatagtattaagcgcaggcaagacatatatggagtaaacaggttcacagaaagtgaggtccgtagtttctgggtgtttgtatgggaagcgcttcaagatacaactcttataattcttgctgtctgtgcgttcgtatcgctggttgttggcattgtggtggaagggtggccaaaaggtgctcatgatggtcttggaattgttgcaagtatcctcttggttgtgtttgtcactgcaacaagtgactaccggcagtcactgcagttcaaggacctggacaaggagaaaaagaaaatccatgtacaggttacaaggaatggttttaggcaaaggctatcgatatatgatcttcttcctggtgatgttgtccatttagcaattggggatcaggtccctgcagatgggctcttcatttatggattctctctgttgatcaatgagtccagcctaactggtgaaagtgaacctgttgctgtaaatgaagataaccctttccttttgtctgggaccaaagtacaagatggctcctgcaagatgctggtaacaactgttggcatgcgcacccaatggggaaaactgatggccactctcagtgaaggcggcgatgatgaaaccccactgcaagtcaaacttaatggagttgcaactattattggccagattggattattttttgctgttataactttcattgtcctgtcgcaagggctattcagcaagaaataccatgagcagatgcttttaagctggtcaggagatgatgcattggagctgctggagcattttgctattgcagttactattgttgttgttgctgttcccgagggattgccgttagcagtcacgctgagtcttgcatttgccatgaagaaaatgatgaatgacaaggcacttgttcgccacttagctgcatgtgagactatgggttcggctactaccatctgcagtgacaagacaggaacactgacaactaatcatatggccgttgttaaggcctgcatctgtggaaacatcaaggaagttaatggttctcagaatgcatccaagttacgctctgagcttccagagattgttattaaaactcttttggagtctatatttaacaatacaggtggtgaggttgtaattaaccaggatggtaaatatcagatcctgggtacccccacggagacagctttactagagtttgcattgtcactaggcggagattttaaggcaaaacgtgatgaaactaagattgtgaaagtggagcctttcaattcaacaaaaaagaggatgagtgtcattcttgagcttccaggaggaggatgccgtgcacactgtaaaggtgcttcagagatagtcttggctgcctgtgataaattcgtagatgagacaggtggtgttcatcctctggataaaataactgctgacaagctcaatggtattattgatagttttgctggtgaagctcttagaacattatgccttgcttataaggatatggaagaaggtttttccaacgcagaccatataccgctacaagggtacacatgcattggaattataggtataaaagatcctgtccgcccaggggtgaaggagtctgttgctacttgccgggctgctggaattatggtgagaatggtcacaggagataacataaatacagcgaaggcaattgctcgtgaatgtggtatacttactgaagatggcatagctattgaaggaccagagttcagagagaaaagcctagctgaactccttgaactggttccaaaaatacaggtaatggcccgatcatcaccacttgacaagcatacacttgtaaagcatttgcgcacaacattcaatgatgttgttgctgttactggtgatggaacaaatgatgctcctgcattgcatgaagcagatattggacttgcaatgggcattgctgggactgaggtggcaaaagagagcgctgatgttataattctggacgacaacttctccacgattgtaactgttgccaagtggggacgatctgtttacatcaatattcaaaagtttgtgcagtttcagctgactgtcaatgtagtggcactgctagtgaacttctcttcagcctgctttacaggaaatgcaccactaacagctgttcagcttctttgggttaacatgatcatggacacccttggcgcgcttgccttagccacggagccacctaatgatgacttgatgaagagagagccagtaggaaggacagggaaattcattacaaatgtgatgtggaggaacattcttggtcagtctttctaccagttctttgtgatgtggtatctccaaacgcaagggaaaaatttctttgggcttgaaggctctggtactgatattgttctgaatacgataattttcaactcattcgtcttctgtcaggtgttcaatgaaataagctctcgggagatggagaagatcaacgtgctcaagggcatgacaaggaactacgtgttcatggctgtcctcagcagcacggtgatcttccagttcatcatggtgcagtttctaggagagttcgccaacacgacgcccctgaccatacaccagtggctagccagcgtgctcctcggtctggccgggatgcccatcgctgccgccgtcaagctgatcccagtcggctcgtcatgataccattgaagattgctgctgcctgggatgggaagcacggcatgaaaagcgtcaggctgtccaagctgcatggtattcggtggagctgagctctctctctgtctctctgtgtgcgtaaacttttggaatgcacggagggcaggctagggaaatggagcagccgctgcagtttgagaagttttgtagcctggaaatgtggctagattgcctcggacctgtaagaaacatcgtgtttgttggcgccgggaaaaaagcagctagctgtggtggtggtgcagcagagttgttagattgacttcgaaatggaatttagactgcaggatatttatggtggatgaatggacggaaaacatggttcgttggttatttttactcttgcttattagagctctggtttggtctttttaccttagtagttgaaaaagagtaaaatttagcatcgggtcgtcgaagccaaagttgtcttgaaggcgtcatttatgtctacaaaaaaaacgtaaaatgtatttttgggctcc

SEQ ID NO: 2850 - DNA, 4005 bp, Zea Mays
atttgcttctcgcaccatttcacactgctgcgacaacacgcctttggatctgctctgttttagtgctgccagtttgggaaatatcagtctttttcactaattattattatgtgctaccttaattacctcccattttcagtaggttcttgcaactggctactatcaactccactcatagttaagactaattagaaccactgcagcaaccataaacttgaaccactttccattactctgctatcagatcctgaaccagtgcagcaacatgcctagttatgccctcccgtttttctgatttgagcagttaacctcgcaatccaactgggtggctgtcttaactctgttactaccgccaccaataccttcggttactcaagttaacactgctgctgtgtgacaggagaagctgcgtgtcgctgtgctcgtctcaaaggctgcactgcagtttctacatggcctcacccttcgaagcgagtacgtcgtccctgaggaagtcaaggctgcagggtttcagatctgtgccgacgagctggggtctattgttgagggtcatgatagtaagaagctcatcacccaaggtggagttgatggaattgcggaaaaacttgcaacttcgaagacggatgggctaagcacagccgatgatagtattaagcgcaggcaagacatatatggagtaaacaggttcacagaaagtgaggtccgtagtttctgggtgtttgtatgggaagcgcttcaagatacaactcttataattcttgctgtctgtgcgttcgtatcgctggttgttggcattgtggtggaagggtggccaaaaggtgctcatgatggtcttggaattgttgcaagtatcctcttggttgtgtttgtcactgcaacaagtgactaccggcagtcactgcagttcaaggacctggacaaggagaaaaagaaaatccatgtacaggttacaaggaatggttttaggcaaaggctatcgatatatgatcttcttcctggtgatgttgtccatttagcaattggggatcaggtccctgcagatgggctcttcatttatggattctctctgttgatcaatgagtccagcctaactggtgaaagtgaacctgttgctgtaaatgaagataaccctttccttttgtctgggaccaaagtacaagatggctcctgcaagatgctggtaacaactgttggcatgcgcacccaatggggaaaactgatggccactctcagtgaaggcggcgatgatgaaaccccactgcaagtcaaacttaatggagttgcaactattattggccagattggattattttttgctgttataactttcattgtcctgtcgcaagggctattcagcaagaaataccatgagcagatgcttttaagctggtcaggagatgatgcattggagctgctggagcattttgctattgcagttactattgttgttgttgctgttcccgagggattgccgttagcagtcacgctgagtcttgcatttgccatgaagaaaatgatgaatgacaaggcacttgttcgccacttagctgcatgtgagactatgggttcggctactaccatctgcagtgacaagacaggaacactgacaactaatcatatggccgttgttaaggcctgcatctgtggaaacatcaaggaagttaatggttctcagaatgcatccaagttacgctctgagcttccagagattgttattaaaactcttttggagtctatatttaacaatacaggtggtgaggttgtaattaaccaggatggtaaatatcagatcctgggtacccccacggagacagctttactagagtttgcattgtcactaggcggagattttaaggcaaaacgtgatgaaactaagattgtgaaagtggagcctttcaattcaacaaaaaagaggatgagtgtcattcttgagcttccaggaggaggatgccgtgcacactgtaaaggtgcttcagagatagtcttggctgcctgtgataaattcgtagatgagacaggtggtgttcatcctctggataaaataactgctgacaagctcaatggtattattgatagttttgctggtgaagctcttagaacattatgccttgcttataaggatatggaagaaggtttttccaacgcagaccatataccgctacaagggtacacatgcattggaattataggtataaaagatcctgtccgcccaggggtgaaggagtctgttgctacttgccgggctgctggaattatggtgagaatggtcacaggagataacataaatacagcgaaggcaattgctcgtgaatgtggtatacttactgaagatggcatagctattgaaggaccagagttcagagagaaaagcctagctgaactccttgaactggttccaaaaatacaggtaatggcccgatcatcaccacttgacaagcatacacttgtaaagcatttgcgcacaacattcaatgatgttgttgctgttactggtgatggaacaaatgatgctcctgcattgcatgaagcagatattggacttgcaatgggcattgctgggactgaggtgtgaatgcttattgttaaggagaccaaatcaagtttattcagtaaagggcagatatgccatggtggcatgtactattgttctaaatagtacatgcaattatgatatgtccatcgtattgaacctgagtattgctaattttgtaccataacctgctatcatagccatgccatccagtggagctaatataatctttttcaggtggcaaaagagagcgctgatgttataattctggacgacaacttctccacgattgtaactgttgccaagtggggacgatctgtttacatcaatattcaaaagtttgtgcagtttcagctgactgtcaatgtagtggcactgctagtgaacttctcttcagcctgctttacaggaaatgcaccactaacagctgttcagcttctttgggttaacatgatcatggacacccttggcgcgcttgccttagccacggagccacctaatgatgacttgatgaagagagagccagtaggaaggacagggaaattcattacaaatgtgatgtggaggaacattcttggtcagtctttctaccagttctttgtgatgtggtatctccaaacgcaagggaaaaatttctttgggcttgaaggctctggtactgatattgttctgaatacgataattttcaactcattcgtcttctgtcaggtgttcaatgaaataagctctcgggagatggagaagatcaacgtgctcaagggcatgacaaggaactacgtgttcatggctgtcctcagcagcacggtgatcttccagttcatcatggtgcagtttctaggagagttcgccaacacgacgcccctgaccatacaccagtggctagccagcgtgctcctcggtctggccgggatgcccatcgctgccgccgtcaagctgatcccagtcggctcgtcatgataccattgaagattgctgctgcctgggatgggaagcacggcatgaaaagcgtcaggctgtccaagctgcatggtattcggtggagctgagctctctctctgtctctctgtgtgcgtaaacttttggaatgcacggagggcaggctagggaaatggagcagccgctgcagtttgagaagttttgtagcctggaaatgtggctagattgcctcggacctgtaagaaacatcgtgtttgttggcgccgggaaaaaagcagctagctgtggtggtggtgcagcagagttgttagattgacttcgaaatggaatttagactgcaggatatttatggtggatgaatggacggaaaacatggttcgttggttatttttactcttgcttattagagctctggtttggtctttttaccttagtagttgaaaaagagtaaaatttagcatcgggtcgtcgaagccaaagttgtcttgaaggcgtcatttatgtctacaaaaaaaacgtaaaatgtatttttgggctcc

SEQ ID NO: 2851 - DNA, 4043 bp, Zea Mays
atttgcttctcgcaccatttcacactgctgcgacaacacgcctttggatctgctctgttttagtgctgccagtttgggaaatatcagtctttttcactaattattattatgtgctaccttaattacctcccattttcagtaggttcttgcaactggctactatcaactccactcatagttaagactaattagaaccactgcagcaaccataaacttgaaccactttccattactctgctatcagatcctgaaccagtgcagcaacatgcctagttatgccctcccgtttttctgatttgagcagttaacctcgcaatccaactgggtggctgtcttaactctgttactaccgccaccaataccttcggttactcaagttaacactgctgctgtgtgacaggagaagctgcgtgtcgctgtgctcgtctcaaaggctgcactgcagtttctacatggcctcacccttcgaagcgagtacgtcgtccctgaggaagtcaaggctgcagggtttcagatctgtgccgacgagctggggtctattgttgagggtcatgatagtaagaagctcatcacccaaggtggagttgatggaattgcggaaaaacttgcaacttcgaagacggatgggctaagcacagccgatgatagtattaagcgcaggcaagacatatatggagtaaacaggttcacagaaagtgaggtccgtagtttctgggtgtttgtatgggaagcgcttcaagatacaactcttataattcttgctgtctgtgcgttcgtatcgctggttgttggcattgtggtggaagggtggccaaaaggtgctcatgatggtcttggaattgttgcaagtatcctcttggttgtgtttgtcactgcaacaagtgactaccggcagtcactgcagttcaaggacctggacaaggagaaaaagaaaatccatgtacaggttacaaggaatggttttaggcaaaggctatcgatatatgatcttcttcctggtgatgttgtccatttagcaattggggatcaggtccctgcagatgggctcttcatttatggattctctctgttgatcaatgagtccagcctaactggtgaaagtgaacctgttgctgtaaatgaagataaccctttccttttgtctgggaccaaagtacaagatggctcctgcaagatgctggtaacaactgttggcatgcgcacccaatggggaaaactgatggccactctcagtgaaggcggcgatgatgaaaccccactgcaagtcaaacttaatggagttgcaactattattggccagattggattattttttgctgttataactttcattgtcctgtcgcaagggctattcagcaagaaataccatgagcagatgcttttaagctggtcaggagatgatgcattggagctgctggagcattttgctattgcagttactattgttgttgttgctgttcccgagggattgccgttagcagtcacgctgagtcttgcatttgccatgaagaaaatgatgaatgacaaggcacttgttcgccacttagctgcatgtgagactatgggttcggctactaccatctgcagtgacaagacaggaacactgacaactaatcatatggccgttgttaaggcctgcatctgtggaaacatcaaggaagttaatggttctcagaatgcatccaagttacgctctgagcttccagagattgttattaaaactcttttggagtctatatttaacaatacaggtggtgaggttgtaattaaccaggatggtaaatatcagatcctgggtacccccacggagacagctttactagagtttgcattgtcactaggcggagattttaaggcaaaacgtgatgaaactaagattgtgaaagtggagcctttcaattcaacaaaaaagaggatgagtgtcattcttgagcttccaggaggaggatgccgtgcacactgtaaaggtgcttcagagatagtcttggctgcctgtgataaattcgtagatgagacaggtggtgttcatcctctggataaaataactgctgacaagctcaatggtattattgatagttttgctggtgaagctcttagaacattatgccttgcttataaggatatggaagaaggtttttccaacgcagaccatataccgctacaagggtacacatgcattggaattataggtataaaagatcctgtccgcccaggggtgaaggagtctgttgctacttgccgggctgctggaattatggtgagaatggtcacaggagataacataaatacagcgaaggcaattgctcgtgaatgtggtatacttactgaagatggcatagctattgaaggaccagagttcagagagaaaagcctagctgaactccttgaactggttccaaaaatacaggttcggtatctacatgatatcttattgagtttcaaacattttaaccatcaatccacaagtctcacctacttctgattatgttcattgaaggtaatggcccgatcatcaccacttgacaagcatacacttgtaaagcatttgcgcacaacattcaatgatgttgttgctgttactggtgatggaacaaatgatgctcctgcattgcatgaagcagatattggacttgcaatgggcattgctgggactgaggtgtgaatgcttattgttaaggagaccaaatcaagtttattcagtaaagggcagatatgccatggtggcatgtactattgttctaaatagtacatgcaattatgatatgtccatcgtattgaacctgagtattgctaattttgtaccataacctgctatcatagccatgccatccagtggagctaatataatctttttcaggtggcaaaagagagcgctgatgttataattctggacgacaacttctccacgattgtaactgttgccaagtggggacgatctgtttacatcaatattcaaaagtttgtgcagtttcagctgactgtcaatgtagtggcactgctagtgaacttctcttcagcctgctttacaggtgtctcctagcctcacaattctattaacctcagtgttttaagatgtctctctgtctaatcacgtgcttgtaatgccaggaaatgcaccactaacagctgttcagcttctttgggttaacatgatcatggacacccttggcgcgcttgccttagccacggagccacctaatgatgacttgatgaagagagagccagtaggaaggacagggaaattcattacaaatgtgatgtggaggaacattcttggtgttcaatgaaataagctctcgggagatggagaagatcaacgtgctcaagggcatgacaaggaactacgtgttcatggctgtcctcagcagcacggtgatcttccagttcatcatggtgcagtttctaggagagttcgccaacacgacgcccctgaccatacaccagtggctagccagcgtgctcctcggtctggccgggatgcccatcgctgccgccgtcaagctgatcccagtcggctcgtcatgataccattgaagattgctgctgcctgggatgggaagcacggcatgaaaagcgtcaggctgtccaagctgcatggtattcggtggagctgagctctctctctgtctctctgtgtgcgtaaacttttggaatgcacggagggcaggctagggaaatggagcagccgctgcagtttgagaagttttgtagcctggaaatgtggctagattgcctcggacctgtaagaaacatcgtgtttgttggcgccgggaaaaaagcagctagctgtggtggtggtgcagcagagttgttagattgacttcgaaatggaatttagactgcaggatatttatggtggatgaatggacggaaaacatggttcgttggttatttttactcttgcttattagagctctggtttggtctttttaccttagtagttgaaaaagagtaaaatttagcatcgggtcgtcgaagccaaagttgtcttgaaggcgtcatttatgtctacaaaaaaaacgtaaaatgtatttttgggctcc

SEQ ID NO: 2852 - DNA, 196 bp, Zea Mays
gcgagaacgcgcactccgaccagtcatccgccgccgcctcctccaccggcatcatctcgtcaataggcaccacgcttatagtcgattagttacggtgcacgtcgagcaaaccatgcgcgtaaggcgcgagctccgaaatatctgttgctatggtggtcggcggcggcggcggaggcggccgtggaagaggccggag

SEQ ID NO: 2853 - DNA, 750 bp, Zea Mays
gggaactcggagttcgcgttaactggatcatgttccaggacatcacgacgttgctgctcgatcccaaggcgttccgtgacaccatcgacctctttgtcgagcggtacaaggaccaagggatcaccgtggttgctggcgaggtgatctccgaagagtattctttggaatatggaactgacaagatagaaatgcatgtcggagctgtacaggccaacgaccgggctcttgtagtcgatgatcttattgctaccggtggaacactatgtgcagctgtcaaacttattgaacgtgttggagcaaaggttgttgagtgtgcttgtgtcattgaattgccagaactgaagggccgagacaagcttggggacaggccagtttttgtccttgtggaagcagacgcctgagcggaacttgggacttctcagagagtttggcgccgtcgatgctccctctctggagacaacacagtttcccatgttaccatgttggctattttctggctgacgcgtaataaagttttattccaaattgtgatcccctgaatgatttgtcaatgtagacatgattgctgatctttgtaaactgtggcttatgttttgtcaaaatggttctaattattcacatcaattaaggataaatcctgattggagcttgttgtttgttctagtaatgttgctttattgctttgtttgtgcaaccattgatgaaataaagttgccatcgcaataactgaataatggctgatgtatggag

SEQ ID NO: 2854 - DNA, 660 bp, Zea Mays
ataacgtttcgcggacgccatggcagccaccgccccagcctgcggcggcgaggaagatgctccggcggatatgatggaacgcctcttccgatctccgccgccgtcgtcccggtggccgggggcgtcggcatgtgcctggtccaagaacttaacttgctctgtgattctgtgaacttgatagctgccattttcagattctccaagcagctacactacagatatgtatggacgggcaattttctaccgaagttttggacagagaaagtggacaccgcatctgccagccatagcttcctaagcgcctgtttgaatctcggactgaagtttagtacgtacagtttttggatgctaattacaagggctaaaaaaaggtctccgcgaggaatggagatagggaatgcttccccgtcccgtcttgtcggtggaaaaaatttccttgtttacattcacatgaaagaataaacttcttcttcctgtttcctaagagcgtacttggtgcatagagaaatagagatgatcccatggatacctcaatttccctgttcactaaattagttctaatggagaaattccaccctcaccggagaatcagcgaccgattgccatctctgcccgagggcctacagggcctatcttttttgatggctggattggaacagg

SEQ ID NO: 2855 - DNA, 718 bp, Zea Mays
ttgcaaaccaggcccaatccaagcaaaaaccaccaatcccggcctggaatcgatccacgaaacaatagttgtggaactcctccacgcgtgggtgtggaagcgacggcgccgacgctattcacaacggcaacgcgtcccttccaacgccggccgccgccatcttcatcagccaccttttctcatgttcttctggctgctcttaccccaccagtgcaagaacaaggaagtggtgttgcaaagaaactgtgtttgatttttgctgtaacttgactgaagaaacatctctgtttatcatctcccaaacatatagctatatgctcagtactgctcatttttttttgcaatggcaatgagatgtgttagtgcttaaaagtgttagctttgatctattgtgatgtaaacttcattatgtttcctgcatttgctttgatctactgtgatgtaaacacgatttatgttggttctgctatcttttggatgtaatcaaactattattttgctttgttgttgttctgattcaaactattcatgcttgttctgcttttgttctacttgctatagaaagtacctggactattaagacagacttagaccataatgttcaaaaatactaaactttgacacaaggctgcttgtgtgtttaacgagttgtgtttatatacaataatacaagtggtgtaaccaaacagtgtacaatgagcaatgtattgaatctcac

SEQ ID NO: 2856 - DNA, 927 bp, Zea Mays
aaccaggcccaatccaagcaaaaaccaccaatcccggcctggaatcgatccacgaaacaatagttgtggaactcctccacgcgtgggtgtggaagcgacggcgccgacgctattcacaacggcaacgcgtcccttccaacgccggccgccgccatcttcatcagccaccttttctcatgttcttctggctgctcttaccccaccagtgcaaggtacgaggcgagcttaaattaaccgtacaccatgatccatgtagtgtgaaccatgattcatgtagtgatccatgaactataaattcatttgttcagtgtgtttattgtcagttcagctacatatattgcaatggcgcgctttgtaacacagtgaattgatgaacaaatatgagctaatgttacactacagattgacacattcacttgcatgcagaacaaggaagtggtgttgcaaagaaactgtgtttgatttttgctgtaacttgactgaagaaacatctctgtttatcatctcccaaacatatagctatatgctcagtactgctcatttttttttgcaatggcaatgagatgtgttagtgcttaaaagtgttagctttgatctattgtgatgtaaacttcattatgtttcctgcatttgctttgatctactgtgatgtaaacacgatttatgttggttctgctatcttttggatgtaatcaaactattattttgctttgttgttgttctgattcaaactattcatgcttgttctgcttttgttctacttgctatagaaagtacctggactattaagacagacttagaccataatgttcaaaaatactaaactttgacacaaggctgcttgtgtgtttaacgagttgtgtttatatacaataatacaagtggtgtaaccaaacagtgtacaatgagcaatgtattgaatctcac

SEQ ID NO: 2857 - DNA, 1305 bp, Zea Mays
aatcgatccacgaaacaatagttgtggaactcctccacgcgtgggtgtggaagcgacggcgccgacgctattcacaacggcaacgcgtcccttccaacgccggccgccgccatcttcatcagccaccttttctcatttggagaataggacgagcgtgacctcggcgtcaggttccccgaccagcggccacgcctcgagtgcatcgccttctacgtcgaccccaccaagcactaccccttcacctgcacatccccctgcgagcttcttgggtacatggcgcacaaccatgctcaccaagacaaaggccaagaccatggggtgggaactgatctgtgtccatggacatggtgatttgatagcattttgggggagaaataaaaaaaagtttcactgctgcatccgtgacaaataataatatccttcaattcagaggtacagatcgtcatagctagttatttaaaacggattcatgggaggggtaactagtcttatacaaatacgtatatagtgtatgaaatctttgctattggacaaagttgaatgatctgcacgcccatgagtcagaaaagcactaggcagcccagatcgacctcatgtggtgttcagcttggcgagggtgcgttgcaaggccttcacgctcactgataacgtttttctgcctataccttccttgagtttagtttcagtttcagctaacttttagtttcagtttcagctagctttcagtttcactagcaacgtctttctgcctgtaccttccaaactttcaggttcttctggctgctcttaccccaccagtgcaagaacaaggaagtggtgttgcaaagaaactgtgtttgatttttgctgtaacttgactgaagaaacatctctgtttatcatctcccaaacatatagctatatgctcagtactgctcatttttttttgcaatggcaatgagatgtgttagtgcttaaaagtgttagctttgatctattgtgatgtaaacttcattatgtttcctgcatttgctttgatctactgtgatgtaaacacgatttatgttggttctgctatcttttggatgtaatcaaactattattttgctttgttgttgttctgattcaaactattcatgcttgttctgcttttgttctacttgctatagaaagtacctggactattaagacagacttagaccataatgttcaaaaatactaaactttgacacaaggctgcttgtgtgtttaacgagttgtgtttatatacaataatacaagtggtgtaaccaaacagtgtacaatgagcaatgtattgaatctcac

SEQ ID NO: 2858 - DNA, 4023 bp, Zea Mays
atggtacaattaaacaaagcaacagctgcccctaaaatagtgactgtcaccgtagttagtactacactactttattactactactccagtccagagcaagagggagcaaataaaaaaaaagagctggtggatgagcctgctgcctagcagagcttgcaagggcaatgaatgcaacctcctcctcctccaccaccatcatgacgcgctgcatttagtgggcattgaaaacgcctgcaaggggtttggtgcgagagaggagaggaggagcgagctagggtgtgtgtgtgtgtccgtgtgtggctgggtgctgcatctgcgtcgtctgatgatgatgatgagctcgagctccgtatcttccccctcacaccttgttgtgtgaatgaatcgagctgggccggccggactctgttcttctttctcctgtttgtggctgtagatttggagagctattactgttcttcagacatctcctgtccgatcccattctcattcgtttacgctatcccctggtggttcttgctcagctgctctgctggggaggggaggggcggaaagagaagagaagaggaggggagtcaaaaaaaaaatttctttgttgtgtttccctgcttttgttttgcctcccccaccccttgtttgatgatgctgtgttcttttctttaatttgagttcttgatcctgccaaaagcaaaagccctcacacccttctgctcgcaaaggcgagggctgtgtcctgccgcttcaaaccctccccacaaagctcggatttctgtctgcagtttccttacctctgaatcccgttccctccacgaaaacctcggatttccacgcccagtgttccaccaccgcaaagatccagtttttttcccctcccgaagccgcagtttccctgcgcgagctggtctggtccaagaacacacaccaaaaatctctctccccattgcgcacggaaatctcgggggggaggggtttccccgccccatgcttcagtccgtccgttgatccagaccgccacgccaccgggtttggtagctgcgggttttttccgcccgggagccgggagcggcgtcgtctcgatccgaggcccatgcatctgtcgctatggaagccgctgtcccactgcgccgccgtcctcctcgccaagaaccaccggcgccgcggcggcgggggcggcagcaacggccgccgtgacgactcgtccgccttcctccggcagctgcgggacgcgctggacgcggcgtcggaggacggctccctctgcccgccgccggacgccggcggcgccgacgcggacgcagccgtgtcgcgctcccgctccctggcacgcctgcgcgcgcagcgggacttcctccgcgccacggccctcgccaccgccgccggcccgttccggtccctctccgacctcccgctgctgccccacgccatcgccaccttcctcgccatgtacccggactacgcctccaccgccgacgtcgaccgcctccgcgtcgaccattactcccacctcgacgcccccggcgccggcagggtctgtctggactactgcggcttcggcctcttcgactccggctgggactcctcgtcctcatccttcacattgcacgagctcaacgccaatctgagcaaccacgcgctctatggcggcgctgagcccggcaccgtggagaatgacatcaaagagcgcatcttggagtacctgaacgtgccagccagcgagtatgcgctggtgttcacggtgagccgtgggtcggcgttccggctgcttgctgagtgctaccccttcgagaccaaccggaggctgctcaccatgttcgaccatgagagccagtcggtcaattggatggcgcagagtgcgcgggcaaagggtgccaagacgcgcactgcatggttccgctggccaacactgaagctttgctcaacggagttgcggaaggagatcgtgggcaagaagaagggccggcgacgggatgccgcggttgggctgtttgtcttcccggcgcagtctcgcgtgaccggtgccaagtactcctaccagtggatggcgctggcgcagcagaatgggtggcatgtgatgcttgatgctggtgcacttggccccaaggacatggattcactgggtctctcgctattccggccggacttcattataacttcgttctacagggtctttggtgcagacccaactgggtttggttgccttctgatcaagaagtcagtaattgggacactgcaggggagaaacgggtgtaatgcatcgggaatggtgaggattgttccggtgtttccacagtatctcagtgactcggttgatggctttgatgcattcgatgggtttgaagatgatccaggcgttgacaaagatgaaaagccctcttctaatgctcaaaatgggtcgcagctgccggcattttcaggtgtctacacgtctgctcaggttagagagacttttgagagtgatcctggtcgggacagcagctcggacagggatggggcaagcaccatctttgaagaaacggagagtgtctctatgggtgagatcatgaggagtccagcattcagtgaggactgttcatcagagaactctttctgggtagatgttggccatagcccattggggtcagagaagtctggtcagttcaagaaagggaaactgggttcaccattaccatcttcttggtttaatggaagaaagtgtaacaagaggatgtccccaaacttaagttccaggatatctagaagtccactttatgatggtcatgtgatttcctttgatgcagccgtgctatcagtctcgcaagatgcagactgcctcaaggaagaccctgaagaagaaaattttgagaatgggcggagagctcatttcaggcaggttagtgaaattcaagaggagccagaggccgaagaggtggcatgccaacgtgctatgaatggtggcgcggagcacaaagaaagcgcaataagaagggagactgaaggggagttccggctactgggaggctgaatcgggcctcagatgctgctgaagcttctggatatacattccctggtgatgatggttgtgcaagtgatggatatgatgatgctcaggactggggcaggagggagccagagataatttgcaggcacattgatcatgttgatatgatgggactcaacagaactactcttaggttgagatacttgatcaattggctcgtaacttcacttttgcaactgaagttatcagactcaaaaggtggcgatggagtccctcttgtacacatctatggccccaagattaagtatgaaaggggagcagctgttgcttttaatgtgaagcaaaatgatggaacatttgtgaatgctgaagttgttcaaaagatcgctgagaaaaatggcatatctgttggcattggttttctcagtcatataaaagtagacatgaagcagaaacagttaaatggcacgctcgatataccggaggcttcattttataagaatggacgcagagacaataaaaaggtgaccataagagttgaagtcgtgactgcttcacttggcttccttactaactttgaagatgtttacaagatgtgggcttttgttgccaagttccttgatccttcatttcttgaaagtgaacgccttaccattgctgctgaccactcagaagggcaaacttgagcatgacatgtagcatagcaacaaaaaatgagagggaggtgatttctcctgttgaagcatatgttgtcttttatgctttcaaggggtaatcagtagtggatttagcagatttgtttattctttgcctagttccttgatatgggtcatatgacttgtttttgttcatctagagtttgcgcaactcaactatgtaccagcagctcatcagtagagctctttcccacggaacaatgtgtgtaaagcagctcaatggaaatgaaatagtttgagtgattttgtccaagttcaatttagtcaaatactcaacctcagatgtgtgttcgtaatgtggtttttacatcttcagctaacatttcattt

SEQ ID NO: 2859 - DNA, 1507 bp, Zea Mays
gaccgtcctccctcgtcgcgagagccacctccccgcacaagccgcgcaatgcgtcctacccgacactgtcgttccgcaaacaacctccgcgcagtcgtcgtccacacttgcccgcctggataaggatacgaagtccaaatcctcatccgaccggttccctacttccctcaaaccacgtcctctgcaacgagcgcgccctacgcgacggcgttccctcggctacctctacctcctggacatgccaccctcctcccggcctccttcgcctcaaccctaaccccgcaccttcgaacccattgctgctcccctctctccccggctctaatccgctcctaacttccgccttgtttgctgcaaggaggcgtgcgcgacctccagttccaatctgagcgactttggtggcatggacttcctgttcaccatcgccggcttcctcaccatcatcagctttggtggcggacatgagaggagagaagaatccttcgaggtggatcttgatttaactcttaatgagcttggagatggggaggacactcaagaacaccaggcgatccatgcacaaattatcaggaagggtggtgggaagtgttccacttgccaccaattctcatctctcacctctctatcacatgaaccaacatatttctacaatgtggacattcctctcgagtcatcaaaggatctgaagaaaaggagaaagaactccatgctctgaagtgcctcgcggttgagtcagaacaaggcacagatgggtgcgacagagctgtgggatctcttggcctccggctcagagcaattcgtggagatgtacagggtgtatcaacacctcaggctgaagaactggtttgtaaggtcaggactgcagtacaggcagactttgttgctcactgtcatcgtccgacactagtgcactcgtagttcgtggaggttgtggctccaaaagggaaagcattcggcaccaggtgtgcccgcatgaaggtttggtctgaactattatgtgcgctttgggactcttcaagtgtggccaagatgttacttcttaccattagcaccaagagctacgagctagaatccttggattgtttggagcagatgattgttcatgagaggacgatcacaagatggataccacaaccgtgtcgtgagcaacaagacaaaccatgcagagaagaaaccaaaagggacatgcaaagacaaaaatcctgcagagaagtattaagcaacgaacagagcatacaagtgtgggggtggtgtagtgtttatctattggacgtagtgcagagctttacagttatttctagcttacttatctacaaactgaaatcttaactaaagagcttcctatttctgtatagtcatgttgatgaacgtgaataatgcaattctatggtaccaatttgttgtgattctcattgacttttctacatatctttgataacatcatcttatgtaatgcctacttgaaagggaaatggacttaattatttcatataaccgattttggtgg

SEQ ID NO: 2860 - DNA, 1422 bp, Zea Mays
cacctccccgcacaagccgcgcaatgcgtcctacccgacactgtcgttccgcaaacaacctccgcgcagtcgtcgtccacacttgcccgcctggataaggatacgaagtccaaatcctcatccgaccggttccctacttccctcaaaccacgtcctctgcaacgagcgcgccctacgcgacggcgttccctcggctacctctacctcctggacatgccaccctcctcccggcctccttcgcctcaaccctaaccccgcaccttcgaacccattgctgctcccctctctccccggctctaatccgctcctaacttccgccttgtttgctgcaaggaggcgtgcgcgacctccagttccaatctgagcgactttggtggcatggacttcctgttcaccatcgccggcttcctcaccatcatcagctttggtggcggacatgagaggagagaagaatccttcgaggcgatccatgcacaaattatcaggaagggtggtgggaagtgttccacttgccaccaattctcatctctcacctctctatcacatgaaccaacatatttctacaatgtggacattcctctcgagtcatcaaaggatctgaagaaaaggagaaagaactccatgctctgaagtgcctcgcggttgagtcagaacaaggcacagatgggtgcgacagagctgtgggatctcttggcctccggctcagagcaattcgtggagatgtacagggtgtatcaacacctcaggctgaagaactggtttgtaaggtcaggactgcagtacaggcagactttgttgctcactgtcatcgtccgacactagtgcactcgtagttcgtggaggttgtggctccaaaagggaaagcattcggcaccaggtgtgcccgcatgaaggtttggtctgaactattatgtgcgctttgggactcttcaagtgtggccaagatgttacttcttaccattagcaccaagagctacgagctagaatccttggattgtttggagcagatgattgttcatgagaggacgatcacaagatggataccacaaccgtgtcgtgagcaacaagacaaaccatgcagagaagaaaccaaaagggacatgcaaagacaaaaatcctgcagagaagtattaagcaacgaacagagcatacaagtgtgggggtggtgtagtgtttatctattggacgtagtgcagagctttacagttatttctagcttacttatctacaaactgaaatcttaactaaagagcttcctatttctgtatagtcatgttgatgaacgtgaataatgcaattctatggtaccaatttgttgtgattctcattgacttttctacatatctttgataacatcatcttatgtaatgcctacttgaaagggaaatggacttaattatttcatataaccgattttggtgg

SEQ ID NO: 2861 - DNA, 1287 bp, Zea Mays
ctccccgcacaagccgcgcaatgcgtcctacccgacactgtcgttccgcaaacaacctccgcgcagtcgtcgtccacacttgcccgcctggataaggatacgaagtccaaatcctcatccgaccggttccctacttccctcaaaccacgtcctctgcaacgagcgcgccctacgcgacggcgttccctcggctacctctacctcctggacatgccaccctcctcccggcctccttcgcctcaaccctaaccccgcaccttcgaacccattgctgctcccctctctccccggctctaatccgctcctaacttccgccttgtttgctgcaaggaggcgtgcgcgacctccagttccaatctgagcgactttggtggcatggacttcctgttcaccatcgccggcttcctcaccatcatcagctttggtggcggacatgagaggagagaagaatccttcgaggatctgaagaaaaggagaaagaactccatgctctgaagtgcctcgcggttgagtcagaacaaggcacagatgggtgcgacagagctgtgggatctcttggcctccggctcagagcaattcgtggagatgtacagggtgtatcaacacctcaggctgaagaactggtttgtaaggtcaggactgcagtacaggcagactttgttgctcactgtcatcgtccgacactagtgcactcgtagttcgtggaggttgtggctccaaaagggaaagcattcggcaccaggtgtgcccgcatgaaggtttggtctgaactattatgtgcgctttgggactcttcaagtgtggccaagatgttacttcttaccattagcaccaagagctacgagctagaatccttggattgtttggagcagatgattgttcatgagaggacgatcacaagatggataccacaaccgtgtcgtgagcaacaagacaaaccatgcagagaagaaaccaaaagggacatgcaaagacaaaaatcctgcagagaagtattaagcaacgaacagagcatacaagtgtgggggtggtgtagtgtttatctattggacgtagtgcagagctttacagttatttctagcttacttatctacaaactgaaatcttaactaaagagcttcctatttctgtatagtcatgttgatgaacgtgaataatgcaattctatggtaccaatttgttgtgattctcattgacttttctacatatctttgataacatcatcttatgtaatgcctacttgaaagggaaatggacttaattatttcatataaccgattttggtgg

SEQ ID NO: 2862 - DNA, 1557 bp, Zea Mays
cgacactgtcgttccgcaaacaacctccgcgcagtcgtcgtccacacttgcccgcctggataaggatacgaagtccaaatcctcatccgaccggttccctacttccctcaaaccacgtcctctgcaacgagcgcgccctacgcgacggcgttccctcggctacctctacctcctggacatgccaccctcctcccggcctccttcgcctcaaccctaaccccgcaccttcgaacccattgctgctcccctctctccccggctctaatccgctcctaacttccgccttgtttgctgcaaggaggcgtgcgcgacctccagttccaatctgagcgactttggtggcatggacttcctgttcaccatcgccggcttcctcaccatcatcagctttggtggcggacatgagaggagagaagaatccttcgaggcttgcagagaagacaaacactggtagtcgtagaacccaatgaaattaacttcactagaataaagaagaaaaggaagaaaacgaagaaggtggatcttgatttaactcttaatgagcttggagatggggaggacactcaaggtgcatttcatttgtctgaataacaccaggcgatccatgcacaaattatcaggaagggtggtgggaagtgttccacttgccaccaattctcatctctcacctctctatcacatgaaccaacatatttctacaatgtggacattcctctcgagtcatcaaaggatctgaagaaaaggagaaagaactccatgctctgaagtgcctcgcggttgagtcagaacaaggcacagatgggtgcgacagagctgtgggatctcttggcctccggctcagagcaattcgtggagatgtacagggtgtatcaacacctcaggctgaagaactggtttgtaaggtcaggactgcagtacaggcagactttgttgctcactgtcatcgtccgacactagtgcactcgtagttcgtggaggttgtggctccaaaagggaaagcattcggcaccaggtgtgcccgcatgaaggtttggtctgaactattatgtgcgctttgggactcttcaagtgtggccaagatgttacttcttaccattagcaccaagagctacgagctagaatccttggattgtttggagcagatgattgttcatgagaggacgatcacaagatggataccacaaccgtgtcgtgagcaacaagacaaaccatgcagagaagaaaccaaaagggacatgcaaagacaaaaatcctgcagagaagtattaagcaacgaacagagcatacaagtgtgggggtggtgtagtgtttatctattggacgtagtgcagagctttacagttatttctagcttacttatctacaaactgaaatcttaactaaagagcttcctatttctgtatagtcatgttgatgaacgtgaataatgcaattctatggtaccaatttgttgtgattctcattgacttttctacatatctttgataacatcatcttatgtaatgcctacttgaaagggaaatggacttaattatttcatataaccgattttggtgg

SEQ ID NO: 2863 - DNA, 1593 bp, Zea Mays
caacctccgcgcagtcgtcgtccacacttgcccgcctggataaggatacgaagtccaaatcctcatccgaccggttccctacttccctcaaaccacgtcctctgcaacgagcgcgccctacgcgacggcgttccctcggctacctctacctcctggacatgccaccctcctcccggcctccttcgcctcaaccctaaccccgcaccttcgaacccattgctgctcccctctctccccggctctaatccgctcctaacttccgccttgtttgctgcaaggaggcgtgcgcgacctccagttccaatctgagcgactttggtggcatggacttcctgttcaccatcgccggcttcctcaccatcatcagctttggtggcggacatgagaggagagaagaatccttcgaggtggatcttgatttaactcttaatgagcttggagatggggaggacactcaagaacaccaggcgatccatgcacaaattatcaggaagggtggtgggaagtgttccacttgccaccaattctcatctctcacctctctatcacatgaaccaacatatttctacaatgtggacattcctctcgagtcatcaaaggtataatctatttttatctggatcactgcaccaattgaaccaaatcacagttctaagaactcttttcccattgagtaaaaaagaaagagttatctgagcttccttctctaacttggtacatgcacccttcatgatgagtgagctcatgcatgtcattcgttatactgatctgaagaaaaggagaaagaactccatgctctgaagtgcctcgcggttgagtcagaacaaggcacagatgggtgcgacagagctgtgggatctcttggcctccggctcagagcaattcgtggagatgtacagggtgtatcaacacctcaggctgaagaactggtttgtaaggtcaggactgcagtacaggcagactttgttgctcactgtcatcgtccgacactagtgcactcgtagttcgtggaggttgtggctccaaaagggaaagcattcggcaccaggtgtgcccgcatgaaggtttggtctgaactattatgtgcgctttgggactcttcaagtgtggccaagatgttacttcttaccattagcaccaagagctacgagctagaatccttggattgtttggagcagatgattgttcatgagaggacgatcacaagatggataccacaaccgtgtcgtgagcaacaagacaaaccatgcagagaagaaaccaaaagggacatgcaaagacaaaaatcctgcagagaagtattaagcaacgaacagagcatacaagtgtgggggtggtgtagtgtttatctattggacgtagtgcagagctttacagttatttctagcttacttatctacaaactgaaatcttaactaaagagcttcctatttctgtatagtcatgttgatgaacgtgaataatgcaattctatggtaccaatttgttgtgattctcattgacttttctacatatctttgataacatcatcttatgtaatgcctacttgaaagggaaatggacttaattatttcatataaccgattttggtgg

SEQ ID NO: 2864 - DNA, 1516 bp, Zea Mays
caacctccgcgcagtcgtcgtccacacttgcccgcctggataaggatacgaagtccaaatcctcatccgaccggttccctacttccctcaaaccacgtcctctgcaacgagcgcgccctacgcgacggcgttccctcggctacctctacctcctggacatgccaccctcctcccggcctccttcgcctcaaccctaaccccgcaccttcgaacccattgctgctcccctctctccccggctctaatccgctcctaacttccgccttgtttgctgcaaggaggcgtgcgcgacctccagttccaatctgagcgactttggtggcatggacttcctgttcaccatcgccggcttcctcaccatcatcagctttggtggcggacatgagaggagagaagaatccttcgaggcttgcagagaagacaaacactggtagtcgtagaacccaatgaaattaacttcactagaataaagaagaaaaggaagaaaacgaagaaggtggatcttgatttaactcttaatgagcttggagatggggaggacactcaagaacaccaggcgatccatgcacaaattatcaggaagggtggtgggaagtgttccacttgccaccaattctcatctctcacctctctatcacatgaaccaacatatttctacaatgtggacattcctctcgagtcatcaaaggatctgaagaaaaggagaaagaactccatgctctgaagtgcctcgcggttgagtcagaacaaggcacagatgggtgcgacagagctgtgggatctcttggcctccggctcagagcaattcgtggagatgtacagggtgtatcaacacctcaggctgaagaactggtttgtaaggtcaggactgcagtacaggcagactttgttgctcactgtcatcgtccgacactagtgcactcgtagttcgtggaggttgtggctccaaaagggaaagcattcggcaccaggtgtgcccgcatgaaggtttggtctgaactattatgtgcgctttgggactcttcaagtgtggccaagatgttacttcttaccattagcaccaagagctacgagctagaatccttggattgtttggagcagatgattgttcatgagaggacgatcacaagatggataccacaaccgtgtcgtgagcaacaagacaaaccatgcagagaagaaaccaaaagggacatgcaaagacaaaaatcctgcagagaagtattaagcaacgaacagagcatacaagtgtgggggtggtgtagtgtttatctattggacgtagtgcagagctttacagttatttctagcttacttatctacaaactgaaatcttaactaaagagcttcctatttctgtatagtcatgttgatgaacgtgaataatgcaattctatggtaccaatttgttgtgattctcattgacttttctacatatctttgataacatcatcttatgtaatgcctacttgaaagggaaatggacttaattatttcatataaccgattttggtgg

SEQ ID NO: 2865 - DNA, 1553 bp, Zea Mays
ggcttggccactgcgtgctcgccgcccaatcctgaccaatgggttgcctgcagcgtcacgttaaatccacctgcaactgtagttcttcctcctccctctgtccttagcgcagaagcatcaccctatcttcttcctcgacgccccctgctcctctctctaccgagctcccattctccacggcgtttggcagcagagagcccttctccccagcaggagcagggcctccatggcgtccgacccctctcctttctcctccccgctcggagctctgccatagcgcacacaaatcccttccccctccattcctaggcgcaggaagttctcccccacgccgtccagctccaggccggatccaattcgtgctatccctgctcgtccagaatttcttgccccaagtccggcaatcccctcgccgtggatttcctcgagcttgcctccccatggtcgccaaccatcctgccccctgcccctggtgcgctgggcgcctagtgctctgacctcgacggccaccctcctctctgctcgagcaatgctagggacgtgtggcaagcccttgttcccagcgtcgcgcccttgcctccatcaacactaagaccccggtagcgcctgccatggtcgccgcaggtctctgctccttccccaagctcgccctcatctcccaggtcgccactttcctctccctgcccacatcatcggattctgctcgctgcgtgcttgccggcatgtccgggcgtggccctgcagattcatcataggtacctcctcgaactcctccacactggttgtggacggcattggtatccctctgctccagcagcgttgcggcgccccgagctcctcctccgcgtgctgccatggtcggggtcagtctcatccgacaacgccatgacttccactccgctctgtggcgagcagcccctgcaccatccatgctcgtcgtgtgttcgagagttcacgcgcaagtctctgcgtggtggccgtgtcgctgcaagcttgtgccacgcacccgggcatcgtgtcgcaccaaatagcagcagcaacacaccctcaagcctcgcattgaacctgctcgacgaaaagcgcagcaagctgcgtgtcgttcatccctgcagcaacaccattcttcacttcgcgtcatacatcgcatagccttcatcgctgcacattgtccgcatcggcgcagcagccctcccgttcattctccactcccctcgtcgcgtgtcatcaatctcgtgcttgctgcgcatcccatcctcgtcgtcgtcaaaacccttgctagatgttgtcgctgcgcctcgcgcgacacatgattcggtgaaacacctaaaaccgtggaggcatgcgcgacacgagtcggccaggaccgagagataatgatcgtgccagtgatgtggtgacaaccacaagatgcagtcggtggacgacccaaggaaggatggacttaaccagtggatgctcgccaagcgagcacctcccccagcaaacactacctaagtgttaaattaaaggcaagccccggttttatgcataaccgtttatatatgctatttcac

SEQ ID NO: 2866 - DNA, 2155 bp, Zea Mays
aagaaaataggagcagcttcacctcggaagctcagactcaatggttggtgcgaaggggtgtgagagatgcagggactggcaggagcactactactgggagcatatggatgcgagcaagatccgcttcttcaggtgcatgacaggagactttgctcatcgcattgtaagtttctaactgtccaaagcccactgatgctgttctttgttcctagaaaacatgcggttcaaattccacaaattttttggttgtgctgagcaatactcagctaaccctgtaatgcctagtttgggtactcttggaataagggggattggagtggatcaagaggtattgagggggattttgatctattatggatttaaacactctccaatccttccaaaccactccaatccaaaagtacaaactaggccttggggatatgttacttactgaaaccccactactctgttcttgctgccttaagtatcatgtatggatctaaatattaatcttacctaggagcacttgttgtgctgcaggtatgctgtgagtgatataaagatcttaatctcatgtccacttgccgagcttcagtttctttatcaaaaaatacggcagcaactctacatggcctaataactgaaagcaaattcagttaaactaccccattattatagtacaagaaaagaaaatttcccttcagttctttttccgtcaaaatatttgttcttttctagggttcacaagattactacagttagttgattacaaaacgatatttgccttgttactacactaccgtcatctgaaaactaaccatgcaagcaaagagcaatcacttttctgatgtcatcttcagagcgtgccagagaagttcgcaaagaacttcaaggggcagatcaccgaagagtttcacctgaaatcacctagcagcgctgagacatggcacgtcggtgtagagaagcatggcgacaaactattcctcgtgtcagggtgggagaatttcgccaaggctcatgagctggaggagaacgatctcctgctcttcgcttgctctggaaactcttcctttgaggtcctagtcttcggagcaagtggctgtgagaaagtgtcatccctgtttggcagtggacttggtccggacatgggcaaacaattcaatgatgtggtgcgtcgacatggtgtgcatcactctgtgactgtgagtgattctgaggataccgttgcgccgtcccagctggttcgatcccctcgtaacgccttgcctttgaaggaacccagtgggaaggctagaccaagtaaatatgaatcaccaaactccagcaacttcatcgtcaggcatgtggcaactggcaaagagggcactgatgatgagtatgctaactcaaactactactattcgttgtctgccaatcgactaggagacgaggaaaaggaagaaataataggtttggctccccatccgaccgaacaatcctgtatttgtgacccttctgaggaaaaaccatgttcagcgcagaaacaactgtctgatcatcccaagcaagtttgctgctgatcatcttggggaaagagcgcacaacatcatacttcgtaggccgaacaggaaggagaaatggcatgtcagctactatcactcacgccacacccggtgtttccagaacttagcgctgttcaagttcacgcgcgagaacaagcttcacgagggcgacatctgcgtcttcgaactgatgaaaggcgagaggagagtgacgatgaccgtccatgtcgtcagaaaggccaatggccggttcattctggtagtctgatctgacgcagtgcacctgtactgttgtagtttatgcagtgtgtagtgtgtaggggtactatgcaggggtagcattgcaaactggaagtgcctagtgatgcttgcaaggaatgcaactgcggttttgtgtcatgtaaggtagcttcctgatcagcagcatggcaagtagaacaaggtgtggcttgtgtgtaatatagaagtttctaggaaaatgttacactggcttatgcttttgtgcctgcttcagatctcccatctggtacagcagtgcttttgaacttcagaagtattatttcaaggaggaaaaagggattgttggttggtctacctgagttggatattaaataaattaaatgtaattaata

SEQ ID NO: 2867 - DNA, 1796 bp, Zea Mays
aagaaaataggagcagcttcacctcggaagctcagactcaatggttggtgcgaaggggtgtgagagatgcagggactggcaggagcactactactgggagcatatggatgcgagcaagatccgcttcttcaggtgcatgacaggagactttgctcatcgcattgtatgctgtgagtgatataaagatcttaatctcatgtccacttgccgagcttcagtttctttatcaaaaaatacggcagcaactctacatggcctaataactgaaagcaaattcagttaaactaccccattattatagtacaagaaaagaaaatttcccttcagttctttttccgtcaaaatatttgttcttttctagggttcacaagattactacagttagttgattacaaaacgatatttgccttgttactacactaccgtcatctgaaaactaaccatgcaagcaaagagcaatcacttttctgatgtcatcttcagagcgtgccagagaagttcgcaaagaacttcaaggggcagatcaccgaagagtttcacctgaaatcacctagcagcgctgagacatggcacgtcggtgtagagaagcatggcgacaaactattcctcgtgtcagggtgggagaatttcgccaaggctcatgagctggaggagaacgatctcctgctcttcgcttgctctggaaactcttcctttgaggtcctagtcttcggagcaagtggctgtgagaaagtgtcatccctgtttggcagtggacttggtccggacatgggcaaacaattcaatgatgtggtgcgtcgacatggtgtgcatcactctgtgactgtgagtgattctgaggataccgttgcgccgtcccagctggttcgatcccctcgtaacgccttgcctttgaaggaacccagtgggaaggctagaccaagtaaatatgaatcaccaaactccagcaacttcatcgtcaggcatgtggcaactggcaaagagggcactgatgatgagtatgctaactcaaactactactattcgttgtctgccaatcgactaggagacgaggaaaaggaagaaataataggtttggctccccatccgaccgaacaatcctgtatttgtgacccttctgaggaaaaaccatgttcagcgcagaaacaactgtctgatcatcccaagcaagtttgctgctgatcatcttggggaaagagcgcacaacatcatacttcgtaggccgaacaggaaggagaaatggcatgtcagctactatcactcacgccacacccggtgtttccagaacttagcgctgttcaagttcacgcgcgagaacaagcttcacgagggcgacatctgcgtcttcgaactgatgaaaggcgagaggagagtgacgatgaccgtccatgtcgtcagaaaggccaatggccggttcattctggtagtctgatctgacgcagtgcacctgtactgttgtagtttatgcagtgtgtagtgtgtaggggtactatgcaggggtagcattgcaaactggaagtgcctagtgatgcttgcaaggaatgcaactgcggttttgtgtcatgtaaggtagcttcctgatcagcagcatggcaagtagaacaaggtgtggcttgtgtgtaatatagaagtttctaggaaaatgttacactggcttatgcttttgtgcctgcttcagatctcccatctggtacagcagtgcttttgaacttcagaagtattatttcaaggaggaaaaagggattgttggttggtctacctgagttggatattaaataaattaaatgtaattaata

SEQ ID NO: 2868 - DNA, 2071 bp, Zea Mays
aagaaaataggagcagcttcacctcggaagctcagactcaatggttggtgcgaaggggtgtgagagatgcagggactggcaggagcactactactgggagcatatggatgcgagcaagatccgcttcttcaggtgcatgacaggagactttgctcatcgcattgtaagtttctaactgtccaaagcccactgatgctgttctttgttcctagaaaacatgcggttcaaattccacaaattttttggttgtgctgagcaatactcagctaaccctgtaatgcctagtttgggtactcttggaataagggggattggagtggatcaagaggtattgagggggattttgatctattatggatttaaacactctccaatccttccaaaccactccaatccaaaagtacaaactaggccttggggatatgttacttactgaaaccccactactctgttcttgctgccttaagtatcatgtatggatctaaatattaatcttacctaggagcacttgttgtgctgcaggtatgctgtgagtgatataaagatcttaatctcatgtccacttgccgagcttcagtttctttatcaaaaaatacggcagcaactctacatggcctaataactgaaagcaaattcagttaaactaccccattattatagtacaagaaaagaaaatttcccttcagttctttttccgtcaaaatatttgttcttttctagggttcacaagattactacagttagttgattacaaaacgatatttgccttgttactacactaccgtcatctgaaaactaaccatgcaagcaaagagcaatcacttttctgatgtcatcttcagagcgtgccagagaagttcgcaaagaacttcaaggggcagatcaccgaagagtttcacctgaaatcacctagcagcgctgagacatggcacgtcggtgtagagaagcatggcgacaaactattcctcgtgtcagggtgggagaatttcgccaaggctcatgagctggaggagaacgatctcctgctcttcgcttgctctggaaactcttcctttgaggtcctagtcttcggagcaagtggctgtgagaaagtgtcatccctgtttggcagtggacttggtccggacatgggcaaacaattcaatgatgtggtgcgtcgacatggtgtgcatcactctgtgactgtgagtgattctgaggataccgttgcgccgtcccagctggttcgatcccctcgtaacgccttgcctttgaaggaacccagtgggaaggctagaccaagtaaatatgaatcaccaaactccagcaacttcatcgtcaggcatgtggcaactggcaaagagggcactgatgatgagtatgctaactcaaactactactattcgttgtctgccaatcgactaggagacgaggaaaaggaagaaataatagatcatcccaagcaagtttgctgctgatcatcttggggaaagagcgcacaacatcatacttcgtaggccgaacaggaaggagaaatggcatgtcagctactatcactcacgccacacccggtgtttccagaacttagcgctgttcaagttcacgcgcgagaacaagcttcacgagggcgacatctgcgtcttcgaactgatgaaaggcgagaggagagtgacgatgaccgtccatgtcgtcagaaaggccaatggccggttcattctggtagtctgatctgacgcagtgcacctgtactgttgtagtttatgcagtgtgtagtgtgtaggggtactatgcaggggtagcattgcaaactggaagtgcctagtgatgcttgcaaggaatgcaactgcggttttgtgtcatgtaaggtagcttcctgatcagcagcatggcaagtagaacaaggtgtggcttgtgtgtaatatagaagtttctaggaaaatgttacactggcttatgcttttgtgcctgcttcagatctcccatctggtacagcagtgcttttgaacttcagaagtattatttcaaggaggaaaaagggattgttggttggtctacctgagttggatattaaataaattaaatgtaattaata

SEQ ID NO: 2869 - DNA, 1026 bp, Zea Mays
cgatctcaacatccatactgtcacacaggagccggcgagcgatggagaagaagaagaagagcagggccagggcggcgacggagacaggctcgccgccggttccagctactgctgctactactactcgaggtcttccggcaccctcctgactggtggtgaacgggatcagatgcggagtctggtgtcggttcagccaggcaatccggcgttcgtgactgtcctcatgaagacccatgttgggcacaagaacagcatgctgaccgtccaccatggatttgcggcggagcaccttgaggggagatcgcatgaggtcctgctgctgaggccaaacagggaagagaggtggtgcgtcaggtactaccacgcgagccacaccagaggcttcaactgccgccgctgggtcaagttcgtccgtgaaaacaggctgcgcaaggaccacgtctgcgtcttcgagctcatcaaaggcgccacgaggacgacgatgcttgtccatgtcctcaggaaggctgatggacggcttgcgctggtggcctaagctcatgcatgtgccatgttgcaagtgccgtgcaatatgtacccacgtacgtatgtgtgcctctacccttgctatgaacctatctatggggtaaatgatgtcatcatccacaactcatgcacaaataaacttttggcatgaaaagagatatgagacggtaggtgcatctctaaggaggagcattacaacacagattaagtcgccaatgatttcattcaaaaatgtcaacatcttgtgcaaacatcatttaactcatgtgaaaccaacattaaaattattcgtcaatagctgttttaaacaccaaaaccatgccatgtaacgttaaaattattaagtcttctcgaaatcctaacgaggaaactagctattgttgggtaatttcttcgaactttgctgtggaagaaatgccataatagcttttattcccccaaaagacacatcatttatcctttcgaaaggatgggatctacacaacagattcaagtaccctg

SEQ ID NO: 2870 - DNA, 891 bp, Zea Mays
aaaaaataagaatcccttaaaaataaagttatcaaactagacctacaattttttccgcaagtttgcagacgcacaggatttacttttaggcccacggttgaagatgacgcatctcaataatggacatctcccagcaaaagtgcaaaacacctcaaagacagatgacgcatctcccagcaaaatatctcagcaatggagcaaagcatccttcccatggtatggtctctcttgacactgatggcgaaccagacaatatataccagaagtaaccagcatacaagccgatggtctggcagacttaacttcgcgccagcctaataatgcatcaaacgcaagcaacccacaatacaatttacaagaatcagaatgggccgggtcgtctccaccattctactttgcaaaaacaactgaacagccacacaagacggacgatctgcgacgggacggatgggggtacagctctaagagagcgtgctggggaggaaagaaatgcacagatatttacacctcttcttctgcacacgacgaaggaaggtcaggcagtgaaggagctcggctcctcgctgtagactgtctcgctggcaccgaacacgggcttctcctcctcccacttgacgacctcccgcccgtagcggatcgccgaccggacggactcctggtccagagcgttcacgtacgacacgtagagcttccgccccgtcatcgactcgaacagcctcttgaacttggtcgccatgtagtgcgcagccatctggggcagtgtcgcgccggtgctgctgcgcgcagtcctgcggccgccgccgccaccgccgttgaggaggttgcggctgatcaggggagtgaagtcgctgaaccaatcgcacgaggtcagcggggaactgctgatcttct

SEQ ID NO: 2871 - DNA, 1291 bp, Zea Mays
caaacagcttgatgtcacggaggagcgcaggaatattaaaatcgtcgcagacacatacctttccccagaagccagacaccttatcgtaccaatagaaccccgggcggagcctagacggcgggcacgggcacccctgcagcaccacgagctcctcaggcgacagcttggagccgttgacgtacacgtcctccgcccgcagctggtttgccgcgcattcccgttcactcctcatgaccagctccacctctgctgcgctgagaagccgccggagcacgcgcgaccctcgccccagcgcgtcccgcctggactcggccactggccggccgatgcactccaggcacttgcgcccctccggcatggagcccatcgcccggagcacgcaccccacgcagtaccgcgcgccgcaggcgaggcacgactccttgtcgcggccccagaagccgcctccttttccgcacctgtagcagccgcgggtcctgccgcccctccagtgcgcaggggagagggagccgctcgactggccggcagcagcacggggccgagtctcccctgcgtcggcatcgtcgtcgtcgtcgtcctcctcctcatactcgtcctcgtcatcagaggactggaggagggagccgctggtctcggcgaaggtgaccacgggcgggtggtggcgaggcttcagcggcagcgcctcggagccgccgtcgccgtcgccgtcgcctgcggcctcgtcgtcggagggggaagaggggagctcggcggagtggtgcgcggcagcgtggtggttctcgatgacggaggtgggggaatccaccacagctcctcccccggctggcgcggggacggcggagcggggcgccgggtgggcgtgcgcgtggatggcgttgcagagggaggacggggtgagcgggcgaacgacggggagtggagacgaggaggcggagggggaggccgggggcgaggaagacagcgcggcgagcgggatgcgggagaggtcgagcgggatggcgcgcgggagcgtgtaggggagtggcgggccaacgtactccgccgcgaaagagtagtcgctggctccagcggccatggccggaaacggctgcagcggcgaggagagcagtgaacaggaggcggcggctagggtttcgggagaggcatgggggtgggaaaccctagacgaggaggggaaagcaggatgggggaggagtagctgctttttggagcatgcgcgagggagcgagacgaaagggaggagagatggagaaggcgactgcttttgcctgtgaactgtgagctgggtccg

SEQ ID NO: 2872 - DNA, 2943 bp, Zea Mays
cagcatttttctctcgtcatcgcgcgtggacatttgctgtgggcacagctcgccggttgccgccgctcagcttcagaaatatcccgctgccgttcggtggtatttatctccccagctcgctcgctccaggccttcccctgccgacgcgcctattccctggccgaagccacctggtcccaggtccggtcggccggctcagttttttttccagtaccgcgcgtcgtgcttccccttccagccgaccgaagctcccagctctagccatggcgcgtccggttccctctcccatggctccctgtccgaccggccgagatccctccatggccgcgagctcagcccctgctatgctctcgctgccgagttcctctgcgcgtcttctctccctgctggcgcgctcaaattcctgtgctcgccggagctctccctgccgtgcggctacaactcctgcgcccggccaagtttctctgcgcgccgtagttcgcccagcccctctgctcgccgagctctatccgctccccatggccgagcttcctgcgtgtgctgccggatccctacaccagcgccgtagctccctctgtccagcagcttctctctcctggagtttctttgtttctttgtgttctgctcagaccctgctccattccctcgccggccggttgtgcgccctggtcggattccctgcgcgccgcgtgagctcgccggcgtgctccccatccggccatggtgccctgcgccggtcgagtttctctctgccgcgcgcagctcgcccaatctttctgctcgatctcgtcgaaccctaaatcccggacattaaacaaaaataagcgaggttcctgtgcatcgcttatcaagtgctcggtcggagactgtaatcgaaggttgttgtcgatccatacgtcatccagaattccaagagtcgggtgaagacggaggccaacagcgtgatattctccaagtgctcgacaccaaagctgaattagaatccttgccgtgttcgtggataacgcgtcagatttagaatggtcaaagttttgtgctgctgatggtggtgttaagtgccggtgggctcggccttcttataagtctaagtaacccttctatacttcttattgaggatggtcacttgagctagcatatattttaaacttacaaaaagatttgcaatatttaaaagtgaaattcttttgtaaccactccaataaatacaatgtaaacttgttgtaacttgttaaatttggtaataagatttccgctgcaaaattgttggtgtgtgatttgtgtttacttaatcctgcggtcctggttgtaagtggtttattcgaggtccttggggcactcggacagatcctgttaagttatctagtgcacatgcatggtcgtctgaggtctttgagacaaggacaggtgcatgtgggcccgataccttgcgaggttctgccacagtgcaacactatatcagggatctgaagtgcccccgaggctccttgttgtatggtggcagtgacgaagatgacttcctttactgtctgccagacaacaaagagatacatgtctgccaggaaatgatggtcaatataggatatccgaagcttgaacttggcttatctgtaatttccaaggatgagtttgcagatagccttgcttacaatagtctgaaggtttgtatactttgacttgttgtaaaataaattatttttatagcctttcttgctatcattatgttctcattcttcgttttctagggattaattctaagcaaggctttaaaggcctagaaggaagcagaagatgagagctgccaaatagctcttgggaatcttcgctcagaagtcatcacactatggaacgaagctctcaaaaaggataaggtattactttccttagtggataggctgagatctaacgaagctaaaattgttgcacaagccgaagtggaagaactaaaaaggaaggttgttgaagcaaccgaaaaatttgaagttgaggcggtgaaacatgaaatttgcaagatcgaaaggtcaagagcacaaaagaacaccgatgagctacgtccttcgaaagacaaatgttatgaaatatccttagaatgagtcaagaaattaaaggacatatttgctagggttggggcatattcttctgagcaaaaattcatccacgacgaccctgatggagttgtccagtggatcagcggggaagccgaagcttttgacgaaatattaagcgaacgaggacatttctgcgcctttgctggtgcacggggggccacgtcgatcttagagaaagctggttgcgaacatgccaaggctgcagttcagccagaatttgtttttttggtggatgacattaaaaacctttgagccgaagcttctacactaggcaggaaattttactacgaggtgtggatgaagggcagccgtgagatagttgatgaagctattagaaagaatgaaaaagaatctcacgacgctcaagaagaagccaaacgagctgaagaagctgctgagcatgcgaggcttataagtacctttactgaggtatagcttcagaattcgtttttagcttcggaattaacaaacatattttatgatgtagctgaactttcaccgccaccggagccatacaacccagaagccaacccagccttgaaggaagcgctagatatgattataattgctaatgaagccgttgacaaagctgtcaacagattgcttaacgaagccgccaaggaagtgttgaaagaagattaaaactttgtatatttgagagcttagtttttgtacatatctttcgcttttgtaagaaccgagtatcaattatttgcatgtgtattaatgtaatatattcctttgtgatgcatgaaaccttcgtacataccatttttgagccgctggtgaaaaaaacaccttcctttgttttcatgtgtcacgaagaaaaatgttcccc

SEQ ID NO: 2873 - DNA, 4107 bp, Zea Mays
cagcatttttctctcgtcatcgcgcgtggacatttgctgtgggcacagctcgccggttgccgccgctcagcttcagaaatatcccgctgccgttcggtggtatttatctccccagctcgctcgctccaggccttcccctgccgacgcgcctattccctggccgaagccacctggtcccaggtccggtcggccggctcagttttttttccagtaccgcgcgtcgtgcttccccttccagccgaccgaagctcccagctctagccatggcgcgtccggttccctctcccatggctccctgtccgaccggccgagatccctccatggccgcgagctcagcccctgctatgctctcgctgccgagttcctctgcgcgtcttctctccctgctggcgcgctcaaattcctgtgctcgccggagctctccctgccgtgcggctacaactcctgcgcccggccaagtttctctgcgcgccgtagttcgcccagcccctctgctcgccgagctctatccgctccccatggccgagcttcctgcgtgtgctgccggatccctacaccagcgccgtagctccctctgtccagcagcttctctctcctggagtttctttgtttctttgtgttctgctcagaccctgctccattccctcgccggccggttgtgcgccctggtcggattccctgcgcgccgcgtgagctcgccggcgtgctccccatccggccatggtgccctgcgccggtcgagtttctctctgccgcgcgcagctcgcccaatctttctgctcgatctcgtcgaaccctaaatcccggacattaaacaaaaataagcgaggttcctgtgcatcgcttatcaagtgctcggtcggagactgtaatcgaaggttgttgtcgatccatacgtcatccagaattccaagagtcgggtgaagacggaggccaacagcgtgatattctccaagtgctcgacaccaaagctgaattagaatccttgccgtgttcgtggataacgcgtcagatttagaatgaagatgacccaagttgaccccaagtgcgggctactccgtatggtgatgctgatggacgaacctgtctgatcaagtgctcggacaagaatgattatcaagtggtcatcgtctaacaaacactaacctagtgttccttcaggcaagctccggtgaatttgccccttccttgtgttttaaatgctttttcaccttatctgatgcattaggtgataggagttgtgtgataaacaattgatgcattaccattccttggaaactccttaatcccggttttataaaaagaactgataatgcttagccctgcttagaaactgaaaaatcatttgtttttcaaaaagaatgattgtggaacattggttatgggcctttcgtttcaaaaattaaagcaaacttatggtgatgattccacttcggtcggagtgggttcatcattcggaaaagagtacccctgtcgggtaccaaaaatgggaaaatggtttgaatacatctagaccagacgctgagcggacaaggtcgctcgtctgtgtcgattaaggaccgttcgatgtaggcctgttgtggtggagaccttgcaactagccacatgctccggtaagcctgaacccggctattccatacgtgaaaagacaaccgcgcactgggcgtgggagatggtgggagtagcgtgtaccctcctggctagaggctggatggaggagtactgtgctcccgggtagcgctgaccggttcacattatggaggatctgtgggaacggttgacatatgcaagggttaagtgctacatatgtcatgtggttagggatccccatctgggtataatcggttcgaatcgtcgttgctcctcggtcatggagactctaccctccgaccactcatcgtagttgacaagtgaaatacgaattggctaaaagaaagctagaccaggacaagtgaatgctctagattaggaaaatctagattcgggaaaagtacttaacttgtgaagtaaaattttggcataaggatttactactagtaagctcttctgcaaacagagtctttgattcttgataagccatatcttgaatccctctagccagcatacccttgagggtcttttctttagtcgggtaagtcttactgagtaattccgtactcagggttttattccctattgtttttcaggtcaaagttttgtgctgctgatggtggtgttaagtgccggtgggctcggccttcttataagtctaagtaacccttctatacttcttattgaggatggtcacttgagctagcatatattttaaacttacaaaaagatttgcaatatttaaaagtgaaattcttttgtaaccactccaataaatacaatgtaaacttgttgtaacttgttaaatttggtaataagatttccgctgcaaaattgttggtgtgtgatttgtgtttacttaatcctgcggtcctggttgtaagtggtttattcgaggtccttggggcactcggacagatcctgttaagttatctagtgcacatgcatggtcgtctgaggtctttgagacaaggacaggtgcatgtgggcccgataccttgcgaggttctgccacagtgcaacactatatcagggatctgaagtgcccccgaggctccttgttgtatggtggcagtgacgaagatgacttcctttactgtctgccagacaacaaagagatacatgtctgccaggaaatgatggtcaatataggatatccgaagcttgaacttggcttatctgtaatttccaaggatgagtttgcagatagccttgcttacaatagtctgaaggtttgtatactttgacttgttgtaaaataaattatttttatagcctttcttgctatcattatgttctcattcttcgttttctagggattaattctaagcaaggctttaaaggcctagaaggaagcagaagatgagagctgccaaatagctcttgggaatcttcgctcagaagtcatcacactatggaacgaagctctcaaaaaggataaggtattactttccttagtggataggctgagatctaacgaagctaaaattgttgcacaagccgaagtggaagaactaaaaaggaaggttgttgaagcaaccgaaaaatttgaagttgaggcggtgaaacatgaaatttgcaagatcgaaaggtcaagagcacaaaagaacaccgatgagctacgtccttcgaaagacaaatgttatgaaatatccttagaatgagtcaagaaattaaaggacatatttgctagggttggggcatattcttctgagcaaaaattcatccacgacgaccctgatggagttgtccagtggatcagcggggaagccgaagcttttgacgaaatattaagcgaacgaggacatttctgcgcctttgctggtgcacggggggccacgtcgatcttagagaaagctggttgcgaacatgccaaggctgcagttcagccagaatttgtttttttggtggatgacattaaaaacctttgagccgaagcttctacactaggcaggaaattttactacgaggtgtggatgaagggcagccgtgagatagttgatgaagctattagaaagaatgaaaaagaatctcacgacgctcaagaagaagccaaacgagctgaagaagctgctgagcatgcgaggcttataagtacctttactgaggtatagcttcagaattcgtttttagcttcggaattaacaaacatattttatgatgtagctgaactttcaccgccaccggagccatacaacccagaagccaacccagccttgaaggaagcgctagatatgattataattgctaatgaagccgttgacaaagctgtcaacagattgcttaacgaagccgccaaggaagtgttgaaagaagattaaaactttgtatatttgagagcttagtttttgtacatatctttcgcttttgtaagaaccgagtatcaattatttgcatgtgtattaatgtaatatattcctttgtgatgcatgaaaccttcgtacataccatttttgagccgctggtgaaaaaaacaccttcctttgttttcatgtgtcacgaagaaaaatgttcccc

SEQ ID NO: 2874 - DNA, 4581 bp, Zea Mays
cagcatttttctctcgtcatcgcgcgtggacatttgctgtgggcacagctcgccggttgccgccgctcagcttcagaaatatcccgctgccgttcggtggtatttatctccccagctcgctcgctccaggccttcccctgccgacgcgcctattccctggccgaagccacctggtcccaggtccggtcggccggctcagttttttttccagtaccgcgcgtcgtgcttccccttccagccgaccgaagctcccagctctagccatggcgcgtccggttccctctcccatggctccctgtccgaccggccgagatccctccatggccgcgagctcagcccctgctatgctctcgctgccgagttcctctgcgcgtcttctctccctgctggcgcgctcaaattcctgtgctcgccggagctctccctgccgtgcggctacaactcctgcgcccggccaagtttctctgcgcgccgtagttcgcccagcccctctgctcgccgagctctatccgctccccatggccgagcttcctgcgtgtgctgccggatccctacaccagcgccgtagctccctctgtccagcagcttctctctcctggagtttctttgtttctttgtgttctgctcagaccctgctccattccctcgccggccggttgtgcgccctggtcggattccctgcgcgccgcgtgagctcgccggcgtgctccccatccggccatggtgccctgcgccggtcgagtttctctctgccgcgcgcagctcgcccaatctttctgctcgatctcgtcgaaccctaaatcccggacattaaacaaaaataagcgaggttcctgtgcatcgcttatcaagtgctcggtcggagactgtaatcgaaggttgttgtcgatccatacgtcatccagaattccaagagtcgggtgaagacggaggccaacagcgtgatattctccaagtgctcgacaccaaagctgaattagaatccttgccgtgttcgtggataacgcgtcagatttagaatggtaagccgattcaaaatttccgttagcttgattattaaagtagttcgatgaatgtgatatgcttattttcatgattttgaagtagtcgcgtcgcggtaggattaaatatatgtgaagcacgatggagttaggaatgcgaaagatagattaaatagaattattggtctcaataaatgttagtaatttagcatgcgtatattgtgatgatcgatttagataaatcagtaaatcaagttaattaggatacatagtttatagagttaataaaaagttagaaataaaaatagatgttcttgtatcaatttggttaatggatgtagtcgatgccctactgtgatatccatgatgcttactgcttggttttaagtggttcgtcctttttagcgtagattatttatctcgtactatgtatactcgtgctcatacatgtgcatcgtgcatctcatgaggtacgataaataatcgcgtatgcagaagatgacccaagttgaccccaagtgcgggctactccgtatggtgatgctgatggacgaacctgtctgatcaagtgctcggacaagaatgattatcaagtggtcatcgtctaacaaacactaacctagtgttccttcaggcaagctccggtgaatttgccccttccttgtgttttaaatgctttttcaccttatctgatgcattaggtgataggagttgtgtgataaacaattgatgcattaccattccttggaaactccttaatcccggttttataaaaagaactgataatgcttagccctgcttagaaactgaaaaatcatttgtttttcaaaaagaatgattgtggaacattggttatgggcctttcgtttcaaaaattaaagcaaacttatggtgatgattccacttcggtcggagtgggttcatcattcggaaaagagtacccctgtcgggtaccaaaaatgggaaaatggtttgaatacatctagaccagacgctgagcggacaaggtcgctcgtctgtgtcgattaaggaccgttcgatgtaggcctgttgtggtggagaccttgcaactagccacatgctccggtaagcctgaacccggctattccatacgtgaaaagacaaccgcgcactgggcgtgggagatggtgggagtagcgtgtaccctcctggctagaggctggatggaggagtactgtgctcccgggtagcgctgaccggttcacattatggaggatctgtgggaacggttgacatatgcaagggttaagtgctacatatgtcatgtggttagggatccccatctgggtataatcggttcgaatcgtcgttgctcctcggtcatggagactctaccctccgaccactcatcgtagttgacaagtgaaatacgaattggctaaaagaaagctagaccaggacaagtgaatgctctagattaggaaaatctagattcgggaaaagtacttaacttgtgaagtaaaattttggcataaggatttactactagtaagctcttctgcaaacagagtctttgattcttgataagccatatcttgaatccctctagccagcatacccttgagggtcttttctttagtcgggtaagtcttactgagtaattccgtactcagggttttattccctattgtttttcaggtcaaagttttgtgctgctgatggtggtgttaagtgccggtgggctcggccttcttataagtctaagtaacccttctatacttcttattgaggatggtcacttgagctagcatatattttaaacttacaaaaagatttgcaatatttaaaagtgaaattcttttgtaaccactccaataaatacaatgtaaacttgttgtaacttgttaaatttggtaataagatttccgctgcaaaattgttggtgtgtgatttgtgtttacttaatcctgcggtcctggttgtaagtggtttattcgaggtccttggggcactcggacagatcctgttaagttatctagtgcacatgcatggtcgtctgaggtctttgagacaaggacaggtgcatgtgggcccgataccttgcgaggttctgccacagtgcaacactatatcagggatctgaagtgcccccgaggctccttgttgtatggtggcagtgacgaagatgacttcctttactgtctgccagacaacaaagagatacatgtctgccaggaaatgatggtcaatataggatatccgaagcttgaacttggcttatctgtaatttccaaggatgagtttgcagatagccttgcttacaatagtctgaaggtttgtatactttgacttgttgtaaaataaattatttttatagcctttcttgctatcattatgttctcattcttcgttttctagggattaattctaagcaaggctttaaaggcctagaaggaagcagaagatgagagctgccaaatagctcttgggaatcttcgctcagaagtcatcacactatggaacgaagctctcaaaaaggataaggtattactttccttagtggataggctgagatctaacgaagctaaaattgttgcacaagccgaagtggaagaactaaaaaggaaggttgttgaagcaaccgaaaaatttgaagttgaggcggtgaaacatgaaatttgcaagatcgaaaggtcaagagcacaaaagaacaccgatgagctacgtccttcgaaagacaaatgttatgaaatatccttagaatgagtcaagaaattaaaggacatatttgctagggttggggcatattcttctgagcaaaaattcatccacgacgaccctgatggagttgtccagtggatcagcggggaagccgaagcttttgacgaaatattaagcgaacgaggacatttctgcgcctttgctggtgcacggggggccacgtcgatcttagagaaagctggttgcgaacatgccaaggctgcagttcagccagaatttgtttttttggtggatgacattaaaaacctttgagccgaagcttctacactaggcaggaaattttactacgaggtgtggatgaagggcagccgtgagatagttgatgaagctattagaaagaatgaaaaagaatctcacgacgctcaagaagaagccaaacgagctgaagaagctgctgagcatgcgaggcttataagtacctttactgaggtatagcttcagaattcgtttttagcttcggaattaacaaacatattttatgatgtagctgaactttcaccgccaccggagccatacaacccagaagccaacccagccttgaaggaagcgctagatatgattataattgctaatgaagccgttgacaaagctgtcaacagattgcttaacgaagccgccaaggaagtgttgaaagaagattaaaactttgtatatttgagagcttagtttttgtacatatctttcgcttttgtaagaaccgagtatcaattatttgcatgtgtattaatgtaatatattcctttgtgatgcatgaaaccttcgtacataccatttttgagccgctggtgaaaaaaacaccttcctttgttttcatgtgtcacgaagaaaaatgttcccc

SEQ ID NO: 2875 - DNA, 5628 bp, Zea Mays
  misc_feature (1)..(1): n is a, c, g, or t
ntcacatccctatccctaatgggtcggcagcccaaagggacggcagatcgatccggccaaagggcggccagcggcgctaggagggaggaccgcgatcggccgccggtggcgcagagtgagaggggcgagccaagcgggcgcgccggagaggaaggggtcgacgtctcgggcggatccaaccacggagacaagtgactgggcgaatccagtggaggcgggcccgtccgtcgggcgtggcgtcccctaggccggggaggccggcggccggccggcgaggggagggagcagcgaattgggacggtcagggcaaaggggtggccggcggctgggaagggagccgccccaggagggaaggatgagcctcccggggcagcggctagacctaggcaggcggctgtgggggttggcaggtggcgactgtgggagttgggttgtgggaaccctaatcctctgataccatgtagaattatgaaagtgcttgatatattgataggagatggggtacaatatatagactcacaatcctaaccctaatgggtcgacagcccaatagtggtgccggcccatacacacacagtctaccaattaggacgcctaggagactgacaggaagtggccggcaacgctgtctcgactacaagacatggttcgtcttcttgcggttccgcatgttgtgcttttaattgtcatccttatttgcttgggctcctaccaatttgtgcgttgcctgatgagtgtttgtgcaccgttgtcaaacaccacgtccacatgaagagacagctcggtgagcctgcggagtcatagggtatagtgtacctaaagttgcccaaaacgagccccatgtcatattggagctactccgatggccttgacatgacagcctattgccagcgtcgtctgtcgtcaaagtgaaccagatcgagtgccccagagactcccgtgatgaccttggtctagccacctacgtccgactcatgccacgcttgttgtctggcatgtgcgccacgatgccgcattggtcatggtcgtccttgtgcccgccgccttttcaatgtcacgaggtcataccagtacaccacaacgcggttcattgcatccaaatctactgatgagcttcaatcaatcaaatcaaactaaaaaataacaataatggtatggcgtgatatatctgtatttattcattattatacatatatgtatggtgcctcaggctatataccatatatctctgtcgttctgcacccggagttcgagtccggtcttgttactactacataatatttgtacaaaaatatttagaaagattgccaccacgtttccgtgaaatatttggactctacaagcttgaatcaaaaaggagatagaagttgggagtttgcttgctttgtaaacggacggagaatataaaataaggaacacatggacatgatttttttgtctccctcttgatagagaactaaataaagaaagacgagcaaataaatagcagaacgactcttaccttttctatttgattattatataagggttctatttagagtactcatgatctgaggaacctatttagattaggattcctactccatattggtctagatgaagtcttgacaaagaaagtctctattgtccggtagttagagagagacgaacctaaaaatggatggacgaaaaaataggctgaaattttgtctctttattattagctatagattagggactacttttttattcatgatccgctgcatagtgcctagatgcccttaaattttcataatgagtatttgccatacataaataatcagaagaactccccgcgcccggacgtgcggacgtaggcgtcgtgcccggacattctgacgtaggtgtcgcgtctagacactcgtgtccactgtccgcaggccatgggacgaacttccatggatgcacgcacctctgcttgtggtacgaaacgacgcaggacatacaagtacttccctggatgcatgtgcctcttcctccacccgtccaactgaaagctctattgtgggttttggtggtttggatgacaacccaataaaaggactgacaagtgtgttaagcgttggacaggtgcttagtgtaaaacttgtaaagttcaacacaagtgttcaagagtgatggtccaaaggctgagttgattatgggtgtggacttcacaagtgaaggagaagattgcttatgtgagacttggtgtgcatatcttggagacaactggtcaagctaaggatagaggcaagaagagtttcgaggtaccgagtgcacggaagaaggtcaaggaggccgaggaacccaaagccaggggtgatgaagtgtcagggcctaaagaggcccacgaaggggctgcggcagcaatagctatgggccctccaatggggattagataaggatagttagagataagattagaagattagttgagattatttaggagattagttgagattatctaggaaggttatcggttagtagtttgttgagagtttttaggagagttttaaggagataaggatctctagctagataggggcggccaaccggcctatttatgtaatcaatggatgagaaataaagcaggcaagaattaaaggaagaaaccctcctcttgctcggtcgtgggtagaggcacccggccgacgttcctgcccatcgatacccctctctaatccctcaccgatctagcgaccataacatctggtatcggctatcttgggtttcgacctgatcccatggcttctgctgccaatttcgcggcgtcatcatggcaaccggcgtccccatctccatggacagcgccgcatgtcaccttcgtcacgccgtcctggcaaccgacgtccccatctccatgggttgcgccgcatgccaccttcgtcacgccatcctggcaaccggcgtccctgtctccatgggcaacatcgcctgtcaattttgtcaccacatcctggacgtcggcgtgcccatccccagggacaacgccaaatttcatcacatcatcttcgttgacaacgtctccgtccccatgggcgacgccactaggggcagccacggctcagcaatcaccagatccatcgatgggggatttgtggaccaacataagggctgatctcgcaaagatgcaagccacgctctagaaggttgagcaagggttgttgcaaatcaaggcagcagtgcaacatgagcagcaccagctggcgttgtccgcacggctccagacgtcggaggctgtgggcatacaagctgctgctcgtggcttccttgcacgacggagagtgcgggagatgcaccggcagatgctcgaggcagccttggtgacggttgacctcggcacacggggggcgcgacctcgccctgtcggacggccatcagcagtggcatcgggccgctatctccaagtgcgagcatggtacgtgtcccgtgggcgacgaacttcaactctacggcagcggcggtagggaagtcactcacctcatcatcaacaagggcgcactatttagcgccaccacattccgctaccggccgccacgagggcgcctccgctggttattgttgcaacctattccaggtgcccgtccatgtgctcctctttcgtacagatggcatccatgggatccaggtggctgcacacgtgcaagtccaatgcgcggagggtgtccaccttatcttatggggtaaaaaaattcagattcggaataataagataagccgagatgtaaaaggcatgtcttctaggtgtctggttttgggtcaagtagactcgatctttgagcacccgttatgcggcagctcgagggcgagttgcttgtccagtaggggtgtagtgtcagggcctaaggaggcccacggaggggctgcggcagcaacagccatgggccctccaagggggattagataaggatagttagagataagattagaagattagttcagattatttaggagattagttgagattatctaggaaggttatcagttagtagtttgttgagagtttttaggagagttttaaggagataaggatctctagttagataggggcggccaaccggcctatttatgtaatcaatggatgagaaataaagcaggcaagaattagaagggagaaaccctcctcttgctcggctgtgggaagaggcccccgaccgacgttcctgcccatcgatacccctctctaatccctcaccgatctagcgaccataacaagaagacttgcaagtcaagaattgatcgagttgagaaaagatatggtgcatcgagaatcactatctaaggacatgacttacaaccaatgatgtaacatctatggttatgtggtgtaagtcataaggctcaagatcaagctcaggtcataaagcaaggtcactagaagtagtgtcaaagcgagaacctggaagcaactcaaaagagctaagggtgtgtttggtttgacttttggctttggcttttgtccccctaaaagccaaaagccaaccaaagggctggatccaggaagcagcttttcctaaaagccgactttctcgtagtgcaaatctgaaagcacccctggacttgcttttagtggcttttcggatgaaactatgaaaacatatatcgaagaatttttaacgatttttagtggtttccaccaaacggtttttagctttttaacagctcacagcctacagcagctttttccacagctcacagcccacagcaacttttttcacagccacagcccaaccaaacagaccctaagtttactttgaccatgagtttgggttgttcttgtgtttggatatgttctgtgtgacctatgcagggtgttggagctcatagataacaatctggatcaagtcttggagacttggagttttggagtccaacatctacctcgaacataaaagctgggagaatatatgaaaagaggtaatcttctgggactcagtcaattgaattatactctaaatgtgtttgtctaagtcacaggaagatcctcccaagagtcgaagtcaagttgagaagaaacagaaaaaagcaagcttgggccagtctgggcctcaccggacagtcgcctgaggcgccctcgagagagtcgaaaatgcgctgcttgtccggggttgacctcaggcgagccgttacgcgggttttgtatatcatagtgatgtttatcgttttatatctatgttttatactatttttaactcctgggacaacatacgggcacatacctattactctattaagaacctaatgtgggcacctggtgcttcaccccgcctctgcgtcgtgccctgtgggcctcacgcccgcgcccgtgcagcgctctctcagctagtgcaatgtggacccccagcgcccgcgccgccacctgcctgtctagcacctgaccccgcccatacagctaccacaccgcacaaaaaatagtgcagagcgagcactcaaacatacaccccctactctagaaatgtggggctaaccacaagaccacacgtaccttagtgtttagaaacaaacaataattatatttgaataaatatctcaatacttatttatatgatatataacaaccgtagcaaagcacgtgcaactggctagttaatctataattagcaaatgttcaatgtagcatcacatgag

SEQ ID NO: 2876 - DNA, 10559 bp, Zea Mays
gagagttttaaggagataaggatctctagttagataggggcggccaaccggcctatttatgtaatcaatggatgagaaataaagcaggcaagaattagaagggagaaaccctcctcttgctcggctgtgggaagaggcccccgaccgacgttcctgcccatcgatacccctctctaatccctcaccgatctagcgaccataacaagaagacttgcaagtcaagaattgatcgagttgagaaaagatatggtgcatcgagaatcactatctaaggacatgacttacaaccaatgatgtaacatctatggttatgtggtgtaagtcataaggctcaagatcaagctcaggtcataaagcaaggtcactagaagtagtgtcaaagcgagaacctggaagcaactcaaaagagctaagtttactttgaccatgagtttgggttgttcttgtgtttggatatgttctgtgtgacctatgcagggtgttggagctcatagataacaatctggatcaagtcttggagacttggagttttggagtccaacatctacctcgaacataaaagctgggagaatatatgaaaagaggtaatcttctgggactcagtcaattgaattatactctaaatgtgtttgtctaagtcacaggaagatcctcccaagagtcgaagtcaagttgagaagaaacagaaaaaagcaagcttgggccagtctgggcctcaccggacagtcgcctgaggcgccctcgagagagtcgaaaatgcgctgcttgtccggggttgacctcaggcgagccgttacgcgggttttgtatatcatagtgatgtttatcgttttatatctatgttttatactatttttaactcctgggacaacatacgggcacatacctattactctattaagaacctaatgtgggcacctggtgcttcaccccgcctctgcgtcgtgccctgtgggcctcacgcccgcgcccgtgcagcgctctctcagctagtgcaatgtggacccccagcgcccgcgccgccacctgcctgtctagcacctgaccccgcccatacagctaccacaccgcacaaaaaatagtgcagagcgagcactcaaacatacaccccctactctagaaatgtggggctaaccacaagaccacacgtaccttagtgtttagaaacaaacaataattatatttgaataaatatctcaatacttatttatatgatatataacaaccgtagcaaagcacgtgcaactggctagttaatctataattagcaaatgttcaatgtagcatcacatgagtaaatcataacataattaggctctatagactggttgtactgtttagtcattacctatgtaattagttttataattagattatatttaatactcctgactagtattaaacatttaatgtgatagggctaaaatttagtcaagtggatccaacaggtcttaatttaaatttgatttgatgacgaaattagggtatttaaggactgcatcgttcttctctcctcttctttcatgcccagtgtagtcactggtctaagtcaagactcaagactagccgaaagatccaactcaagagatgacttgtcgggtatcgtaattagaggtacctggattacatccctaaacgtgcttaaccccgaggttgccaccaggcacattcccgaggacaataaggtataaaccacgattcgcccaaggcccctctcggcggtcacccataactttgcctcgcccggacctgccctcggacaaggtacatactcagtagaatcctcgtcccagccgaggtcctctctccccataactaccgtctccgcctcgcccgagcccgtctcgagcaaggaaggcatccccgaggcaggtctcagccgaaggtcacaggggacatgagcatttaatgagcatacctaccccacgcagcgctgcaggcgaacaggagcgacaagaccgcggtctcgtcggctttcaccaactacgatgatgtatgcctaagtacaacggctgttgttcccccacgtcacctaccaactactgatgggacacgcatacacgcattcgacaaagcgcgggactggacctcgagaggaaagtacacctcgcccgagcccagcctcggctacttactccccgcgaataccgcaggagaccactccttcaactgtgtcgcgcacgtctacgaatcccggtgcgggctcagtcacggcctcgggcagactttcgcctcgcccgagcacggcatcgacctcgttattatcaacaaaagggcgcccgacgtcaccgaaaacgggggagctgacatattacccatgggctttttgccatgctcagcactacaccaaccactacgacatgtgcaacttccccatcaggtaggctcgggtatgtgaccgagccctcggccctagcctcgactctctgcgtagtcaaagatgcaaatacaggaaccagacgtctccaccaggcataagtcaacagcaagtacaagcctcataccacaggccataccgtctacaggtgctcaacctcgcctcctcaccatacccggccaaccccggcactcatggcagccctccttgaggctataaatagaggagtctgtggcttcagggaggcgggcgaacacttcacggttttcacctccactgcgatattgacacttgcctcaatcaaccccagggacttgggatcctcccctctctcgacctgtttgtactccctactgcaagcacttaggtgcaagtaatataagtctcgtcctccctctgctggaagtagggctttctctcgcccgaaccaggataaacaacttgtatcaccttgcatcactcatctgggccagggcacacaacattatttcactggttggtggatcctcggatcaagataccaacaagactcttccgtttgagtctatggagcagtgaaagatatttccaaaagagagatggaactctccttacattgacgtctatagatggccaaatggattgttcctggcaggccgacccgaagcacggcccatttaatagtgcatgggtcgctacatctatagaaggtatacgtgctgctgtcggtataccttctgccgctataccttctactgttattgcagtatggatgctccagttcttcgtgtgccagcgacatgttccccctcacctccccttgcacttccgtcacctttagcgataggttgttgctgtgtgtgtccgcttcgcagatccttttcaatctgcttctaatggggttcaattcgagttctacatggattagctgggctggccaatgtacggtgacagcaaattttcgtctacacggaaaggccgcagatgcacagataggagaagggcgtttgtgcgtgtgtgtacttttggctcccactgactatctgagcacaaggagcaagtcgaagcagatggtttgtgcttccgtggagaattcaggcttgatgctccgagatataggaatttgtagacgtcttaactagcagctgctactaatctagatttcctagctacatcatttttttcaattttctatcccttttctcctctcccctacttctttattatatccattttttcagaagatacattcaaacgggatgctcttcgttgactacctgctattgcatattatactgattttcgaatgctacattctgtaatgcctgcggcctctgatttttcagtctgttccctattgttataaaaaaaatagaagatgtgccagcacatattgctagcctagcatgctgcttttcctctcttcgtacgagtgcactggctgtagtgtgccatgttcttggccagtgatgtatcatccgtcaatgagtcagctttcagatttattaatatacagaggtgtgttatgctacagacacttcatgacatttcatgtggattgtttctacaccatatagtttggtgcttttgtaccttatgtgaataaaagtttatgaacttggttcgatccaagttcccaaatttccaaaaatgcaaatccaactctctaagcttattaaccgtttcacgtgaggtccaagttactataacttgaattaatctgcctgcatatcatgcggataagctgattgcatgatgatataatcaaaatgtggggcctatatgcaattactttccagaattttttttcttgcgtgagtagtttgatttcaggatattctgatgattatcaggtgaacataaatttctataaaaaaaatagttcaacataaaaattgtgtttgtctgctatacctgtcgattcaacagcgtggaaaactggtgatcttgttgacagatgcatcatgccagcccttagctaagaatctagtgaggcatttaaatatatgaaaaaaaataaaaataacaaaacatgagaaaccacaaaagtctggcatctgttggatttgagtgaggttagaaaacgatgcatgtggggtcaaaaattttagctggacaacaacgacatgaattagcgggttgccactatttctagggcttttttatgtttcgtttggattacacgtatattgtttgagtcacgggctgtgtacagtatgtacattcagctgtccccctgtgaacaaggagatatgatgatgtttactaagtcaaagcatgcattgttatggtagataactacagttattggtagcaaaagggcaatatgatcatgtttcctaattaatagtggacaaaatatttgcattgttttcaccgacagcatccaagcaacaatacaaatgtcatcatgtatatatacacacctatacatagagcacttatcatcaccaaaggctaccgtgttcttcttccacacaggttatcatgtatttctttattagtaattgctttgaaaaaagtatctttttagcattttaatagactgtttgcagctcggtagttatgtagtgcattcgattaagacatgcttactatgaaagtatgatagcattagcacaaaacaacatattatgtttctattcattacactgacgttgctcgattattgattcttattgatattataacagtttcaaaagagagaaaagctaaggatagtacgtgatcatggctacgcaggacaagaccagttggcccgagttgattggcaaggagattaatgatgcaattgaagtaatagaacaagagcggccagatgtaacattctttgagtcactagatgtggatttgaacgagaccccgaggccttcagaccaactcgcacccggaactatacgtgttgtcatctacttcagcgtggacccaaacactaatgaggaaatcgttgaagaaactccatatatcaaggcataaaaaggtataaagaccctttgctaataggctagattgcctactagcaaaggctacctttatacctttttatgccttgatatatgaaaggcaagcatcaattgaataatgcgagtgtgatgtctgatcttgctttcatggttgatttcatacatttaagtgtatgtgttgaatctatatatagtgtcctactcaatatattgaataataaacaatgagatgtcttgtgttgacgagtgatgtatgttcggtgatgtatttattagtcctttatttttaggcgcaattatattttagaaattggtgagcaatacttgacacacttgtggatggttcccaatattggtgtcgagcattccgatcatggattaatgccgcagcaacttttgatccgatcgtcctaggtacgaacatcatttctaggatatgattaataaaaaatgaacgagatgcatacaatatatatgaagcactagttataaccattacttatgggtgtcatcggtcgctgctgtagggtctatatggtggactagagggggcgaatagtcttttctaaaacttaacgttggctgaccgaaataattgcggaattaaacttaaaggtctagccacatccgagatacgaccacggcgaggtggctagaaattgcggagtcatagggtagagtgcacctaaagttgcccaaaacgaacatcctgtcatattggagctactccgatggccttgacatgacaacttattgccaacgtcgtctgtcgtcaaagcgaaccaggtcaagtgcctagagactcccgtgacgacctcggtctagccacctacgtccgactcatgccacgcttgttgtctagcatgtgcaccacgatgctgtgttggtcatggtcgtcctcgtgcccgccgccttttcaatgtcacgaggtcataccagtacaccacaccgcagttcattgcatctgaatctactgaagagcttcactcaatcaaatcaaactaaagaataacaataatggtacggcgtaatatatatgtatttattcattatatacatgtatgtatggtgtctcaggctatataccatatatctctgtcgttcttcacccggagttcaagcccgaacatgttactactacataatatttgtacaaaaatatttagaaagattgccatcacgtttctgtaaaatatttgaactctacaagcttgaataaaaaaggagataaaaattgggagttcgcttgctttgtaaacggacggagaatataaaataaggaacacatggacatgatttttttgtctccctcttgatagagaactaaataaagaaagtcgagcaaaataaatagcagaacgactcttaccttttctatttgattattatatatgggttcaattttagagtactcatgatctgaggaacctgtttagattaggattcatactccatattggtctagatgaagtctggacaaagaaagtctctattgtctggtagttagagagagacgggcctaaaaaatggatagacaaaaaataggctgaatttttgcctctttattattagctatatattagggactacttttttattcatgatctgctgcatagtgcctagatgcctttatattttcataatgagtatttgccatacataaataatcagaactcctcgcgcccggacgtgctgacgtaggcgtcgtgcctggacgactggacataggcgtcgcgtccggtcactcgcgtccactgtccgcaggccacaggacgaacttctgtggatgcacgcacctctgcatgtggcacgaaacaacacaagacattgaagtacttccctagatgcatgtgcctcttcctccacccgcccacctgaaagctctcttgtgggtttgggtggtttgaatgacaacccaaataaaggactgacaggtgtgttaagtgttggacgggtgctttgtgtaaaacttgtaaagttcaactcaagtgttcatgagtgatgttccaaaggctgagttgattaagggtgtggacaccacaagtgaaggagaagattgcttatgtgagacttggtgtgcatatcttggagacaactggtcaagccaaggctggaggcaagaagagcttcgaggtaccgagtgcatggaaggtcaaggaggccgaggaacccaaagccagggtgaagaagacttgcaatgtcaaggattgatcgagttgagaaaagatatggtgcatcgagaatcactatctaaggacattacttacaaccaatgaggtaacatctatggttatgtggtgtaagtcataaggctcaagatcaagctcaagtcatagagcaaggtcactagaaagagcagtgccaaagcgagaacctggaagcaatccaaaagagctaagtttacttttaccatgagtttgggttgttcctgtgtttggatatgttctatgtgacctatgttgggtgttagagctcatagatgacaatctggatcaagtcttggagacttggagttttggagtccaacgtcgacctcgaacagaaaagctgggagaagatatgaaaagaggtaatcttctaggactcagtgaattgaattatactctaaatgtgtttgtctaagtcacaagaaggtcctcctaagagttgaagtcaagtggagaagaaacgagaaaaaaagcaagcttgggtcagcctgggtgacttcgtctctcgctcaaggttggcctcgagcgagtcgtgactgcgtctccggctcggggttggcctcggacgagtcatgatcgtctcccgtccgaggatggcctcaggtgagccgtgactgcgactcccgtccgaggatagtctcgggcgagccgtaactgcttctcccgtccaaggatggcctcgagcgagccgtgactgcgtctcccgtccgaggttagcttaccagagtagtattgtgtgtaggggggacagatatcccccaggtccactggaaggataaaagacctcacgaaaggcccaagggcccaataaatcgtaaggtcactccttcatgggcctagggaggaacgaccagtgaagcagatcgacataaggccggatcggtgcgagcccgaatggcccaacaacgttgagcaagcaaccacaacagaagacccgactttcccgcgctggagccccgtacaacagagccaggcgaggataagtcggcagaactataggaagataaactcaatcagttcactatctcttaggcgcagtttgttatctcatccgcatgtattgcctcacggtcgaatatataaggcctagggggcaccccttcagaatgattgatcccgctactcagccatccaccccaactctctacgttctagctttagagagcccccttgtaacccattacataaagcatactcgccaggacgtagggtgttacgcatctcaaagcgccccgaacctgtaaacactgtccattgttcctcgtgcatccggcacgaaccatttagctacagtcgacgacaccgtcctactcctaaaacaccttgaggggcaaccccgggtgtgcggtcggacccaaaacaccgacagtgtgggtgtactatggatgcacgtcacgtgaggcaacctcagatcaggtcttcatcgccttccaccacccacctttcatctggatttaataatggtcgtgaacagttctcctcacccagtggccagaaccggccgtttctagcggcaattctgaaaggaacggcctgtatttgtgaaacgggggtcggtaatcggttgtgttgaaaagtcgggaggatttagtttgatgcatgtgtatttatctctatctacgcgtgtccaagtacattggaatgaagcgaacgttagacttagggcatgtctggttcctttagtccagggattaaagtttaattagagaactaaagtttagtccctaccctgtttggttctagggactaaaattattcagaatgcaataaatgaatcataagaggaccaaaatatcccttagtattctcccgccattagtgcaactgaaataaaggagaggaaaaggttgaaattaatatgttttagtcctttttagtcaccccttgagggactagagactaaaacagtttagtccctgttttagtcccactgttgggcaatttagggcttgtttgggagcaagtgaaatgaaggggattgagggggctataatcctctactatttaaaattgaatagtgggggattctaacccctccaatcccctctattacccttactcccaaacaaggccttagtgattaaatagaactaaaatggatgaactaatctttagtccctcaaacgacccgtttggatactcagaattaaattccattcaaaatataatcgtgattcaaggcacatatcggtccagctaatacaattttatgcaagggcgcacctaggggtggtaatggatcgcgatccaaatgtttttcacaattatttagggccctgaataaattttagttcaaaaatgaatagaaatagggaccgatattaatccgatccgatccttatattttatagtataaatattagagcccattgtcacccctaggcggacctacgttatacggagcggggcacaggcccccactcaaatttcaagttttaatggaccttttaccttatttactatagaaacaaaggtttattagttactaagcctctatttaggcccccacttagattttgggctgggtccgcccctggttttatatagaacgtatttgtatcctactgttggtcacgtgagagagatatatattccaatttcccaaaatgaagggatccaatcttgttggcccctaagtttaattccaatatactgtagcacaatagggcttgcggattaatatagatacatgtgaatccaagcaagtccttggacgttgcgctgatgacgactgacatctgaacttgtgctgacgactgatgttgctggtagcagttctttcgttaggtgccgattggtccaccaaaagtaacgtaaatagcaatgttaattattcatacttaagaaacaacggtaataaagttgaatatgttgttatcagtttctagtgtggtatctgattacggttgaaattaaacaaacatgatttaacgttatctgttagatataaggcaatgctattgaccttagatataagcaggagtctttctgggcaatattccttcatactttttcttaattgctgcctcctga

SEQ ID NO: 2877 - DNA, 1022 bp, Zea Mays
aaacgatgcatgtggggtcaaaaattttagctggacaacaacgacatttgtatcgttggttggatgttgtcggtgaaaacaatgcaaatattttttccaccattaattaggaaaacacgatcctattgcccttttgctgccaataactgtagttctcgaccataacaatgcaggctttgacttagtaaacatcatcatatctccttgttcacagggggacagctgaatgcccatactgtacacagcccgtgactcaaacaatatacgtgtaatcgaaatgaaacataaaaaagccctagaaatagtgctacccactatgattcatgccattgttgtctagctaaaatttttgaccccacatgcatcgtttcctaacctgactcaaatctaacacatgccagactttcgtggtttctcatgttttgttatttttgttttttcatatatttaaatgcctcacatggccatgcactggaatcagattcttagctatgggctggcatggtgcatctgtcaacaagatctccagttttccacgctgttgaatcgacaggtacagcagacaaatacagaaaagggctggcctggttaaaaaacggctcaggttagcaagcagcctggcctgcttcacgtttgagagaaggtggcttcgaacgagacctgatcgtttccttcgtcctggggcctgggcgacttgctcaatgggagttgacaggacagatcacggccagccagtcaggtcgctgtgacgagctgtacaagaggcgatgatgcggctcaggcagatttatatcggaggagatgaatcgcgttggctcttcactcggtcctgtttcttaactgatgtaaattttagcttgtttttaactagaggaacgatgtaagtttaaccagacgaataaaacaactgtgtatgctctgcttccaatccagttattagctgcagctgctccctgtgtcgtgtgtggaatgcttgcttctgtactataacctttttttctacttgtttgagtatactcact

SEQ ID NO: 2878 - DNA, 2947 bp, Zea Mays
  misc_feature (1)..(2): n is a, c, g, or t
nnattcaccccatcttgtccaccatatagaccctacgtcagcaaccagtgacacccataagtaatggttataactagtgcttcatatatattgtatgcatctcgttcgttttttattaatcatatcctagaaatgatgttcgctcctaggaggatcggatcaaaagttgttgcggcattaatccatgatcggaatgctcgacaccaatattgggaaccatccacaagtgtgtcaagtattgctcaccaatttctcaaatataattgcgcctaaaaataaaggactaataaatacttcaccggacatacatcacttgtcaacactaggcatctcattgtttattattcgatatattgagtaggacactactcaatatagattcaacacagacacttaaatgtatgaaatcaaccatgaaagcaagatcagacatcacactcgcattattcaattgatgcttgcctttcatatatcaaggcataaaaggtataaatatagcctttgctagtaggcaatctagcttactagcaaaagctacctttataccattttatgccttgatatatggagtttcttcaacggtttcctcattagtgtttgggtccaggccaaagtagatgacaacacgtatagctccggctgcgagttcgtctgaaggcctcgggctctcattcaaatccacatctactgaatcaaagaatgttacatctggccgctcttgttctattactgcaattgcatcattaatttccttgccaatcaactcgggccaactggtcttgttctgcgtagccatgatcacgtactgtccttagcttctctctcttttgaaactgttataataccaataagaatcaataattgagcaacattagtgtaacgaatagaaacataatatgttgttttgtgctaatgctatcatactttcatagtaagcatatgtcttaatcgaatgcactacataactatcgggctgctaacagtctattaaaattttaaaaagatactccttttttcaaagcaattactaacaaagaatacatgattacctgaagggaagaacacagtagctctggcgatgatacgtgctctatgtataggtgtggatatatacacgacgacatttgtatgttggttggatgttgtcggtgaaaacaatgcaaatattttttccaccattaattaggaaaacacgatcatattgcccttttgctgccaataactgtagttctcgaccataacaatgcaggctttgacttagtaaacatcatcatatctccttgttcacaggggggcagctgaatgcccatactgtacacagcccgtgactcaaacaatatacgtgtaatccaaatgaaacataaaaaagccctagaaatagtgctacccactatgattaatgtcattgttgtctagctaaaatttttgaccccacatgcatcgtttcctaacctgactcaaatctaacacatgccagactttcgtggtttctcatgttttgttatttttgttttttcatatatttaaatgcctcacatggccatgcactggaaccagattcttagctatgggctggcatgatgcatctgtcaacaaaatctccagttttccacgctgttgaatcgacaggtacagtagacaaatacagaaaagggctggcctggttaaaaaacggctcaggttagcaagcagcctggcctgcttcacgtttgagagaaggtggcttcgaacgagacctgatcgtttccttcgtcctggggcctgggcgacttggctggctcttgctcaatgggagttgacaggacagatcacggccagccagttaggtcgctgtgacgagctgtacaagaggagtgttccgcgatgatgcgtctcaagcagatttatatcggaggagaaggagatgaaccgcgttggctcttctctcggttctgaaagcacaagtttactatgtctgggatggcatttgatgattcacctgcccaagtgaatgttgaaggagatgtttcagagaaaaaagtagaagttcaagaccagaatgaagtgggtgggatgccctcacgacaagaggaggaggcagcaattaagaaaaagtatgaaggaatattgcccagaaagactcctgcttatatctaagattcttagctaagggctggcatgatgcatctgtcaacaagatcaccagttttccacgctgttgaatcgcagcacaagtttactatgtctgggatggcatctgatgattcacctgcccaagtgaatgttgaaggagatgtttcggagaaaaaaagtagaagttcaagaccagaatgaagtgggtgggatgccctcaagacaagaggaggtatagcagacaaatacagaaaagggctggcctggttaaaaacggttcaggttagcaagcatcatggcccgtatccagaaggtagcttcacgtttgagagaaggtggcttcgaacgagacctgatcgtttccttcgtcctgggcgacttggctggctcttgctcaatgggagttgacaggacagatcacggctagccagtcaggttcgttgtgatgagatccagaagcaagcagcatggctcgatgtgatgagctgtacaagaggcgatgatgcgttatcatctcaggcagatttatatcggaggagatgaatcgcgttcgcgtggctcttctctcggttctgttttactgatgtaaattttagcttatttttaactagaggaacgatgtaagtttaaccagaccaataaaacaaccgtgtatgctctgcttccaatccagctattagctgcagctgttccttgtgtcgtgtgtcgaatgcttgctttagtacattaatttttttttctacttgttcgagtatactcacttcttgcgcagaaggataatgatgtgtttgcgaacaagctgcgttgtttagaattttttttcaagacgtgtcca

SEQ ID NO: 2879 - DNA, 2336 bp, Zea Mays
  misc_feature (1)..(2): n is a, c, g, or t
nnattcaccccatcttgtccaccatatagaccctacgtcagcaaccagtgacacccataagtaatggttataactagtgcttcatatatattgtatgcatctcgttcgttttttattaatcatatcctagaaatgatgttcgctcctaggaggatcggatcaaaagttgttgcggcattaatccatgatcggaatgctcgacaccaatattgggaaccatccacaagtgtgtcaagtattgctcaccaatttctcaaatataattgcgcctaaaaataaaggactaataaatacttcaccggacatacatcacttgtcaacactaggcatctcattgtttattattcgatatattgagtaggacactactcaatatagattcaacacagacacttaaatgtatgaaatcaaccatgaaagcaagatcagacatcacactcgcattattcaattgatgcttgcctttcatatatcaaggcataaaaggtataaatatagcctttgctagtaggcaatctagcttactagcaaaagctacctttataccattttatgccttgatatatggagtttcttcaacggtttcctcattagtgtttgggtccaggccaaagtagatgacaacacgtatagctccggctgcgagttcgtctgaaggcctcgggctctcattcaaatccacatctactgaatcaaagaatgttacatctggccgctcttgttctattactgcaattgcatcattaatttccttgccaatcaactcgggccaactggtcttgttctgcgtagccatgatcacgtactgtccttagcttctctctcttttgaaactgttataataccaataagaatcaataattgagcaacattagtgtaacgaatagaaacataatatgttgttttgtgctaatgctatcatactttcatagtaagcatatgtcttaatcgaatgcactacataactatcgggctgctaacagtctattaaaattttaaaaagatactccttttttcaaagcaattactaacaaagaatacatgattacctgaagggaagaacacagtagctctggcgatgatacgtgctctatgtataggtgtggatatatacacgacgacatttgtatgttggttggatgttgtcggtgaaaacaatgcaaatattttttccaccattaattaggaaaacacgatcatattgcccttttgctgccaataactgtagttctcgaccataacaatgcaggctttgacttagtaaacatcatcatatctccttgttcacaggggggcagctgaatgcccatactgtacacagcccgtgactcaaacaatatacgtgtaatccaaatgaaacataaaaaagccctagaaatagtgctacccactatgattaatgtcattgttgtctagctaaaatttttgaccccacatgcatcgtttcctaacctgactcaaatctaacacatgccagactttcgtggtttctcatgttttgttatttttgttttttcatatatttaaatgcctcacatggccatgcactggaaccagattcttagctatgggctggcatgatgcatctgtcaacaaaatctccagttttccacgctgttgaatcgacaggtacagtagacaaatacagaaaagggctggcctggttaaaaaacggctcaggttagcaagcagcctggcctgcttcacgtttgagagaaggtggcttcgaacgagacctgatcgtttccttcgtcctggggcctgggcgacttggctggctcttgctcaatgggagttgacaggacagatcacggccagccagttaggtcgctgtgacgagctgtacaagaggagtgttccgcgatgatgcgtctcaagcagatttatatcggaggagaaggagatgaaccgcgttggctcttctctcggttctgaaagcacaagtttactatgtctgggatggcatttgatgattcacctgcccaagtgaatgttgaaggagatgtttcagagaaaaaagtagaagttcaagaccagaatgaagtgggtgggatgccctcacgacaagaggaggaggcagcaattaagaaaaagtatgaaggaatattgcccagaaagactcctgcttatatctaagcacaagtttactatgtctgggatggcatctgatgattcacctgcccaagtgaatgttgaaggagatgtttcagagaaaaaagtagaagttcaagaccagaatgaagtgggtgggatgccctcacgacaagaggaggaggcagcaattaagaaaaagtacggaggttttatacccagaaagactccatttatatcttaaa

SEQ ID NO: 2880 - DNA, 2172 bp, Zea Mays
acatctggccgctcttgttctattactgcaattgcatcattaatttccttgccaatcaactcgggccaactggtcttgttctgcgtagccatgatcacgtactgtccttagcttctctctcttttgaaactgttataataccaataagaatcaataattgagcaacattagtgtaacgaatagaaacataatatgttgttttgtgctaatgctatcatactttcatagtaagcatatgtcttaatcgaatgcactacataactatcgggctgctaacagtctattaaaattttaaaaagatactccttttttcaaagcaattactaacaaagaatacatgattacctgaagggaagaacacagtagctctggcgatgatacgtgctctatgtataggtgtggatatatacacgacgacatttgtatgttggttggatgttgtcggtgaaaacaatgcaaatattttttccaccattaattaggaaaacacgatcatattgcccttttgctgccaataactgtagttctcgaccataacaatgcaggctttgacttagtaaacatcatcatatctccttgttcacaggggggcagctgaatgcccatactgtacacagcccgtgactcaaacaatatacgtgtaatccaaatgaaacataaaaaagccctagaaatagtgctacccactatgattaatgtcattgttgtctagctaaaatttttgaccccacatgcatcgtttcctaacctgactcaaatctaacacatgccagactttcgtggtttctcatgttttgttatttttgttttttcatatatttaaatgcctcacatggccatgcactggaaccagattcttagctatgggctggcatgatgcatctgtcaacaaaatctccagttttccacgctgttgaatcgacaggtacagtagacaaatacagaaaagggctggcctggttaaaaaacggctcaggttagcaagcagcctggcctgcttcacgtttgagagaaggtggcttcgaacgagacctgatcgtttccttcgtcctggggcctgggcgacttggctggctcttgctcaatgggagttgacaggacagatcacggccagccagttaggtcgctgtgacgagctgtacaagaggagtgttccgcgatgatgcgtctcaagcagatttatatcggaggagaaggagatgaaccgcgttggctcttctctcggttctgaaagcacaagtttactatgtctgggatggcatttgatgattcacctgcccaagtgaatgttgaaggagatgtttcagagaaaaaagtagaagttcaagaccagaatgaagtgggtgggatgccctcacgacaagaggaggaggcagcaattaagaaaaagtatgaaggaatattgcccagaaagactcctgcttatatctaagcacaagtttactatgtctgggatggcatctgatgattcacctgcccaagtgaatgttgaaggagatgtttcggagaaaaaaagtagaagttcaagaccagaatgaagtgggtgggatgccctcaagacaagaggaggtatagcagacaaatacagaaaagggctggcctggttaaaaacggttcaggttagcaagcatcatggcccgtatccagaaggtagcttcacgtttgagagaaggtggcttcgaacgagacctgatcgtttccttcgtcctgggcgacttggctggctcttgctcaatgggagttgacaggacagatcacggctagccagtcaggttcgttgtgatgagatccagaagcaagcagcatggctcgatgtgatgagctgtacaagaggcgatgatgcgttatcatctcaggcagatttatatcggaggagatgaatcgcgttcgcgtggctcttctctcggttctgttttactgatgtaaattttagcttatttttaactagaggaacgatgtaagtttaaccagaccaataaaacaaccgtgtatgctctgcttccaatccagctattagctgcagctgttccttgtgtcgtgtgtcgaatgcttgctttagtacattaatttttttttctacttgttcgagtatactcacttcttgcgcagaaggataatgatgtgtttgcgaacaagctgcgttgtttagaattttttttcaagacgtgtcca

SEQ ID NO: 2881 - DNA, 1673 bp, Zea Mays
ggccgctcttgttctattactgcaattgcatcattaatttccttgccaatcaactcgggccaactggtcttgttctgcgtagccatgatcacgtactgtccttagcttctctctcttttgaaactgttataataccaataagaatcaataattgagcaacattagtgtaacgaatagaaacataatatgttgttttgtgctaatgctatcatactttcatagtaagcatatgtcttaatcgaatgcactacataactatcgggctgctaacagtctattaaaattttaaaaagatactccttttttcaaagcaattactaacaaagaatacatgattacctgaagggaagaacacagtagctctggcgatgatacgtgctctatgtataggtgtggatatatacacgacgacatttgtatgttggttggatgttgtcggtgaaaacaatgcaaatattttttccaccattaattaggaaaacacgatcatattgcccttttgctgccaataactgtagttctcgaccataacaatgcaggctttgacttagtaaacatcatcatatctccttgttcacaggggggcagctgaatgcccatactgtacacagcccgtgactcaaacaatatacgtgtaatccaaatgaaacataaaaaagccctagaaatagtgctacccactatgattaatgtcattgttgtctagctaaaatttttgaccccacatgcatcgtttcctaacctgactcaaatctaacacatgccagactttcgtggtttctcatgttttgttatttttgttttttcatatatttaaatgcctcacatggccatgcactggaaccagattcttagctatgggctggcatgatgcatctgtcaacaaaatctccagttttccacgctgttgaatcgacaggtacagtagacaaatacagaaaagggctggcctggttaaaaaacggctcaggttagcaagcagcctggcctgcttcacgtttgagagaaggtggcttcgaacgagacctgatcgtttccttcgtcctggggcctgggcgacttggctggctcttgctcaatgggagttgacaggacagatcacggccagccagttaggtcgctgtgacgagctgtacaagaggagtgttccgcgatgatgcgtctcaagcagatttatatcggaggagaaggagatgaaccgcgttggctcttctctcggttctgaaagcacaagtttactatgtctgggatggcatttgatgattcacctgcccaagtgaatgttgaaggagatgtttcagagaaaaaagtagaagttcaagaccagaatgaagtgggtgggatgccctcacgacaagaggaggaggcagcgattaagaaatagtatgaaggaatattgcccagaaagactcgcgcttatatctaaggtcaatagcattgccttatatctaactgataacgttaaatcatgtctgtttaatttcaaccgtaatcagataccacactagaaactgataacaacatattcaactttattaccgttgttacttaagtgtgaatctgtcaagggcgttgaacccctgactagccggacctcggctacgcagctcgtagccgtccgtcttctcaggtggggttagaactccccaactgcaggcttgagagaagagggg

SEQ ID NO: 2882 - DNA, 1581 bp, Zea Mays
gaaattactgttctgccattccgtaaataccctcacggccccgcgctccccgttccccttcctccccaccactccgttccatccctcgcctgccttcgcacgggtgcgccgcccgctcgacggccacgccacgccgcggcgcgccgctcagctgccccggcacccgcccttcctcgccgagctcgggatcgacgtctcccgcacctcctcgcgcccgttccgggctccgcatccggcccctccccgtccccaaccccattccgcagcaggcgaccagcacaacatcccgaatcccccacctcgcattcggctcgccgtagctcctcctccgcgtcccgccgcccccggcacggccactagctgggtatcaaaacattgggttgccaaacaagctaccttctcagattcagatcaatagcttctcaggtccaacaaggggaagggaacggtgctgataatgcaagtgctggccaaaaaaaatggcgctgtggagcatctgaaacgctgcttcccttggctcatatgaatgtcagtttaggccttaggatagagcaaagtagcataatctcaagcacaagtttactatgtctgggatggcatttgatgattcacctgcccaagtgaatgttgaaggagatgtttcagagaaaaaagtagaagttcaagaccagaatgaagtgggtgggatgccctcacgacaagaggaggaggcagcaattaagaaaaagtatgaaggaatattgcccagaaagactcctgcttatatctaagattcttagctaagggctggcatgatgcatctgtcaacaagatcaccagttttccacgctgttgaatcgcagcacaagtttactatgtctgggatggcatctgatgattcacctgcccaagtgaatgttgaaggagatgtttcggagaaaaaaagtagaagttcaagaccagaatgaagtgggtgggatgccctcaagacaagaggaggtatagcagacaaatacagaaaagggctggcctggttaaaaacggttcaggttagcaagcatcatggcccgtatccagaaggtagcttcacgtttgagagaaggtggcttcgaacgagacctgatcgtttccttcgtcctgggcgacttggctggctcttgctcaatgggagttgacaggacagatcacggctagccagtcaggttcgttgtgatgagatccagaagcaagcagcatggctcgatgtgatgagctgtacaagaggcgatgatgcgttatcatctcaggcagatttatatcggaggagatgaatcgcgttcgcgtggctcttctctcggttctgttttactgatgtaaattttagcttatttttaactagaggaacgatgtaagtttaaccagaccaataaaacaaccgtgtatgctctgcttccaatccagctattagctgcagctgttccttgtgtcgtgtgtcgaatgcttgctttagtacattaatttttttttctacttgttcgagtatactcacttcttgcgcagaaggataatgatgtgtttgcgaacaagctgcgttgtttagaattttttttcaagacgtgtcca

SEQ ID NO: 2883 - DNA, 718 bp, Zea Mays
ctccccgttccccttcctccccaccactccgttccatccctcgcctgccttcgcacgggtgcgccgcccgctcgacggccacgccacgccgcggcgcgccgctcagctgccccggcacccgcccttcctcgccgagctcgggatcgacgtctcccgcacctcctcgcgcccgttccgggctccgcatccggcccctccccgtccccaaccccattccgcagcaggcgaccagcacaacatcccgaatcccccacctcgcattcggctcgccgtagctcctcctccgcgtcccgccgcccccggcacgcacaagtttactatgtctgggatggcatttgatgattcacctgcccaagtgaatgttgaaggagatgtttcagagaaaaaagtagaagttcaagaccagaatgaagtgggtgggatgccctcacgacaagaggaggaggcagcaattaagaaaaagtatgaaggaatattgcccagaaagactcctgcttatatctaagcaacatcagtcgtcagcacaagttcagatgtcagtcgtcataaacgcaatgtccagggacttgcttggattcacatgtatctatattaatccgcaagctctattgtgctacagtatattggaattaaacttaggggccaacaagattggatcccttcattttgggaaattggtttatatatctctctcacgtgaccaacagttggatacaaa

SEQ ID NO: 2884 - DNA, 746 bp, Zea Mays
ccaccactccgttccatccctcgcctgccttcgcacgggtgcgccgcccgctcgacggccacgccacgccgcggcgcgccgctcagctgccccggcacccgcccttcctcgccgagctcgggatcgacgtctcccgcacctcctcgcgcccgttccgggctccgcatccggcccctccccgtccccaaccccattccgcagcaggcgaccagcacaacatcccgaatcccccacctcgcattcggctcgccgtagctcctcctccgcgtcccgccgcccccggcacggccactagctgggtatcaaaacattgggttgccaaacaagctaccttctcagattcagatcaatagcttctcagggggaagggaacggtgctgataatgcaagtgctggccaaaaaaaatggcgctgtggagcatctgaaacgctgcttcccttggctcatatgaatgtcagtttaggccttaggatagagcaaagtagcataatctcaagcacaagtttactatgtctgggatggcatttgatgattcacctgcccaagtgaatgttgaaggagatgtttcagagaaaaaagtagaagttcaagaccagaatgaagtgggtgggatgccctcacgacaagaggaggaggcagcaattaagaaaaagtatgaaggaatattgcccagaaagactcctgcttatatctaagtagtaacatgttcgggcttgaactccgggtgcagaacgacagagatata

SEQ ID NO: 2885 - DNA, 1026 bp, Zea Mays
ccaccactccgttccatccctcgcctgccttcgcacgggtgcgccgcccgctcgacggccacgccacgccgcggcgcgccgctcagctgccccggcacccgcccttcctcgccgagctcgggatcgacgtctcccgcacctcctcgcgcccgttccgggctccgcatccggcccctccccgtccccaaccccattccgcagcaggcgaccagcacaacatcccgaatcccccacctcgcattcggctcgccgtagctcctcctccgcgtcccgccgcccccggcacgcacaagtttactatgtctgggatggcatctgatgattcacctgcccaagtgaatgttgaaggagatgtttcggagaaaaaaagtagaagttcaagaccagaatgaagtgggtgggatgccctcaagacaagaggaggtatagcagacaaatacagaaaagggctggcctggttaaaaacggttcaggttagcaagcatcatggcccgtatccagaaggtagcttcacgtttgagagaaggtggcttcgaacgagacctgatcgtttccttcgtcctgggcgacttggctggctcttgctcaatgggagttgacaggacagatcacggctagccagtcaggttcgttgtgatgagatccagaagcaagcagcatggctcgatgtgatgagctgtacaagaggcgatgatgcgttatcatctcaggcagatttatatcggaggagatgaatcgcgttcgcgtggctcttctctcggttctgttttactgatgtaaattttagcttatttttaactagaggaacgatgtaagtttaaccagaccaataaaacaaccgtgtatgctctgcttccaatccagctattagctgcagctgttccttgtgtcgtgtgtcgaatgcttgctttagtacattaatttttttttctacttgttcgagtatactcacttcttgcgcagaaggataatgatgtgtttgcgaacaagctgcgttgtttagaattttttttcaagacgtgtcca

SEQ ID NO: 2886 - DNA, 1445 bp, Zea Mays
ccaccactccgttccatccctcgcctgccttcgcacgggtgcgccgcccgctcgacggccacgccacgccgcggcgcgccgctcagctgccccggcacccgcccttcctcgccgagctcgggatcgacgtctcccgcacctcctcgcgcccgttccgggctccgcatccggcccctccccgtccccaaccccattccgcagcaggcgaccagcacaacatcccgaatcccccacctcgcattcggctcgccgtagctcctcctccgcgtcccgccgcccccggcacggccactagctgggtatcaaaacattgggttgccaaacaagctaccttctcagattcagatcaatagcttctcaggtccaacaaggggaagggaacggtgctgataatgcaagtgctggccaaaaaaaatggcgctgtggagcatctgaaacgctgcttcccttggctcatatgaatgtcagtttaggccttaggatagagcaaagtagcataatctcaagcacaagtttactatgtctgggatggcatttgatgattcacctgcccaagtgaatgttgaaggagatgtttcagagaaaaaagtagaagttcaagaccagaatgaagtgggtgggatgccctcacgacaagaggaggaggcagcaattaagaaaaagtatgaaggaatattgcccagaaagactcctgcttatatctaagcacaagtttactatgtctgggatggcatctgatgattcacctgcccaagtgaatgttgaaggagatgtttcggagaaaaaaagtagaagttcaagaccagaatgaagtgggtgggatgccctcaagacaagaggaggtatagcagacaaatacagaaaagggctggcctggttaaaaacggttcaggttagcaagcatcatggcccgtatccagaaggtagcttcacgtttgagagaaggtggcttcgaacgagacctgatcgtttccttcgtcctgggcgacttggctggctcttgctcaatgggagttgacaggacagatcacggctagccagtcaggttcgttgtgatgagatccagaagcaagcagcatggctcgatgtgatgagctgtacaagaggcgatgatgcgttatcatctcaggcagatttatatcggaggagatgaatcgcgttcgcgtggctcttctctcggttctgttttactgatgtaaattttagcttatttttaactagaggaacgatgtaagtttaaccagaccaataaaacaaccgtgtatgctctgcttccaatccagctattagctgcagctgttccttgtgtcgtgtgtcgaatgcttgctttagtacattaatttttttttctacttgttcgagtatactcacttcttgcgcagaaggataatgatgtgtttgcgaacaagctgcgttgtttagaattttttttcaagacgtgtcca

SEQ ID NO: 2887 - DNA, 1089 bp, Zea Mays
ccaccactccgttccatccctcgcctgccttcgcacgggtgcgccgcccgctcgacggccacgccacgccgcggcgcgccgctcagctgccccggcacccgcccttcctcgccgagctcgggatcgacgtctcccgcacctcctcgcgcccgttccgggctccgcatccggcccctccccgtccccaaccccattccgcagcaggcgaccagcacaacatcccgaatcccccacctcgcattcggctcgccgtagctcctcctccgcgtcccgccgcccccggcacgcacaagtttactatgtctgggatggcatttgatgattcacctgcccaagtgaatgttgaaggagatgtttcagagaaaaaagtagaagttcaagaccagaatgaagtgggtgggatgccctcacgacaagaggaggaggcagcaattaagaaaaagtatgaaggaatattgcccagaaagactcctgcttatatctaaggtatagcagacaaatacagaaaagggctggcctggttaaaaacggttcaggttagcaagcatcatggcccgtatccagaaggtagcttcacgtttgagagaaggtggcttcgaacgagacctgatcgtttccttcgtcctgggcgacttggctggctcttgctcaatgggagttgacaggacagatcacggctagccagtcaggttcgttgtgatgagatccagaagcaagcagcatggctcgatgtgatgagctgtacaagaggcgatgatgcgttatcatctcaggcagatttatatcggaggagatgaatcgcgttcgcgtggctcttctctcggttctgttttactgatgtaaattttagcttatttttaactagaggaacgatgtaagtttaaccagaccaataaaacaaccgtgtatgctctgcttccaatccagctattagctgcagctgttccttgtgtcgtgtgtcgaatgcttgctttagtacattaatttttttttctacttgttcgagtatactcacttcttgcgcagaaggataatgatgtgtttgcgaacaagctgcgttgtttagaattttttttcaagacgtgtcca

SEQ ID NO: 2888 - DNA, 1507 bp, Zea Mays
ccaccactccgttccatccctcgcctgccttcgcacgggtgcgccgcccgctcgacggccacgccacgccgcggcgcgccgctcagctgccccggcacccgcccttcctcgccgagctcgggatcgacgtctcccgcacctcctcgcgcccgttccgggctccgcatccggcccctccccgtccccaaccccattccgcagcaggcgaccagcacaacatcccgaatcccccacctcgcattcggctcgccgtagctcctcctccgcgtcccgccgcccccggcacggccactagctgggtatcaaaacattgggttgccaaacaagctaccttctcagattcagatcaatagcttctcagggggaagggaacggtgctgataatgcaagtgctggccaaaaaaaatggcgctgtggagcatctgaaacgctgcttcccttggctcatatgaatgtcagtttaggccttaggatagagcaaagtagcataatctcaagcacaagtttactatgtctgggatggcatttgatgattcacctgcccaagtgaatgttgaaggagatgtttcagagaaaaaagtagaagttcaagaccagaatgaagtgggtgggatgccctcacgacaagaggaggaggcagcaattaagaaaaagtatgaaggaatattgcccagaaagactcctgcttatatctaagattcttagctaagggctggcatgatgcatctgtcaacaagatcaccagttttccacgctgttgaatcgcagcacaagtttactatgtctgggatggcatctgatgattcacctgcccaagtgaatgttgaaggagatgtttcggagaaaaaaagtagaagttcaagaccagaatgaagtgggtgggatgccctcaagacaagaggaggtatagcagacaaatacagaaaagggctggcctggttaaaaacggttcaggttagcaagcatcatggcccgtatccagaaggtagcttcacgtttgagagaaggtggcttcgaacgagacctgatcgtttccttcgtcctgggcgacttggctggctcttgctcaatgggagttgacaggacagatcacggctagccagtcaggttcgttgtgatgagatccagaagcaagcagcatggctcgatgtgatgagctgtacaagaggcgatgatgcgttatcatctcaggcagatttatatcggaggagatgaatcgcgttcgcgtggctcttctctcggttctgttttactgatgtaaattttagcttatttttaactagaggaacgatgtaagtttaaccagaccaataaaacaaccgtgtatgctctgcttccaatccagctattagctgcagctgttccttgtgtcgtgtgtcgaatgcttgctttagtacattaatttttttttctacttgttcgagtatactcacttcttgcgcagaaggataatgatgtgtttgcgaacaagctgcgttgtttagaattttttttcaagacgtgtcca

SEQ ID NO: 2889 - DNA, 1406 bp, Zea Mays
ccaccactccgttccatccctcgcctgccttcgcacgggtgcgccgcccgctcgacggccacgccacgccgcggcgcgccgctcagctgccccggcacccgcccttcctcgccgagctcgggatcgacgtctcccgcacctcctcgcgcccgttccgggctccgcatccggcccctccccgtccccaaccccattccgcagcaggcgaccagcacaacatcccgaatcccccacctcgcattcggctcgccgtagctcctcctccgcgtcccgccgcccccggcacgcacaagtttactatgtctgggatggcatttgatgattcacctgcccaagtgaatgttgaaggagatgtttcagagaaaaaagtagaagttcaagaccagaatgaagtgggtgggatgccctcacgacaagaggaggaggcagcaattaagaaaaagtatgaaggaatattgcccagaaagactcctgcttatatctaagattcttagctaagggctggcatgatgcatctgtcaacaagatcaccagttttccacgctgttgaatcgcagaatatcctgaaatcaaactactcacgcaagaaaaaaaattctggaaagtaaattgttctgcctgctggtgaagtttggttagaggagttgccataaaatccatagcgcagcacaagtttactatgtctgggatggcatctgatgattcacctgcccaagtgaatgttgaaggagatgtttcggagaaaaaaagtagaagttcaagaccagaatgaagtgggtgggatgccctcaagacaagaggaggtatagcagacaaatacagaaaagggctggcctggttaaaaacggttcaggttagcaagcatcatggcccgtatccagaaggtagcttcacgtttgagagaaggtggcttcgaacgagacctgatcgtttccttcgtcctgggcgacttggctggctcttgctcaatgggagttgacaggacagatcacggctagccagtcaggttcgttgtgatgagatccagaagcaagcagcatggctcgatgtgatgagctgtacaagaggcgatgatgcgttatcatctcaggcagatttatatcggaggagatgaatcgcgttcgcgtggctcttctctcggttctgttttactgatgtaaattttagcttatttttaactagaggaacgatgtaagtttaaccagaccaataaaacaaccgtgtatgctctgcttccaatccagctattagctgcagctgttccttgtgtcgtgtgtcgaatgcttgctttagtacattaatttttttttctacttgttcgagtatactcacttcttgcgcagaaggataatgatgtgtttgcgaacaagctgcgttgtttagaattttttttcaagacgtgtcca

SEQ ID NO: 2890 - DNA, 1626 bp, Zea Mays
ccaccactccgttccatccctcgcctgccttcgcacgggtgcgccgcccgctcgacggccacgccacgccgcggcgcgccgctcagctgccccggcacccgcccttcctcgccgagctcgggatcgacgtctcccgcacctcctcgcgcccgttccgggctccgcatccggcccctccccgtccccaaccccattccgcagcaggcgaccagcacaacatcccgaatcccccacctcgcattcggctcgccgtagctcctcctccgcgtcccgccgcccccggcacggccactagctgggtatcaaaacattgggttgccaaacaagctaccttctcagattcagatcaatagcttctcaggtccaacaaggggaagggaacggtgctgataatgcaagtgctggccaaaaaaaatggcgctgtggagcatctgaaacgctgcttcccttggctcatatgaatgtcagtttaggccttaggatagagcaaagtagcataatctcaagcacaagtttactatgtctgggatggcatttgatgattcacctgcccaagtgaatgttgaaggagatgtttcagagaaaaaagtagaagttcaagaccagaatgaagtgggtgggatgccctcacgacaagaggaggaggcagcaattaagaaaaagtatgaaggaatattgcccagaaagactcctgcttatatctaagattcttagctaagggctggcatgatgcatctgtcaacaagatcaccagttttccacgctgttgaatcgcagaatatcctgaaatcaaactactcacgcaagaaaaaaaattctggaaagtaaattgttctgcctgctggtgaagtttggttagaggagttgccataaaatccatagcgcagcacaagtttactatgtctgggatggcatctgatgattcacctgcccaagtgaatgttgaaggagatgtttcggagaaaaaaagtagaagttcaagaccagaatgaagtgggtgggatgccctcaagacaagaggaggtatagcagacaaatacagaaaagggctggcctggttaaaaacggttcaggttagcaagcatcatggcccgtatccagaaggtagcttcacgtttgagagaaggtggcttcgaacgagacctgatcgtttccttcgtcctgggcgacttggctggctcttgctcaatgggagttgacaggacagatcacggctagccagtcaggttcgttgtgatgagatccagaagcaagcagcatggctcgatgtgatgagctgtacaagaggcgatgatgcgttatcatctcaggcagatttatatcggaggagatgaatcgcgttcgcgtggctcttctctcggttctgttttactgatgtaaattttagcttatttttaactagaggaacgatgtaagtttaaccagaccaataaaacaaccgtgtatgctctgcttccaatccagctattagctgcagctgttccttgtgtcgtgtgtcgaatgcttgctttagtacattaatttttttttctacttgttcgagtatactcacttcttgcgcagaaggataatgatgtgtttgcgaacaagctgcgttgtttagaattttttttcaagacgtgtcca

SEQ ID NO: 2891 - DNA, 685 bp, Zea Mays
ccaccactccgttccatccctcgcctgccttcgcacgggtgcgccgcccgctcgacggccacgccacgccgcggcgcgccgctcagctgccccggcacccgcccttcctcgccgagctcgggatcgacgtctcccgcacctcctcgcgcccgttccgggctccgcatccggcccctccccgtccccaaccccattccgcagcaggcgaccagcacaacatcccgaatcccccacctcgcattcggctcgccgtagctcctcctccgcgtcccgccgcccccggcacgcacaagtttactatgtctgggatggcatttgatgattcacctgcccaagtgaatgttgaaggagatgtttcagagaaaaaagtagaagttcaagaccagaatgaagtgggtgggatgccctcacgacaagaggaggaggcagcaattaagaaaaagtatgaaggaatattgcccagaaagactcctgcttatatctaagcacaagtttactatgtctgggatggcatctgatgattcacctgcccaagtgaatgttgaaggagatgtttcagagaaaaaagtagaagttcaagaccagaatgaagtgggtgggatgccctcacgacaagaggaggaggcagcaattaagaaaaagtacggaggttttatacccagaaagactccatttatatcttaaa

SEQ ID NO: 2892 - DNA, 905 bp, Zea Mays
ccaccactccgttccatccctcgcctgccttcgcacgggtgcgccgcccgctcgacggccacgccacgccgcggcgcgccgctcagctgccccggcacccgcccttcctcgccgagctcgggatcgacgtctcccgcacctcctcgcgcccgttccgggctccgcatccggcccctccccgtccccaaccccattccgcagcaggcgaccagcacaacatcccgaatcccccacctcgcattcggctcgccgtagctcctcctccgcgtcccgccgcccccggcacggccactagctgggtatcaaaacattgggttgccaaacaagctaccttctcagattcagatcaatagcttctcaggtccaacaaggggaagggaacggtgctgataatgcaagtgctggccaaaaaaaatggcgctgtggagcatctgaaacgctgcttcccttggctcatatgaatgtcagtttaggccttaggatagagcaaagtagcataatctcaagcacaagtttactatgtctgggatggcatttgatgattcacctgcccaagtgaatgttgaaggagatgtttcagagaaaaaagtagaagttcaagaccagaatgaagtgggtgggatgccctcacgacaagaggaggaggcagcaattaagaaaaagtatgaaggaatattgcccagaaagactcctgcttatatctaagcacaagtttactatgtctgggatggcatctgatgattcacctgcccaagtgaatgttgaaggagatgtttcagagaaaaaagtagaagttcaagaccagaatgaagtgggtgggatgccctcacgacaagaggaggaggcagcaattaagaaaaagtacggaggttttatacccagaaagactccatttatatcttaaa

SEQ ID NO: 2893 - DNA, 1033 bp, Zea Mays
gttgccataaaatccatagcgcagcacaagtttactatgtctgggatggcatttgatgattcacctgcccaagtgaatgttgaaggagatgtttcagagaaaaaagtagaagttcaagaccagaatgaagtgggtgggatgccctcacgacaagaggaggaggcagcaattaagaaaaagtatgaaggaatattgcccagaaagactcctgcttatatctaagattcttagctaagggctggcatgatgcatctgtcaacaagatcaccagttttccacgctgttgaatcgcagcacaagtttactatgtctgggatggcatctgatgattcacctgcccaagtgaatgttgaaggagatgtttcggagaaaaaaagtagaagttcaagaccagaatgaagtgggtgggatgccctcaagacaagaggaggtatagcagacaaatacagaaaagggctggcctggttaaaaacggttcaggttagcaagcatcatggcccgtatccagaaggtagcttcacgtttgagagaaggtggcttcgaacgagacctgatcgtttccttcgtcctgggcgacttggctggctcttgctcaatgggagttgacaggacagatcacggctagccagtcaggttcgttgtgatgagatccagaagcaagcagcatggctcgatgtgatgagctgtacaagaggcgatgatgcgttatcatctcaggcagatttatatcggaggagatgaatcgcgttcgcgtggctcttctctcggttctgttttactgatgtaaattttagcttatttttaactagaggaacgatgtaagtttaaccagaccaataaaacaaccgtgtatgctctgcttccaatccagctattagctgcagctgttccttgtgtcgtgtgtcgaatgcttgctttagtacattaatttttttttctacttgttcgagtatactcacttcttgcgcagaaggataatgatgtgtttgcgaacaagctgcgttgtttagaattttttttcaagacgtgtcca

SEQ ID NO: 2894 - DNA, 375 bp, Zea Mays
ccacacgctaccctcggcaccgtagccgtctgccccgcgctccccgttccccttcctcgctccccaccagtccgtcccatccctcgcctgccttcgcacgggtgcgccgcccgctcgacagccacgccgcgccgcgccgcgccgctcagctgcccggcacccgcccttcctcgccgagctcgggatcgacgtctcccgcacctcctccgcgcccgttccgggctccgcatccggcctctcccccgtccccaaccccattccgcagcaggcgaccagcacaacatctcgaatcccccgcctcgcattcggctcgccgtcgctcctcctccgcgtcccgccaccctccgcacgggctgagattgttgttgatagtac

SEQ ID NO: 2895 - DNA, 975 bp, Zea Mays
tgttcagcttgattcgttttatttagtgaaatgtgatatatgctctcgtccttttgctctttcagcaaggtggtgttcccaacaagcctaaaggtcctcttgaggcactccgacccaagcttcagcctacgcaacagaatgcccgcgcccgccgaacttcatatgcgtctgcggacagtgacgacactttgaatctgtcccccgaggatctggtcccgcaaggagaacccagccagcagggagaaccagtcgaggacaagaacaaggaataaacacatgcccagcatagctactgtactgtaccccttttcatacacaagatgccattttccgccgtcgcacaaaaaaaaaacttcttttgccttggtaataagcgtgttgattcggttccggcccaacggtcccggtgaggctgaggttgagacacgtgcagcttgaactgcatgtgagatgtggtatccgctgcactgggctgttgggggtccttgggatgcatgaacaaataaacaatgatgcttgcgatgtttacattgctgtacctggacctgtgttacctctatgcaaacacatgcaaatccgatggtccgagactcgaaactctcccgttgagctgaaggagttgctgtactaataataatgaagattttttttttgttctgatgttgcctatagatgcatcgcaatgctttcttttatttgcaccctgtgcatgttattattattcgcctgcttggctgtcggggtactggttggtgcgtttttctctgtaaatgagttctgcgcccctatgctggttaacaactagtgtattacgcgcgcccttgctcgcgtactgaacaacagtgtgaaataataattttatgagcatgttgaattagatatcgtatcacggtcatatgtacaatggaaatagtagttatgaagcaaataattacataagtgcatatccaaacttaagtagattgtagttcttac

SEQ ID NO: 2896 - DNA, 4868 bp, Zea Mays
aaccaaacaggcagcgtcttgccgttgccgaccattctgtctagtctctactctgccctaacgcacgcgaagcatccccatcccccccgcgccgtcctgccccaatcccctcaaagcgcaaccgccgcaacccggtctcctcctcgccctcgcagctcgccgctggcgaagacccccaatggagccctagcggcgtgtgccccacgtctcgatggttctcgtggaggccctgcgcgcgcggctgctggccgcgttgcggccgtggctggcggtggaccccgcggacctgcgtgtggagccaggcctcttcgctcgcgcccgcgtcgtcgcgcgcgggctaaagctcgacgtcgccgcgctcaacgccgccgccggggcgggggagtccccgtcctggcctgccacgttcgaccgcgcggccgccgccgaggtcgagctcgccgcctcgccatgggccgcccccgcgatcgacgccgtcgtgcgcggcgtggacgtcgcgctcaccctcagggagcctgcgccgaggaagcagcggccagactataaggagtgggtatctgaggagaagaagcgagtgcttgcatcattggaccctcagggtgagatgttgcatgagatgatcgaaagtgtagttcactccctggaagataagttcacttcagtgttttcgactctccttctgaactgtggtcagcactctgttcagaggactagttgggtctttaattccatccagaaagaagaataaattgtctgttaaatgcgctgaatttgaattcctgatgaaggagaatgattctgtagattgcagtgcatctttcactggcgtatctgcttcagtcagattggataatttgcaactttctgcctttggcattcatgttcccaaaacttgctggaaaatttcaccaaagtttgctccttctttgctggtgatattggatattgcaaaccaaaaggaagattatgcagttaggaacggcagagagctttggaaagctgctgcacaaaaggttgacaattcagtagtgtgccaaaggttttctttaagaaaagccgtaagctgtgctgctttctggcggagctatgtccatgcttatgtattgttgctgacattagcagggtatccctcagacaagattgtagtaaggaactgtggcagggtatcaaggaacaagaaatttttgggtactattagacatcaatggaaaactgttgttgatctggaggataagattcctgtagaagctattgctagagcacggcgtgctgcacgttcaaaactgattgtatcacagcaactgaaaaagcaggaatcatcaaaagcagttctggtttctttcttgttgaaaattcttatgcccttcttatgtttatggaggtttcttgtgttcatatggaggccagtgtgggcgatgatgggccctagaaacaaggcatcatatgcatatttttttcctggttctacttatgatgttgacatggagcttcatgtcagcgtacaccttggggaactgtctgtaaccttgttaccgttcgttgattgtttcactgatatgaaaggatcagacagaagaaacactcagaatgagttagcttcagtgcatcttgtaatgaagtcatcatgtttactttactcagctggttgcaccacacaatcattttatctagttctcggggaactgaagacatgcctttccagtgtcccaaagttggtacaagcagatagtaacaacagtccaaggaggagttcatcttttggaacatcagagttcatcaaggacactgactctaggataatcctctggtgtgactcagctagtatgagtccattctcccgacaacaagccgacagatctctttacttcaatgatgatttgtccactgcccttataaagagtgatatggatgagttatggtcaaattggatgataattagcaatgcatacaatgaatcgggtgtgattcatcatgaaaaaccttctattatttttgaattcaaatcttttctgattgatccttacataagtataagtggttaccaacaatgtagattcacaattgggagactaaaccttgatttggattatttatgtgtttcatcaacttatctgctgtacagacagttcatgcaccacaaacaggcaaaagaaccaactgaaagatcagctgatttttcgaacaatgatgatacccatctagactctacaagtggagttgctgacaaattgagatcatcaaatcatagaataaaggttgcaatgttggatgtgattccagaaaacactcttcgtattgtagcactggttactggtccaagtatacggttattttttgataaatataatatgttgcaaaatagcaaagacgtatacaagcccttgctttctcagatgaatagccggtcctgcatagttttcagtctagcatatgtggaatgtgctctttggccagcatcgctttcttcaactcctccaatagcaaattttcataccaaagaatcacataaaacatttgttagtgcgaaggagccccaagaacatcatcagctacaaatagaaagtagtgcaaggaatgtttatccagggcatgttatgcttgatgctcgcttcatctttgctggtttaactcttctgatagataatctagatgcaaaccagcagtctcacatttgcggaccgctgtcatgcagtttcctgatttcagctagcaggaactatgtctattccttcttcggggtgagaaacgtcatctcaactaacttagaaggaaagatcattggtttcctagctttcttctgcatggatgaactcttcatggtttgccaggtggaagtggaggatctgaagcattgagtttgatcaagttgagtcgattctgttctcttgtttgtgcttttgtgaagaagtttgcaacttgcatttctgagggcacatgttgaagaataacaattttctgttgacaatgagaccgagtaaagaaaacatcaacaccaatatgcttggtaagctcatgcttcacaggatcatttgcaatctgtatggcactagtgttatcacacataagaggtgtaggagtatcacaagagacacccagattagctaataaccatcttagccatataatctctacagtagtatgatcacgaagatgatatccccggtgatttggtaatgaatcagcaggctgtgacccatcatttatctgtagataatcagaaacaactggagagtcatcattgttagtacaaacatcaacaataggttcatcaggatcggctgtgggactagtgcgaggatgacgaatgtaggttttggtaattggtggtttagatgcgaagtttgaagtgggtgctgaagtagaaggatttgtaatgggaatgagaacattaggtggggatgttggatttgatggtgtagtggaagatgaagacccagatgaaggagcatggatgggaggcagccacatgaaagaggtggactctgtagaaaaagaagaatgcgtgagggagttataaaagaaaggtcgattttcattaaaactcacatcatgtgaaatacgaatgcgtcgggctaaaggatcataacattgatagcctttatgctttggaatgtatctaagaaaaacacactcaacagattgagcgctcaatttagtccattcacgaggtgctaacaaaacgtagcatgtacatccaaaaactctaagatggtcatagcgtgtaggagttccaaaaagaacttcaccaggagttatgccagatagttttgataatggttgtctattgatgagatagacaacagtagatactgtttcacaccaaaaatgcgagggaacaaacgaagaaatcaagagagtgcgagcagtttctatgacatgacggtgcttgcgttcaacaaccccgttttgaacatgagcgctagggcaagaaagctgaggaagagtagcctctgaagttaggaattctcgaaaagtatcgaataaatattcaccaccagaatcagagcgaatttttttaatagtagtgaactgggtgtgaatcatgcgagcaaaagacttatagatagagagcaactcagaacggcgtttcatgaaataaatccaagtatatcgagaatgatcatcaacaaaaatgacatagtatttattaccaccttttgaaacaaaaggagctgggccccaaacatcagagtgaacaagatcaaaaggtctagcataatgagaatcactagtaaactaaggaacttctatttgttttccaatatgacagcttacaatgaaaagtagactaaaaaaatgtacgacctaaacaacccgattttattaaagtggacagacgagatccacacaaatgaccaagacagtgatgccattgggcaaaagaggctgagagaatcgaagttgcggagagcacacgtgccgatgatatagtgggtggaggaaggcgcaaggtgttgaggatgtagaggcgaggactagtcctacggcgacggccagtcccaatcacaacccctatgcgacgatcctatacaaaacaagatgactcatcaaatccaacaaacaattgtgatcagtaatttgcctgactgagagaaaattcatagacaactcaggtacaaaaaatatattagggacagtaaagtgtggagtgcaaagagaacccttgtgggttatatgacttaaggtaccatcagcagtctgaacagaagcgtcttctgtgacaggtgtggaagaaactaactgggactgatcagaagtcacatgaaaggaggctccagaatcaagagcccaagtcaaggacgaggctgtagcaggtgaagtagaagcaatagcaacgaaacctctaggtgtagaaccagtactacgac

SEQ ID NO: 2897 - DNA, 5828 bp, Zea Mays
gtttatcccttcaccagaccccactcatgtgggagcctgtgacactaggtttgccctttttaaggttatcgcttgatacctataatcccatatactggaattgattcttgctattaatcatagttatctacaagggatgctgcacctatgtggttgttggaaagactatcacctttttttttctccaggtgaaacaccataagagctggagatccaacacacaatgtatttctcttttgtctttatgtgcaaagaacaatgaaggcaaagagttggcccttagtttttctcaaggatcagatttcgttgaaatttcttctgatgttgacaagctgtgttcaatttggagcacagtttctctaagggttgatagttctgaggatgacagtgatgatggaaaaccttacaaggttataccaagaagttcgtaccatcttgtcaacaagaaaaacaactatggcattgcatttgttgatggcttgctagagtttgtgaaaaagccgggaaatccatttaaagtgcaggtttttgatgaatctattttttctgatgcttcaagacttactgttaaccatatgaaatgggacaattatacttacttggatgtggacgatgatgtgcctttttctgtgagggatagattggcaagtggtgcaagttctcaacatgtaatcatcaatgttgacaagattgtttttaccatcactcatgaagtctctgatactgatatttttttcccacttgtccaaacctgcataagtgatatccgtgttgttacgcaaatatttccatctaaaatcaggattctaagttcattcaaagtctcagcgcagtatttcattgcacgaagaaatctgtgggaagaactcatctctcctatcacctcctatacattctttcgatttaagttttttaccccagatccagttactaagtatggaaagacggccatgcgtttcttctttcaattaaagcaggtggatgtatttattaatgagctttcatttgacatccttctatatttggttggaaagttaaacttgatgggtccatatgctgtcaaaagctcggctatctttcctaactcctgcaagatagagaacagctcaaggctggcacttgtgtgtcattttaaagataatggggatgcactaattcctgggcaacagtcaacttcagttttcttgagccacttaacatttgatgataatatttcacatgatcaaatggtttctatttgcttactcaaggaaggtgtattttcaactattccaatcagcatttctctccacgagtctggtatttttgcatggagaacccgtgtgtcaccagtcaaagacctgacaaccttttctggaccatttattgtggtcaaggtgtctcatagttctgaggaaggcttatctctttcagttcaacctttggttaggatccataataagagtgactttcctcttgaactccggtttcagaggccaaacaaagctagtgaagaggctgcatttgtcacagttagaagtggagatatggtcgatgaatctactggagtatttgacgccatggatttgtctggtggaccaaaaagagcattgatgtctctagctcttggcaagtaactatacattatcttggcatgatgttggttcccattttgcatgacacaaaatagatcttattagctgctaagttattgcatgatgatcgattgaaaactattggagaaaagggatagtaaaggttctccataggaccacactgtacataaacttagtttcctttggaaaatggtagtacttagaaatgattttaattgtagtgttaattctgcataccattctttgtatactttgcatttattcaacagactatgtagcttgtgtgagaaagaatttccatgttcaatgctttcatgggttttctagaacatgttcaatagctgtgtgtcgtttcattaagaagaaataagtaaaaaaaaggaaggttaggaattaaatcccatctctgccccaaagacacccacccacctacatcctagggtaaagctaagaacgctcgccagacttggggcctgcttgtcaaaagctgaaacaaacagattacagaccaactgttgaggtgaattttgaggaaataaactacgagaggagatttttctggcttttggtgtgctgagaagctaaaaatctattacaaaagtcaatagaaaaaattattacaaaagtcaatagcaaaaaggcaacgaccagaagctagaagccaaaagcaagaaaactaacttttgagccaaaagctgcagctcaaacaaacagggtatagcgaccaactcacttaacacaactagattgcagtgtaagtgtccttagaagcaaatcctggactgctgccccagccaagcgctgaacgtcgagagtcggggcagccagcccaatccgcatcggaatacgcggtgagggactggcaactcacttaacacaactagattgcagtgtaagtgtccttagaagcaaatcctggactgctgccccagccaaacgctgaacgtcgagagtcggggcagccagcccaatccgcatcggaatacgcggtgagggactggacagggccgactccaaggtggaggccggaggagagagtgcccttcaaatagcgcaggatccgcttgagcagcgccaggtggggctcgcgcgagtcgtgcatgaagagacacccctgctgaacggcgtaggccaagtctgggcgggtcagggtgatgtactggagagcgtcggcgatgctcctgtacatggatggatcagcaatgggggcaccatcagtggcggagagcttggcgtgagtgtcgacaagggtcgatgtagagtgacactcagccatgccagcgcgctggagaagctcgacggtgtactgtcgctgagacaggaagatctcgtcggaggagcacgtgacggagatgttgaggaagtgatggaggtccccaaggtctgtcatggcgaattccgagtgaagaaggatgatgaagcgctgaagaagatccgtcgaagaggcggtgaggatgatgtcgtcgacgtagaggagtaggtaggcgagactctcaccctctttgtagacaaagagggagacgtcggaggaggcggtgaacccgagctggcggatgtacgtggcgaaccgctggtaccatgccctgggagcctgctttaagccataaagagagcgctgcagaagacaaacatggtcaggagcagcgaggtcgatgaagccgggcggctgctggcagtagacggtctcctcgaggtggccatgaagaaaagcgttcttcacgtccagctggcgaatgtaccacgaacgagaggcggcgatgctgaggacagtccggatggtcgggtgtttgaccaccgggctgaacgtctcgtcgtagtcgatgccatgctgctgagagaaaccgcgcaccacccagcgtgccttgtgacgagcaagagtgccatcagagtggtacttttgcttgaagatccatttcccggagacaacgttggcgccggggggtcgaggaacgaggcgccaggtgccgttgtcgatgagcgcctggtattcctcagccatggccgcgcgccagtttggatcagccaaaccgctgcggtagttgccgggtatcggagaggcaggcgtcgtcgcagtcgccgaaagacccacgtaccgcaccggtgggatggcgccagactgggtacgggtgacccgacggggctcgggaggcggcggaggtggagccggtgaagacgaggtggggtcttcgacgacggggagggctggctcagccacgtactcgggcagagctggtgtagtccgcgggcgtcgagcgtacacgcgcggacgttcgcgtggtgcgtccggaagtgtagtccgcggaggcggtggcgcagctgacgaaggaaatgtcgtagaggcgagctcctggaggacggggccgcgcatgaggatagcagggtcttcctcatgcacgacaggcgacggccgtggtcgctcgacgtcacgcggtgacggagctgccacgggaacaactgctgcagggttagaggcaatcaaaaaatccatatccgtcatagggaggggtgtggcgtagaagggaaaggctgtctcgttgaacacgacgtgacgagagataatgacgcgcctggtggtgaggttgaggcaacgatagcctttatgggaagaaggatatcccaagaagacacaggctgccgagcgcggagctagcttatgtggtgttgtggcagagaggtttggatagcagagacacccgaaaacacgaaggtgactgtagtcgggggtcttgttatatagtatggtgtagggaacgacgttgttcacagaggaacagggccgacgattgaggaggtaggtggcggtgacgagcgcctcagcccagtaaggtggcggcatgtgggcatgtatgaggagagtgcggctgatgttattcagcgtgcgaaggatccgctatgccttgccgttttgctgggatgtgtaagggcaggaaaatcggaaaagaatgccacgagatgaaaatagagaggtgagggtgtggttagcaaattcagtgccattgtcagtctggaaagtttttattgtaaagccaaattgggtttgcacacaaaggcgcaaaaatcagtgatgtgagaggctacttcagatttgcgaataagtggaaaagtccagcaaaaatgagagtaatcgtctaacaaaaccaaatagtactggcaccctgatatgctggccacgggagatgtccaaacatcacaatgaatcaaatcaaagggtgcagaactgcgtgtttgagaatgagtaaaaggtagtctcacatgtttgccaagctgacaagaatgacatagagatggttctactttattacaaggaatggcaaaagtatttctaagagtattgattgcagtagaagacggatgaccgagccgagagtgccacagggaggtggtgatggcaatggaggcgtgcggcaaggtgtgggtggcagctggaatggtgtagaggtccccatcactatcgcagcgaagcatcacgcgacgactcgccatatctgagagctcctagagggggggagtgaataggtgatcctgtaaaacttaaagcttaacaccacaaacttgattaagagttagaacaatgaaatcaagtgagtagataggagagctcttgtgaagcacaatagacacaataaggacaagcacaagagacacgaggatttatcccgtggttcgaccaagtacaaaacttgcctactccacgttgtggcgtcccaacgaacgagagttgcactcaactcctctcaagtgatccaatgatcaacttaaaataccacggtgttcttctttactttactttttcccgtttgcgaggaatctccacaacttggagtctctcgcccttacaataagaatcacaatgaagcactagagtaagggagggaagcaacacactcaaatccacagcaaatacgcacacacaagaccaagacttgagctcaagaccatatctcaaggttctcactagaacgaagctcaaatcactaagaatgtcgaacaagtgcgcaagaattaagtgtgagtgatcaacaatactcaaggaatgcttggtgtactcctccatgcgcctaggagtcccttttatagccccaaggcagctaggagccgttgagagcatttcaagaaggcaattcttgccttctgtcgcctggcgcaccggatagtccggtgcaccactggacactgtccggtgcggattcctttccttatttggcgaagccgaccgttggcgctttggagccg

SEQ ID NO: 2898 - DNA, 809 bp, Zea Mays
gtgaaacaccataagagctggagatccaacacacaatgtatttctcttttgtctttatgtgcaaagaacaatgaaggcaaagagttggcccttagtttttctcaaggatcagatttcgttgaaatttcttctgatgttgacaagctgtgttcaatttggagcacagtttctctaagggttgatagttctgaggatgacagtgatgatggaaaaccttacaaggttataccaagaagttcgtaccatcttgtcaacaagaaaaacaactatggcattgcatttgttgatggcttgctagagtttgtgaaaaagccgggaaatccatttaaagtgcaggtttttgatgaatctattttttctgatgcttcaagacttactgttaaccatatgaaatgggacaattatacttacttggatgtggacgatgatgtgcctttttctgtgagggatagattggcaagtggtgcaagttctcaacatgtaatcatcaatgttgacaagattgtttttaccatcactcatgaagtctctgatactgatatttttttcccacttgtccaaacctgcataagtgatatccgtgttgttacgcaaatatttccatctaaaatcaggattctaagttcattcaaagtctcagcgcagtatttcattgcacgaagaaatctgtgggaagaactcatctctcctatcacctcctatacattctttcgatttaagttttttaccccagatccagttactaagtatggaaagacggccatgcgtttcttctttcaattaaagcagaaggttcatcttcgttcttg

SEQ ID NO: 2899 - DNA, 5579 bp, Zea Mays
gtgaaacaccataagagctggagatccaacacacaatgtatttctcttttgtctttatgtgcaaagaacaatgaaggcaaagagttggcccttagtttttctcaaggatcagatttcgttgaaatttcttctgatgttgacaagctgtgttcaatttggagcacagtttctctaagggttgatagttctgaggatgacagtgatgatggaaaaccttacaaggttataccaagaagttcgtaccatcttgtcaacaagaaaaacaactatggcattgcatttgttgatggcttgctagagtttgtgaaaaagccgggaaatccatttaaagtgcaggtttttgatgaatctattttttctgatgcttcaagacttactgttaaccatatgaaatgggacaattatacttacttggatgtggacgatgatgtgcctttttctgtgagggatagattggcaagtggtgcaagttctcaacatgtaatcatcaatgttgacaagattgtttttaccatcactcatgaagtctctgatactgatatttttttcccacttgtccaaacctgcataagtgatatccgtgttgttacgcaaatatttccatctaaaatcaggattctaagttcattcaaagtctcagcgcagtatttcattgcacgaagaaatctgtgggaagaactcatctctcctatcacctcctatacattctttcgatttaagttttttaccccagatccagttactaagtatggaaagacggccatgcgtttcttctttcaattaaagcaggtggatgtatttattaatgagctttcatttgacatccttctatatttggttggaaagttaaacttgatgggtccatatgctgtcaaaagctcggctatctttcctaactcctgcaagatagagaacagctcaaggctggcacttgtgtgtcattttaaagataatggggatgcactaattcctgggcaacagtcaacttcagttttcttgaggaaggtgtattttcaactattccaatcagcatttctctccacgagtctggtatttttgcatggagaacccgtgtgtcaccagtcaaagacctgacaaccttttctggaccatttattgtggtcaaggtgtctcatagttctgaggaaggcttatctctttcagttcaacctttggttaggatccataataagagtgactttcctcttgaactccggtttcagaggccaaacaaagctagtgaagaggctgcatttgtcacagttagaagtggagatatggtcgatgaatctactggagtatttgacgccatggatttgtctggtggaccaaaaagagcattgatgtctctagctcttggcaagtaactatacattatcttggcatgatgttggttcccattttgcatgacacaaaatagatcttattagctgctaagttattgcatgatgatcgattgaaaactattggagaaaagggatagtaaaggttctccataggaccacactgtacataaacttagtttcctttggaaaatggtagtacttagaaatgattttaattgtagtgttaattctgcataccattctttgtatactttgcatttattcaacagactatgtagcttgtgtgagaaagaatttccatgttcaatgctttcatgggttttctagaacatgttcaatagctgtgtgtcgtttcattaagaagaaataagtaaaaaaaaggaaggttaggaattaaatcccatctctgccccaaagacacccacccacctacatcctagggtaaagctaagaacgctcgccagacttggggcctgcttgtcaaaagctgaaacaaacagattacagaccaactgttgaggtgaattttgaggaaataaactacgagaggagatttttctggcttttggtgtgctgagaagctaaaaatctattacaaaagtcaatagaaaaaattattacaaaagtcaatagcaaaaaggcaacgaccagaagctagaagccaaaagcaagaaaactaacttttgagccaaaagctgcagctcaaacaaacagggtatagcgaccaactcacttaacacaactagattgcagtgtaagtgtccttagaagcaaatcctggactgctgccccagccaagcgctgaacgtcgagagtcggggcagccagcccaatccgcatcggaatacgcggtgagggactggcaactcacttaacacaactagattgcagtgtaagtgtccttagaagcaaatcctggactgctgccccagccaaacgctgaacgtcgagagtcggggcagccagcccaatccgcatcggaatacgcggtgagggactggacagggccgactccaaggtggaggccggaggagagagtgcccttcaaatagcgcaggatccgcttgagcagcgccaggtggggctcgcgcgagtcgtgcatgaagagacacccctgctgaacggcgtaggccaagtctgggcgggtcagggtgatgtactggagagcgtcggcgatgctcctgtacatggatggatcagcaatgggggcaccatcagtggcggagagcttggcgtgagtgtcgacaagggtcgatgtagagtgacactcagccatgccagcgcgctggagaagctcgacggtgtactgtcgctgagacaggaagatctcgtcggaggagcacgtgacggagatgttgaggaagtgatggaggtccccaaggtctgtcatggcgaattccgagtgaagaaggatgatgaagcgctgaagaagatccgtcgaagaggcggtgaggatgatgtcgtcgacgtagaggagtaggtaggcgagactctcaccctctttgtagacaaagagggagacgtcggaggaggcggtgaacccgagctggcggatgtacgtggcgaaccgctggtaccatgccctgggagcctgctttaagccataaagagagcgctgcagaagacaaacatggtcaggagcagcgaggtcgatgaagccgggcggctgctggcagtagacggtctcctcgaggtggccatgaagaaaagcgttcttcacgtccagctggcgaatgtaccacgaacgagaggcggcgatgctgaggacagtccggatggtcgggtgtttgaccaccgggctgaacgtctcgtcgtagtcgatgccatgctgctgagagaaaccgcgcaccacccagcgtgccttgtgacgagcaagagtgccatcagagtggtacttttgcttgaagatccatttcccggagacaacgttggcgccggggggtcgaggaacgaggcgccaggtgccgttgtcgatgagcgcctggtattcctcagccatggccgcgcgccagtttggatcagccaaaccgctgcggtagttgccgggtatcggagaggcaggcgtcgtcgcagtcgccgaaagacccacgtaccgcaccggtgggatggcgccagactgggtacgggtgacccgacggggctcgggaggcggcggaggtggagccggtgaagacgaggtggggtcttcgacgacggggagggctggctcagccacgtactcgggcagagctggtgtagtccgcgggcgtcgagcgtacacgcgcggacgttcgcgtggtgcgtccggaagtgtagtccgcggaggcggtggcgcagctgacgaaggaaatgtcgtagaggcgagctcctggaggacggggccgcgcatgaggatagcagggtcttcctcatgcacgacaggcgacggccgtggtcgctcgacgtcacgcggtgacggagctgccacgggaacaactgctgcagggttagaggcaatcaaaaaatccatatccgtcatagggaggggtgtggcgtagaagggaaaggctgtctcgttgaacacgacgtgacgagagataatgacgcgcctggtggtgaggttgaggcaacgatagcctttatgggaagaaggatatcccaagaagacacaggctgccgagcgcggagctagcttatgtggtgttgtggcagagaggtttggatagcagagacacccgaaaacacgaaggtgactgtagtcgggggtcttgttatatagtatggtgtagggaacgacgttgttcacagaggaacagggccgacgattgaggaggtaggtggcggtgacgagcgcctcagcccagtaaggtggcggcatgtgggcatgtatgaggagagtgcggctgatgttattcagcgtgcgaaggatccgctatgccttgccgttttgctgggatgtgtaagggcaggaaaatcggaaaagaatgccacgagatgaaaatagagaggtgagggtgtggttagcaaattcagtgccattgtcagtctggaaagtttttattgtaaagccaaattgggtttgcacacaaaggcgcaaaaatcagtgatgtgagaggctacttcagatttgcgaataagtggaaaagtccagcaaaaatgagagtaatcgtctaacaaaaccaaatagtactggcaccctgatatgctggccacgggagatgtccaaacatcacaatgaatcaaatcaaagggtgcagaactgcgtgtttgagaatgagtaaaaggtagtctcacatgtttgccaagctgacaagaatgacatagagatggttctactttattacaaggaatggcaaaagtatttctaagagtattgattgcagtagaagacggatgaccgagccgagagtgccacagggaggtggtgatggcaatggaggcgtgcggcaaggtgtgggtggcagctggaatggtgtagaggtccccatcactatcgcagcgaagcatcacgcgacgactcgccatatctgagagctcctagagggggggagtgaataggtgatcctgtaaaacttaaagcttaacaccacaaacttgattaagagttagaacaatgaaatcaagtgagtagataggagagctcttgtgaagcacaatagacacaataaggacaagcacaagagacacgaggatttatcccgtggttcgaccaagtacaaaacttgcctactccacgttgtggcgtcccaacgaacgagagttgcactcaactcctctcaagtgatccaatgatcaacttaaaataccacggtgttcttctttactttactttttcccgtttgcgaggaatctccacaacttggagtctctcgcccttacaataagaatcacaatgaagcactagagtaagggagggaagcaacacactcaaatccacagcaaatacgcacacacaagaccaagacttgagctcaagaccatatctcaaggttctcactagaacgaagctcaaatcactaagaatgtcgaacaagtgcgcaagaattaagtgtgagtgatcaacaatactcaaggaatgcttggtgtactcctccatgcgcctaggagtcccttttatagccccaaggcagctaggagccgttgagagcatttcaagaaggcaattcttgccttctgtcgcctggcgcaccggatagtccggtgcaccactggacactgtccggtgcggattcctttccttatttggcgaagccgaccgttggcgctttggagccg

SEQ ID NO: 2900 - DNA, 5445 bp, Zea Mays
gtgaaacaccataagagctggagatccaacacacaatgtatttctcttttgtctttatgtgcaaagaacaatgaaggcaaagagttggcccttagtttttctcaaggatcagatttcgttgaaatttcttctgatgttgacaagctgtgttcaatttggagcacagtttctctaagggttgatagttctgaggatgacagtgatgatggaaaaccttacaaggttataccaagaagttcgtaccatcttgtcaacaagaaaaacaactatggcattgcatttgttgatggcttgctagagtttgtgaaaaagccgggaaatccatttaaagtgcaggtttttgatgaatctattttttctgatgcttcaagacttactgttaaccatatgaaatgggacaattatacttacttggatgtggacgatgatgtgcctttttctgtgagggatagattggcaagtggtgcaagttctcaacatgtaatcatcaatgttgacaagattgtttttaccatcactcatgaagtctctgatactgatatttttttcccacttgtccaaacctgcataagtgatatccgtgttgttacgcaaatatttccatctaaaatcaggattctaagttcattcaaagtctcagcgcagtatttcattgcacgaagaaatctgtgggaagaactcatctctcctatcacctcctatacattctttcgatttaagttttttaccccagatccagttactaagtatggaaagacggccatgcgtttcttctttcaattaaagcaggtggatgtatttattaatgagctttcatttgacatccttctatatttggttggaaagttaaacttgatgggtccatatgctgtcaaaagctcggctatctttcctaactcctgcaagatagagaacagctcaaggctggcacttgtgtgtcattttaaagataatggggatgcactaattcctgggcaacagtcaacttcagttttcttgaggaaggtgtattttcaactattccaatcagcatttctctccacgagtctggtatttttgcatggagaacccgtgtgtcaccagtcaaagaggccaaacaaagctagtgaagaggctgcatttgtcacagttagaagtggagatatggtcgatgaatctactggagtatttgacgccatggatttgtctggtggaccaaaaagagcattgatgtctctagctcttggcaagtaactatacattatcttggcatgatgttggttcccattttgcatgacacaaaatagatcttattagctgctaagttattgcatgatgatcgattgaaaactattggagaaaagggatagtaaaggttctccataggaccacactgtacataaacttagtttcctttggaaaatggtagtacttagaaatgattttaattgtagtgttaattctgcataccattctttgtatactttgcatttattcaacagactatgtagcttgtgtgagaaagaatttccatgttcaatgctttcatgggttttctagaacatgttcaatagctgtgtgtcgtttcattaagaagaaataagtaaaaaaaaggaaggttaggaattaaatcccatctctgccccaaagacacccacccacctacatcctagggtaaagctaagaacgctcgccagacttggggcctgcttgtcaaaagctgaaacaaacagattacagaccaactgttgaggtgaattttgaggaaataaactacgagaggagatttttctggcttttggtgtgctgagaagctaaaaatctattacaaaagtcaatagaaaaaattattacaaaagtcaatagcaaaaaggcaacgaccagaagctagaagccaaaagcaagaaaactaacttttgagccaaaagctgcagctcaaacaaacagggtatagcgaccaactcacttaacacaactagattgcagtgtaagtgtccttagaagcaaatcctggactgctgccccagccaagcgctgaacgtcgagagtcggggcagccagcccaatccgcatcggaatacgcggtgagggactggcaactcacttaacacaactagattgcagtgtaagtgtccttagaagcaaatcctggactgctgccccagccaaacgctgaacgtcgagagtcggggcagccagcccaatccgcatcggaatacgcggtgagggactggacagggccgactccaaggtggaggccggaggagagagtgcccttcaaatagcgcaggatccgcttgagcagcgccaggtggggctcgcgcgagtcgtgcatgaagagacacccctgctgaacggcgtaggccaagtctgggcgggtcagggtgatgtactggagagcgtcggcgatgctcctgtacatggatggatcagcaatgggggcaccatcagtggcggagagcttggcgtgagtgtcgacaagggtcgatgtagagtgacactcagccatgccagcgcgctggagaagctcgacggtgtactgtcgctgagacaggaagatctcgtcggaggagcacgtgacggagatgttgaggaagtgatggaggtccccaaggtctgtcatggcgaattccgagtgaagaaggatgatgaagcgctgaagaagatccgtcgaagaggcggtgaggatgatgtcgtcgacgtagaggagtaggtaggcgagactctcaccctctttgtagacaaagagggagacgtcggaggaggcggtgaacccgagctggcggatgtacgtggcgaaccgctggtaccatgccctgggagcctgctttaagccataaagagagcgctgcagaagacaaacatggtcaggagcagcgaggtcgatgaagccgggcggctgctggcagtagacggtctcctcgaggtggccatgaagaaaagcgttcttcacgtccagctggcgaatgtaccacgaacgagaggcggcgatgctgaggacagtccggatggtcgggtgtttgaccaccgggctgaacgtctcgtcgtagtcgatgccatgctgctgagagaaaccgcgcaccacccagcgtgccttgtgacgagcaagagtgccatcagagtggtacttttgcttgaagatccatttcccggagacaacgttggcgccggggggtcgaggaacgaggcgccaggtgccgttgtcgatgagcgcctggtattcctcagccatggccgcgcgccagtttggatcagccaaaccgctgcggtagttgccgggtatcggagaggcaggcgtcgtcgcagtcgccgaaagacccacgtaccgcaccggtgggatggcgccagactgggtacgggtgacccgacggggctcgggaggcggcggaggtggagccggtgaagacgaggtggggtcttcgacgacggggagggctggctcagccacgtactcgggcagagctggtgtagtccgcgggcgtcgagcgtacacgcgcggacgttcgcgtggtgcgtccggaagtgtagtccgcggaggcggtggcgcagctgacgaaggaaatgtcgtagaggcgagctcctggaggacggggccgcgcatgaggatagcagggtcttcctcatgcacgacaggcgacggccgtggtcgctcgacgtcacgcggtgacggagctgccacgggaacaactgctgcagggttagaggcaatcaaaaaatccatatccgtcatagggaggggtgtggcgtagaagggaaaggctgtctcgttgaacacgacgtgacgagagataatgacgcgcctggtggtgaggttgaggcaacgatagcctttatgggaagaaggatatcccaagaagacacaggctgccgagcgcggagctagcttatgtggtgttgtggcagagaggtttggatagcagagacacccgaaaacacgaaggtgactgtagtcgggggtcttgttatatagtatggtgtagggaacgacgttgttcacagaggaacagggccgacgattgaggaggtaggtggcggtgacgagcgcctcagcccagtaaggtggcggcatgtgggcatgtatgaggagagtgcggctgatgttattcagcgtgcgaaggatccgctatgccttgccgttttgctgggatgtgtaagggcaggaaaatcggaaaagaatgccacgagatgaaaatagagaggtgagggtgtggttagcaaattcagtgccattgtcagtctggaaagtttttattgtaaagccaaattgggtttgcacacaaaggcgcaaaaatcagtgatgtgagaggctacttcagatttgcgaataagtggaaaagtccagcaaaaatgagagtaatcgtctaacaaaaccaaatagtactggcaccctgatatgctggccacgggagatgtccaaacatcacaatgaatcaaatcaaagggtgcagaactgcgtgtttgagaatgagtaaaaggtagtctcacatgtttgccaagctgacaagaatgacatagagatggttctactttattacaaggaatggcaaaagtatttctaagagtattgattgcagtagaagacggatgaccgagccgagagtgccacagggaggtggtgatggcaatggaggcgtgcggcaaggtgtgggtggcagctggaatggtgtagaggtccccatcactatcgcagcgaagcatcacgcgacgactcgccatatctgagagctcctagagggggggagtgaataggtgatcctgtaaaacttaaagcttaacaccacaaacttgattaagagttagaacaatgaaatcaagtgagtagataggagagctcttgtgaagcacaatagacacaataaggacaagcacaagagacacgaggatttatcccgtggttcgaccaagtacaaaacttgcctactccacgttgtggcgtcccaacgaacgagagttgcactcaactcctctcaagtgatccaatgatcaacttaaaataccacggtgttcttctttactttactttttcccgtttgcgaggaatctccacaacttggagtctctcgcccttacaataagaatcacaatgaagcactagagtaagggagggaagcaacacactcaaatccacagcaaatacgcacacacaagaccaagacttgagctcaagaccatatctcaaggttctcactagaacgaagctcaaatcactaagaatgtcgaacaagtgcgcaagaattaagtgtgagtgatcaacaatactcaaggaatgcttggtgtactcctccatgcgcctaggagtcccttttatagccccaaggcagctaggagccgttgagagcatttcaagaaggcaattcttgccttctgtcgcctggcgcaccggatagtccggtgcaccactggacactgtccggtgcggattcctttccttatttggcgaagccgaccgttggcgctttggagccg

SEQ ID NO: 2901 - DNA, 3425 bp, Zea Mays
agcacatttgggaagtaggattcccaatcggcagaacatagaactctatccaacttcacaagcactgggttatcttgttgattggtccaggtcaagcaaattacgaataagcccacaaagtgagaaaggatcagaagttattattgatttagaagcactgtctggcttcactgaattttttcttgagatccaagataatatatttccccatcgtattgctgcttttggagtgtctttacaacctgtttcttataacttgcctgtgccatcacaagtagtactaatagctccaagatatgttctttcaaatgagtctgatgctgcaattgctgttcgtcaatgttttgttgagcacggcattgatggattgacagttgaagctaaacagcgggctgctttacagacatggaaacctgggaaaaaacgagaagtaaattactttgatttatttgttaagaagcacagaaatgtttttgaggattctcacatttttatccagttctgtccaaaagaacctggatacagttggtctggaccaatctgtgtttcatcaattggtcgttttttcttgaaatttagaagattagaaggaatgctggaagatggtattaaaagagaccctttgaatgctgggaagctgaaactatttgcttctgtcgatgttgctcaagagacaacttcttttgtgctacacttcactaaaccaccgaaggttacactcccatatcgaatagaaaattacttgagcgaatcatctatcctgtatttccagaaggattcagttgattcagatgtattacaccctcaagagtcagaacagtatgcttgggatgatttaagttcaccgcgcaaactggttgtccgaattgttgatacacctgcattgcgtgaaattaaaatagataaaatcagcccatggaagccatttttgaagatgcgccaaaatagcaggcttaatctggatttctcattcagtggtggactcaattcgagaaaacagagatttgatgaatcatttggcttgagagtgttcaaaattggctacgaagtgtatgccgatggtttaacaagagttttacgaatttgtgaacatgcagataatcccaaaattgagaaaattcaatggccaatagcaaatatacagttcagaatttcttatgtgtgtattcatcttcttgacaaggaccagaatggggaaaatgtccaattgccatctacaattttagcagcaagacttcagcatgtttcttctgattcagttgtcacaaatagattcaagcaagtatctgttgcaattcattcattgaatgtggatgaaaaatgggaaggggcttcaattgggacaattcttaggaggaacaagcttcaggatgctactctcgatgaaaatattcttcgtatgatctttgtactgaattcaactgactccagtgtcaaacaaatacagtattgtgccatcatcctacagcctgttgatcttaagattgatgaggaaacgttaatgaagctagtaccattttggagagcatctcttgcaccttcaggcacgacaagcacacaattttatttcagacgttttgaagtacatccaattaagatcatagcaagctttcggcctggtggccgacgcacaacatatagttctgctcaagaggctctgagggcactacttcatagtgttataaaggtgcctgaaattagcaactcagctgtggagctcaatggggttctcctaaatcatgctttagttacatttcgtgagctacttctaaaatgcgctcagcactactcatggtatgtattaagggcaatttatgtaacaaagggaagcaaattgcttcctccatcttttgcctcaatttttgatgactctgcttcatctgttcttgatgtcttcttcgacccttctgatggatcgctcaacgtccctggccttaccataggcatgtttaaatttataagcaagaacatgaagtcgggtggtttttctggaacaaaacggtaccttggtgatctcgggaaaactgttaaaactgcaagttcgaacgctctctttgctgctgtcacagaaatttcagatagtgttgttagaggagcggaaacaaatggtttgaatggcatggttactggtttccaccagggcatgttgaggttggcgatggagccatctgtcttagggcaggctataatggagggaggtcctgacagaaagatcaaacttgatcatagccctggacttgatgagctatacattgaagggtacctgcaggctatgttggatgtcatgtataagcaagaatacctccgtgtcagggtgattgatgaccaggttatactgaagaatctaccaccaaatagcgccctgataaacgaaatcgtggacaacgtcaaaagctttcttgtgagcaaggcactgttgaaaggcgattcttccacagttcgaccgatgcgccatctgcgaaatgaacctgaatggaggattgccccaacggtgctcaccctctgcgagcacctttttgtgagcttcgctgtgcgtgtgctgcaccgggaagccagcaaggccatcgctggagtcatgtcgagagtgaagaaaccgaccggagaggaggtcgaaggcgactcgcccgcatctggtggcgtcctgtgtaagcggaataggctgtggactgtcgggaggtttgccgtctcgggcatggtcgcctatgtagatggccggctgtgccggcacatacccaaccccatagcccggaggatcgtcagcgggtttctactgagcttcatcgaaaacaggggcaacgaataagcgggcagccggacaggtgataaaagggctcgccttctgccacctgctaataaggcgtaccatggaccatggtaaataggcgtgcacgttgtacaaagaaccgaggtgtggtagtgctcttgagccgtaaccgatctctgcatagagctgtgcatcaattttgaccgccttcaggcccacgtttggtgtacagaaacactgggacagtaattccgcagatgctacttcctgcctacatttcgttgacatggactcgtgcttagagtaagtttaatagtccacaacgagccttttcacataacaaactcggttagaggccctttcacatagtctatctatatcatcttattatacttgttctacatgcaaagtgataaatagcatggctatgataaacgtatggagccgttggtgtgttgatcatgagtcactccactgggtatatctctaattttattgtttctaaattcaataaggtgttcttgttttaaccgccagcatgtttattatggttgtcaatgcagcgattaattatagttcacacgtgtacatgtgttgttacaaattcactattgattgggtcaagttaaacataaaaatacctaatttcttgacgatccaa

SEQ ID NO: 2902 - DNA, 3409 bp, Zea Mays
agcacatttgggaagtaggattcccaatcggcagaacatagaactctatccaacttcacaagcactgggttatcttgttgattggtccaggtcaagcaaattacgaataagcccacaaagtgagaaaggatcagaagttattattgatttagaagcactgtctggcttcactgaattttttcttgagatccaagataatatatttccccatcgtattgctgcttttggagtgtctttacaacctgtttcttataacttgcctgtgccatcacaagtagtactaatagctccaagatatgttctttcaaatgagtctgatgctgcaattgctgttcgtcaatgttttgttgagcacggcattgatggattgacagttgaagctaaacagcgggctgctttacagacatggaaacctgggaaaaaacgagaagtaaattactttgatttatttgttaagaagcacagaaatgtttttgaggattctcacatttttatccagttctgtccaaaagaacctggatacagttggtctggaccaatctgtgtttcatcaattggtcgttttttcttgaaatttagaagattagaaggaatgctggaagatggtattaaaagagaccctttgaatgctgggaagctgaaactatttgcttctgtcgatgttgctcaagagacaacttcttttgtgctacacttcactaaaccaccgaaggttacactcccatatcgaatagaaaattacttgagcgaatcatctatcctgtatttccagaaggattcagttgattcagatgtattacaccctcaagagtcagaacagtatgcttgggatgatttaagttcaccgcgcaaactgatacacctgcattgcgtgaaattaaaatagataaaatcagcccatggaagccatttttgaagatgcgccaaaatagcaggcttaatctggatttctcattcagtggtggactcaattcgagaaaacagagatttgatgaatcatttggcttgagagtgttcaaaattggctacgaagtgtatgccgatggtttaacaagagttttacgaatttgtgaacatgcagataatcccaaaattgagaaaattcaatggccaatagcaaatatacagttcagaatttcttatgtgtgtattcatcttcttgacaaggaccagaatggggaaaatgtccaattgccatctacaattttagcagcaagacttcagcatgtttcttctgattcagttgtcacaaatagattcaagcaagtatctgttgcaattcattcattgaatgtggatgaaaaatgggaaggggcttcaattgggacaattcttaggaggaacaagcttcaggatgctactctcgatgaaaatattcttcgtatgatctttgtactgaattcaactgactccagtgtcaaacaaatacagtattgtgccatcatcctacagcctgttgatcttaagattgatgaggaaacgttaatgaagctagtaccattttggagagcatctcttgcaccttcaggcacgacaagcacacaattttatttcagacgttttgaagtacatccaattaagatcatagcaagctttcggcctggtggccgacgcacaacatatagttctgctcaagaggctctgagggcactacttcatagtgttataaaggtgcctgaaattagcaactcagctgtggagctcaatggggttctcctaaatcatgctttagttacatttcgtgagctacttctaaaatgcgctcagcactactcatggtatgtattaagggcaatttatgtaacaaagggaagcaaattgcttcctccatcttttgcctcaatttttgatgactctgcttcatctgttcttgatgtcttcttcgacccttctgatggatcgctcaacgtccctggccttaccataggcatgtttaaatttataagcaagaacatgaagtcgggtggtttttctggaacaaaacggtaccttggtgatctcgggaaaactgttaaaactgcaagttcgaacgctctctttgctgctgtcacagaaatttcagatagtgttgttagaggagcggaaacaaatggtttgaatggcatggttactggtttccaccagggcatgttgaggttggcgatggagccatctgtcttagggcaggctataatggagggaggtcctgacagaaagatcaaacttgatcatagccctggacttgatgagctatacattgaagggtacctgcaggctatgttggatgtcatgtataagcaagaatacctccgtgtcagggtgattgatgaccaggttatactgaagaatctaccaccaaatagcgccctgataaacgaaatcgtggacaacgtcaaaagctttcttgtgagcaaggcactgttgaaaggcgattcttccacagttcgaccgatgcgccatctgcgaaatgaacctgaatggaggattgccccaacggtgctcaccctctgcgagcacctttttgtgagcttcgctgtgcgtgtgctgcaccgggaagccagcaaggccatcgctggagtcatgtcgagagtgaagaaaccgaccggagaggaggtcgaaggcgactcgcccgcatctggtggcgtcctgtgtaagcggaataggctgtggactgtcgggaggtttgccgtctcgggcatggtcgcctatgtagatggccggctgtgccggcacatacccaaccccatagcccggaggatcgtcagcgggtttctactgagcttcatcgaaaacaggggcaacgaataagcgggcagccggacaggtgataaaagggctcgccttctgccacctgctaataaggcgtaccatggaccatggtaaataggcgtgcacgttgtacaaagaaccgaggtgtggtagtgctcttgagccgtaaccgatctctgcatagagctgtgcatcaattttgaccgccttcaggcccacgtttggtgtacagaaacactgggacagtaattccgcagatgctacttcctgcctacatttcgttgacatggactcgtgcttagagtaagtttaatagtccacaacgagccttttcacataacaaactcggttagaggccctttcacatagtctatctatatcatcttattatacttgttctacatgcaaagtgataaatagcatggctatgataaacgtatggagccgttggtgtgttgatcatgagtcactccactgggtatatctctaattttattgtttctaaattcaataaggtgttcttgttttaaccgccagcatgtttattatggttgtcaatgcagcgattaattatagttcacacgtgtacatgtgttgttacaaattcactattgattgggtcaagttaaacataaaaatacctaatttcttgacgatccaa

SEQ ID NO: 2903 - DNA, 3389 bp, Zea Mays
ggcagaacatagaactctatccaacttcacaagcactgggttatcttgttgattggtccaggtcaagcaaattacgaataagcccacaaagtgagaaaggatcagaagttattattgatttagaagcactgtctggcttcactgaattttttcttgagatccaagataatatatttccccatcgtattgctgcttttggagtgtctttacaacctgtttcttataacttgcctgtgccatcacaagtagtactaatagctccaagatatgttctttcaaatgagtctgatgctgcaattgctgttcgtcaatgttttgttgagcacggcattgatggattgacagttgaagctaaacagcgggctgctttacagacatggaaacctgggaaaaaacgagaagtaaattactttgatttatttgttaagaagcacagaaatgtttttgaggattctcacatttttatccagttctgtccaaaagaacctggatacagttggtctggaccaatctgtgtttcatcaattggtcgttttttcttgaaatttagaagattagaaggaatgctggaagatggtattaaaagagaccctttgaatgctgggaagctgaaactatttgcttctgtcgatgttgctcaagagacaacttcttttgtgctacacttcactaaaccaccgaaggttacactcccatatcgaatagaaaattacttgagcgaatcatctatcctgtatttccagaagttgattcagatgtattacaccctcaagagtcagaacagtatgcttgggatgatttaagttcaccgcgcaaactggttgtccgaattgttgatacacctgcattgcgtgaaattaaaatagataaaatcagcccatggaagccatttttgaagatgcgccaaaatagcaggcttaatctggatttctcattcagtggtggactcaattcgagaaaacagagatttgatgaatcatttggcttgagagtgttcaaaattggctacgaagtgtatgccgatggtttaacaagagttttacgaatttgtgaacatgcagataatcccaaaattgagaaaattcaatggccaatagcaaatatacagttcagaatttcttatgtgtgtattcatcttcttgacaaggaccagaatggggaaaatgtccaattgccatctacaattttagcagcaagacttcagcatgtttcttctgattcagttgtcacaaatagattcaagcaagtatctgttgcaattcattcattgaatgtggatgaaaaatgggaaggggcttcaattgggacaattcttaggaggaacaagcttcaggatgctactctcgatgaaaatattcttcgtatgatctttgtactgaattcaactgactccagtgtcaaacaaatacagtattgtgccatcatcctacagcctgttgatcttaagattgatgaggaaacgttaatgaagctagtaccattttggagagcatctcttgcaccttcaggcacgacaagcacacaattttatttcagacgttttgaagtacatccaattaagatcatagcaagctttcggcctggtggccgacgcacaacatatagttctgctcaagaggctctgagggcactacttcatagtgttataaaggtgcctgaaattagcaactcagctgtggagctcaatggggttctcctaaatcatgctttagttacatttcgtgagctacttctaaaatgcgctcagcactactcatggtatgtattaagggcaatttatgtaacaaagggaagcaaattgcttcctccatcttttgcctcaatttttgatgactctgcttcatctgttcttgatgtcttcttcgacccttctgatggatcgctcaacgtccctggccttaccataggcatgtttaaatttataagcaagaacatgaagtcgggtggtttttctggaacaaaacggtaccttggtgatctcgggaaaactgttaaaactgcaagttcgaacgctctctttgctgctgtcacagaaatttcagatagtgttgttagaggagcggaaacaaatggtttgaatggcatggttactggtttccaccagggcatgttgaggttggcgatggagccatctgtcttagggcaggctataatggagggaggtcctgacagaaagatcaaacttgatcatagccctggacttgatgagctatacattgaagggtacctgcaggctatgttggatgtcatgtataagcaagaatacctccgtgtcagggtgattgatgaccaggttatactgaagaatctaccaccaaatagcgccctgataaacgaaatcgtggacaacgtcaaaagctttcttgtgagcaaggcactgttgaaaggcgattcttccacagttcgaccgatgcgccatctgcgaaatgaacctgaatggaggattgccccaacggtgctcaccctctgcgagcacctttttgtgagcttcgctgtgcgtgtgctgcaccgggaagccagcaaggccatcgctggagtcatgtcgagagtgaagaaaccgaccggagaggaggtcgaaggcgactcgcccgcatctggtggcgtcctgtgtaagcggaataggctgtggactgtcgggaggtttgccgtctcgggcatggtcgcctatgtagatggccggctgtgccggcacatacccaaccccatagcccggaggatcgtcagcgggtttctactgagcttcatcgaaaacaggggcaacgaataagcgggcagccggacaggtgataaaagggctcgccttctgccacctgctaataaggcgtaccatggaccatggtaaataggcgtgcacgttgtacaaagaaccgaggtgtggtagtgctcttgagccgtaaccgatctctgcatagagctgtgcatcaattttgaccgccttcaggcccacgtttggtgtacagaaacactgggacagtaattccgcagatgctacttcctgcctacatttcgttgacatggactcgtgcttagagtaagtttaatagtccacaacgagccttttcacataacaaactcggttagaggccctttcacatagtctatctatatcatcttattatacttgttctacatgcaaagtgataaatagcatggctatgataaacgtatggagccgttggtgtgttgatcatgagtcactccactgggtatatctctaattttattgtttctaaattcaataaggtgttcttgttttaaccgccagcatgtttattatggttgtcaatgcagcgattaattatagttcacacgtgtacatgtgttgttacaaattcactattgattgggtcaagttaaacataaaaatacctaatttcttgacgatccaa

SEQ ID NO: 2904 - DNA, 3373 bp, Zea Mays
ggcagaacatagaactctatccaacttcacaagcactgggttatcttgttgattggtccaggtcaagcaaattacgaataagcccacaaagtgagaaaggatcagaagttattattgatttagaagcactgtctggcttcactgaattttttcttgagatccaagataatatatttccccatcgtattgctgcttttggagtgtctttacaacctgtttcttataacttgcctgtgccatcacaagtagtactaatagctccaagatatgttctttcaaatgagtctgatgctgcaattgctgttcgtcaatgttttgttgagcacggcattgatggattgacagttgaagctaaacagcgggctgctttacagacatggaaacctgggaaaaaacgagaagtaaattactttgatttatttgttaagaagcacagaaatgtttttgaggattctcacatttttatccagttctgtccaaaagaacctggatacagttggtctggaccaatctgtgtttcatcaattggtcgttttttcttgaaatttagaagattagaaggaatgctggaagatggtattaaaagagaccctttgaatgctgggaagctgaaactatttgcttctgtcgatgttgctcaagagacaacttcttttgtgctacacttcactaaaccaccgaaggttacactcccatatcgaatagaaaattacttgagcgaatcatctatcctgtatttccagaagttgattcagatgtattacaccctcaagagtcagaacagtatgcttgggatgatttaagttcaccgcgcaaactgatacacctgcattgcgtgaaattaaaatagataaaatcagcccatggaagccatttttgaagatgcgccaaaatagcaggcttaatctggatttctcattcagtggtggactcaattcgagaaaacagagatttgatgaatcatttggcttgagagtgttcaaaattggctacgaagtgtatgccgatggtttaacaagagttttacgaatttgtgaacatgcagataatcccaaaattgagaaaattcaatggccaatagcaaatatacagttcagaatttcttatgtgtgtattcatcttcttgacaaggaccagaatggggaaaatgtccaattgccatctacaattttagcagcaagacttcagcatgtttcttctgattcagttgtcacaaatagattcaagcaagtatctgttgcaattcattcattgaatgtggatgaaaaatgggaaggggcttcaattgggacaattcttaggaggaacaagcttcaggatgctactctcgatgaaaatattcttcgtatgatctttgtactgaattcaactgactccagtgtcaaacaaatacagtattgtgccatcatcctacagcctgttgatcttaagattgatgaggaaacgttaatgaagctagtaccattttggagagcatctcttgcaccttcaggcacgacaagcacacaattttatttcagacgttttgaagtacatccaattaagatcatagcaagctttcggcctggtggccgacgcacaacatatagttctgctcaagaggctctgagggcactacttcatagtgttataaaggtgcctgaaattagcaactcagctgtggagctcaatggggttctcctaaatcatgctttagttacatttcgtgagctacttctaaaatgcgctcagcactactcatggtatgtattaagggcaatttatgtaacaaagggaagcaaattgcttcctccatcttttgcctcaatttttgatgactctgcttcatctgttcttgatgtcttcttcgacccttctgatggatcgctcaacgtccctggccttaccataggcatgtttaaatttataagcaagaacatgaagtcgggtggtttttctggaacaaaacggtaccttggtgatctcgggaaaactgttaaaactgcaagttcgaacgctctctttgctgctgtcacagaaatttcagatagtgttgttagaggagcggaaacaaatggtttgaatggcatggttactggtttccaccagggcatgttgaggttggcgatggagccatctgtcttagggcaggctataatggagggaggtcctgacagaaagatcaaacttgatcatagccctggacttgatgagctatacattgaagggtacctgcaggctatgttggatgtcatgtataagcaagaatacctccgtgtcagggtgattgatgaccaggttatactgaagaatctaccaccaaatagcgccctgataaacgaaatcgtggacaacgtcaaaagctttcttgtgagcaaggcactgttgaaaggcgattcttccacagttcgaccgatgcgccatctgcgaaatgaacctgaatggaggattgccccaacggtgctcaccctctgcgagcacctttttgtgagcttcgctgtgcgtgtgctgcaccgggaagccagcaaggccatcgctggagtcatgtcgagagtgaagaaaccgaccggagaggaggtcgaaggcgactcgcccgcatctggtggcgtcctgtgtaagcggaataggctgtggactgtcgggaggtttgccgtctcgggcatggtcgcctatgtagatggccggctgtgccggcacatacccaaccccatagcccggaggatcgtcagcgggtttctactgagcttcatcgaaaacaggggcaacgaataagcgggcagccggacaggtgataaaagggctcgccttctgccacctgctaataaggcgtaccatggaccatggtaaataggcgtgcacgttgtacaaagaaccgaggtgtggtagtgctcttgagccgtaaccgatctctgcatagagctgtgcatcaattttgaccgccttcaggcccacgtttggtgtacagaaacactgggacagtaattccgcagatgctacttcctgcctacatttcgttgacatggactcgtgcttagagtaagtttaatagtccacaacgagccttttcacataacaaactcggttagaggccctttcacatagtctatctatatcatcttattatacttgttctacatgcaaagtgataaatagcatggctatgataaacgtatggagccgttggtgtgttgatcatgagtcactccactgggtatatctctaattttattgtttctaaattcaataaggtgttcttgttttaaccgccagcatgtttattatggttgtcaatgcagcgattaattatagttcacacgtgtacatgtgttgttacaaattcactattgattgggtcaagttaaacataaaaatacctaatttcttgacgatccaa

SEQ ID NO: 2905 - DNA, 3314 bp, Zea Mays
caattctctggagtccagtatggccaatgttcctcttccaagccacaaggatgccaccactgtttcccatcgaaggtcaagcaaattacgaataagcccacaaagtgagaaaggatcagaagttattattgatttagaagcactgtctggcttcactgaattttttcttgagatccaagataatatatttccccatcgtattgctgcttttggagtgtctttacaacctgtttcttataacttgcctgtgccatcacaagtagtactaatagctccaagatatgttctttcaaatgagtctgatgctgcaattgctgttcgtcaatgttttgttgagcacggcattgatggattgacagttgaagctaaacagcgggctgctttacagacatggaaacctgggaaaaaacgagaagtaaattactttgatttatttgttaagaagcacagaaatgtttttgaggattctcacatttttatccagttctgtccaaaagaacctggatacagttggtctggaccaatctgtgtttcatcaattggtcgttttttcttgaaatttagaagattagaaggaatgctggaagatggtattaaaagagaccctttgaatgctgggaagctgaaactatttgcttctgtcgatgttgctcaagagacaacttcttttgtgctacacttcactaaaccaccgaaggttacactcccatatcgaatagaaaattacttgagcgaatcatctatcctgtatttccagaaggattcagttgattcagatgtattacaccctcaagagtcagaacagtatgcttgggatgatttaagttcaccgcgcaaactggttgtccgaattgttgatacacctgcattgcgtgaaattaaaatagataaaatcagcccatggaagccatttttgaagatgcgccaaaatagcaggcttaatctggatttctcattcagtggtggactcaattcgagaaaacagagatttgatgaatcatttggcttgagagtgttcaaaattggctacgaagtgtatgccgatggtttaacaagagttttacgaatttgtgaacatgcagataatcccaaaattgagaaaattcaatggccaatagcaaatatacagttcagaatttcttatgtgtgtattcatcttcttgacaaggaccagaatggggaaaatgtccaattgccatctacaattttagcagcaagacttcagcatgtttcttctgattcagttgtcacaaatagattcaagcaagtatctgttgcaattcattcattgaatgtggatgaaaaatgggaaggggcttcaattgggacaattcttaggaggaacaagcttcaggatgctactctcgatgaaaatattcttcgtatgatctttgtactgaattcaactgactccagtgtcaaacaaatacagtattgtgccatcatcctacagcctgttgatcttaagattgatgaggaaacgttaatgaagctagtaccattttggagagcatctcttgcaccttcaggcacgacaagcacacaattttatttcagacgttttgaagtacatccaattaagatcatagcaagctttcggcctggtggccgacgcacaacatatagttctgctcaagaggctctgagggcactacttcatagtgttataaaggtgcctgaaattagcaactcagctgtggagctcaatggggttctcctaaatcatgctttagttacatttcgtgagctacttctaaaatgcgctcagcactactcatggtatgtattaagggcaatttatgtaacaaagggaagcaaattgcttcctccatcttttgcctcaatttttgatgactctgcttcatctgttcttgatgtcttcttcgacccttctgatggatcgctcaacgtccctggccttaccataggcatgtttaaatttataagcaagaacatgaagtcgggtggtttttctggaacaaaacggtaccttggtgatctcgggaaaactgttactggtttccaccagggcatgttgaggttggcgatggagccatctgtcttagggcaggctataatggagggaggtcctgacagaaagatcaaacttgatcatagccctggacttgatgagctatacattgaagggtacctgcaggctatgttggatgtcatgtataagcaagaatacctccgtgtcagggtgattgatgaccaggttatactgaagaatctaccaccaaatagcgccctgataaacgaaatcgtggacaacgtcaaaagctttcttgtgagcaaggcactgttgaaaggcgattcttccacagttcgaccgatgcgccatctgcgaaatgaacctgaatggaggattgccccaacggtgctcaccctctgcgagcacctttttgtgagcttcgctgtgcgtgtgctgcaccgggaagccagcaaggccatcgctggagtcatgtcgagagtgaagaaaccgaccggagaggaggtcgaaggcgactcgcccgcatctggtggcgtcctgtgtaagcggaataggctgtggactgtcgggaggtttgccgtctcgggcatggtcgcctatgtagatggccggctgtgccggcacatacccaaccccatagcccggaggatcgtcagcgggtttctactgagcttcatcgaaaacaggggcaacgaataagcgggcagccggacaggtgataaaagggctcgccttctgccacctgctaataaggcgtaccatggaccatggtaaataggcgtgcacgttgtacaaagaaccgaggtgtggtagtgctcttgagccgtaaccgatctctgcatagagctgtgcatcaattttgaccgccttcaggcccacgtttggtgtacagaaacactgggacagtaattccgcagatgctacttcctgcctacatttcgttgacatggactcgtgcttagagtaagtttaatagtccacaacgagccttttcacataacaaactcggttagaggccctttcacatagtctatctatatcatcttattatacttgttctacatgcaaagtgataaatagcatggctatgataaacgtatggagccgttggtgtgttgatcatgagtcactccactgggtatatctctaattttattgtttctaaattcaataaggtgttcttgttttaaccgccagcatgtttattatggttgtcaatgcagcgattaattatagttcacacgtgtacatgtgttgttacaaattcactattgattgggtcaagttaaacataaaaatacctaatttcttgacgatccaa

SEQ ID NO: 2906 - DNA, 2396 bp, Zea Mays
ctttggtctcccagctgccttttctagagtcaagactatttctagcgcttaatgctgtgacagctgagataatcccaaaattgagaaaattcaatggccaatagcaaatatacagttcagaatttcttatgtgtgtattcatcttcttgacaaggaccagaatggggaaaatgtccaattgccatctacaattttagcagcaagacttcagcatgtttcttctgattcagttgtcacaaatagattcaagcaagtatctgttgcaattcattcattgaatgtggatgaaaaatgggaaggggcttcaattgggacaattcttaggaggaacaagcttcaggatgctactctcgatgaaaatattcttcgtatgatctttgtactgaattcaactgactccagtgtcaaacaaatacagtattgtgccatcatcctacagcctgttgatcttaagattgatgaggaaacgttaatgaagctagtaccattttggagagcatctcttgcaccttcaggcacgacaagcacacaattttatttcagacgttttgaagtacatccaattaagatcatagcaagctttcggcctggtggccgacgcacaacatatagttctgctcaagaggctctgagggcactacttcatagtgttataaaggtgcctgaaattagcaactcagctgtggagctcaatggggttctcctaaatcatgctttagttacatttcgtgagctacttctaaaatgcgctcagcactactcatggtatgtattaagggcaatttatgtaacaaagggaagcaaattgcttcctccatcttttgcctcaatttttgatgactctgcttcatctgttcttgatgtcttcttcgacccttctgatggatcgctcaacgtccctggccttaccataggcatgtttaaatttataagcaagaacatgaagtcgggtggtttttctggaacaaaacggtaccttggtgatctcgggaaaactgttaaaactgcaagttcgaacgctctctttgctgctgtcacagaaatttcagatagtgttgttagaggagcggaaacaaatggtttgaatggcatggttactggtttccaccagggcatgttgaggttggcgatggagccatctgtcttagggcaggctataatggagggaggtcctgacagaaagatcaaacttgatcatagccctggacttgatgagctatacattgaagggtacctgcaggctatgttggatgtcatgtataagcaagaatacctccgtgtcagggtgattgatgaccaggttatactgaagaatctaccaccaaatagcgccctgataaacgaaatcgtggacaacgtcaaaagctttcttgtgagcaaggcactgttgaaaggcgattcttccacagttcgaccgatgcgccatctgcgaaatgaacctgaatggaggattgccccaacggtgctcaccctctgcgagcacctttttgtgagcttcgctgtgcgtgtgctgcaccgggaagccagcaaggccatcgctggagtcatgtcgagagtgaagaaaccgaccggagaggaggtcgaaggcgactcgcccgcatctggtggcgtcctgtgtaagcggaataggctgtggactgtcgggaggtttgccgtctcgggcatggtcgcctatgtagatggccggctgtgccggcacatacccaaccccatagcccggaggatcgtcagcgggtttctactgagcttcatcgaaaacaggggcaacgaataagcgggcagccggacaggtgataaaagggctcgccttctgccacctgctaataaggcgtaccatggaccatggtaaataggcgtgcacgttgtacaaagaaccgaggtgtggtagtgctcttgagccgtaaccgatctctgcatagagctgtgcatcaattttgaccgccttcaggcccacgtttggtgtacagaaacactgggacagtaattccgcagatgctacttcctgcctacatttcgttgacatggactcgtgcttagagtaagtttaatagtccacaacgagccttttcacataacaaactcggttagaggccctttcacatagtctatctatatcatcttattatacttgttctacatgcaaagtgataaatagcatggctatgataaacgtatggagccgttggtgtgttgatcatgagtcactccactgggtatatctctaattttattgtttctaaattcaataaggtgttcttgttttaaccgccagcatgtttattatggttgtcaatgcagcgattaattatagttcacacgtgtacatgtgttgttacaaattcactattgattgggtcaagttaaacataaaaatacctaatttcttgacgatccaa

SEQ ID NO: 2907 - DNA, 2501 bp, Zea Mays
atggagcggtgggagattggaggtcgaggcttgaagcgcgacgaacgccgagccggcgccgtagttgacggcgcagcccacaggggcggccggctagatacacctgcattgcgtgaaattaaaatagataaaatcagcccatggaagccatttttgaagatgcgccaaaatagcaggcttaatctggatttctcattcagtggtggactcaattcgagaaaacagagatttgatgaatcatttggcttgagagtgttcaaaattggctacgaagtgtatgccgatggtttaacaagagttttacgaatttgtgaacatgcagataatcccaaaattgagaaaattcaatggccaatagcaaatatacagttcagaatttcttatgtgtgtattcatcttcttgacaaggaccagaatggggaaaatgtccaattgccatctacaattttagcagcaagacttcagcatgtttcttctgattcagttgtcacaaatagattcaagcaagtatctgttgcaattcattcattgaatgtggatgaaaaatgggaaggggcttcaattgggacaattcttaggaggaacaagcttcaggatgctactctcgatgaaaatattcttcgtatgatctttgtactgaattcaactgactccagtgtcaaacaaatacagtattgtgccatcatcctacagcctgttgatcttaagattgatgaggaaacgttaatgaagctagtaccattttggagagcatctcttgcaccttcaggcacgacaagcacacaattttatttcagacgttttgaagtacatccaattaagatcatagcaagctttcggcctggtggccgacgcacaacatatagttctgctcaagaggctctgagggcactacttcatagtgttataaaggtgcctgaaattagcaactcagctgtggagctcaatggggttctcctaaatcatgctttagttacatttcgtgagctacttctaaaatgcgctcagcactactcatggcatgtttaaatttataagcaagaacatgaagtcgggtggtttttctggaacaaaacggtaccttggtgatctcgggaaaactgttaaaactgcaagttcgaacgctctctttgctgctgtcacagaaatttcagatagtgttgttagaggagcggaaacaaatggtttgaatggcatggttactggtttccaccagggcatgttgaggttggcgatggagccatctgtcttagggcaggctataatggagggaggtcctgacagaaagatcaaacttgatcatagccctggacttgatgagctatacattgaagggtacctgcaggctatgttggatgtcatgtataagcaagaatacctccgtgtcagggtgattgatgaccaggttatactgaagaatctaccaccaaatagcgccctgataaacgaaatcgtggacaacgtcaaaagctttcttgtgagcaaggcactgttgaaaggcgattcttccacagttcgaccgatgcgccatctgcgaaatgaacctgaatggaggattgccccaacggtgctcaccctctgcgagcacctttttgtgagcttcgctgtgcgtgtgctgcaccgggaagccagcaaggccatcgctggagtcatgtcgagagtgaagaaaccgaccggagaggaggtcgaaggcgactcgcccgcatctggtggcgtcctgtgtaagcggaataggctgtggactgtcgggaggtttgccgtctcgggcatggtcgcctatgtagatggccggctgtgccggcacatacccaaccccatagcccggaggatcgtcagcgggtttctactgagcttcatcgaaaacaggggcaacgaataagcgggcagccggacaggtgataaaagggctcgccttctgccacctgctaataaggcgtaccatggaccatggtaaataggcgtgcacgttgtacaaagaaccgaggtgtggtagtgctcttgagccgtaaccgatctctgcatagagctgtgcatcaattttgaccgccttcaggcccacgtttggtgtacagaaacactgggacagtaattccgcagatgctacttcctgcctacatttcgttgacatggactcgtgcttagagtaagtttaatagtccacaacgagccttttcacataacaaactcggttagaggccctttcacatagtctatctatatcatcttattatacttgttctacatgcaaagtgataaatagcatggctatgataaacgtatggagccgttggtgtgttgatcatgagtcactccactgggtatatctctaattttattgtttctaaattcaataaggtgttcttgttttaaccgccagcatgtttattatggttgtcaatgcagcgattaattatagttcacacgtgtacatgtgttgttacaaattcactattgattgggtcaagttaaacataaaaatacctaatttcttgacgatccaa

SEQ ID NO: 2908 - DNA, 3389 bp, Zea Mays
aagcaagcaagaggggggcggcagcagcgacctggcacgccgtttgccaccgcccttaatttggcaaatcatcacgtaaaatttgtcaaatggaatcctgccttttttctgtggctgcaatcaattcggaggcatgagtgccttttagccgagggaaccacccgtcgctgcgttgtttggtggcttcgttcactgcaccgcccacagcttcgccccgtcgtcgccgtccgccttccctccccggccaccgccaccgccaccaccacccaccgaagaaaaaaagagataaatagaacaaagaaaggggaaagattgacgaggagcgcggcatcgtcgccagcgccttccggcgtaggactcgcgcgtgcccgtccctcgcgcgtagccgccggagctcgcgggcgttggcggccgccgccgtgggcgtatcactccggtgtggccggctcggcatcgatttcttcccgtttcccctggaccagggaagggtatacaattacaatgcatgctcttgatgatttgtcacagcaatccccttcgctccgttattagcgaagacagacgtggcatcctggcaggggtttccttcaggagacgaatggtccagcactaggacacattcacaatttgataaaattggcattacagagccaaggtgatgcacaatgaccgtgttttgccccttcaagcctttgtggctgctcagggaagagcttctagcacagcaatccttcctttttttgttctgtaatgaatgaataaccagattgtctatcaagatctgaccaaagttctaggtctggatagatttgactctgagaaccttttggatgtctcaactacagttttgccactgaaaagtgttgctatggatcctacaaatttgttgcatctgaagactgtcccatctgagaatggactcaaactggttgaaaattcaagcgacaatctacaggatttggcttgtgaaagcccccttgctggaaaagtcaagttcatgtgcagctttggtgggaaaatcttgcctaggccaagtgatgggaagctcaggtatgtcggcggggagacacgcctcatctcgataaccaggaacttctcgtggaatgaactagtgcagaaaactctcacaatctacagtcagcctcatatcatcaagtatcaacttcctgacgaggatctggacgccctcatttctctttcgtgtgatgaggatttccagaatatgatggaagaatactgcagtcttgaaaaggccaatggctctgttagactaaggatgtttcttgtctccctcaatgaatgtgaagattcgtcattggacgcaaagagcttggagagtgaaccagagtatcattttgttgttgctgtgaacaatcttgcacatttgggccggagcattagtggcaacaatttaatgagccagccgagccatcaattggatccttctccacactcctttagagactcacctgtctgtcaagccaatacagaagttaaagccaaagattctgttggagcaactctcaatgaatcttcctctcagtttttccttgctccatacacacaacaattggtggtcgagccatcgacaactccgtccccaagtttaagtcagcagaggaccatgaaacaatctaggaagcaaccccctgcagatgaattgacaacaaaccaagaacatgtgagtagaagtgaagtttccagtagctcaaatttgaaaaccatgcttccgaaccatctagataagaagcacaatgatgcggacaagggtattggaactggatctcccttgaaacatcttcacattcgaaggcaggtaaaagattgggctggaaatggtattgacttgattccacataccaactatgatgtttctactccagtggaagcgtccttatattctgaaaaggttatcatgcatccagaaaatgcaggagggacatctgggctgcaggaacatgccggtcaaattctaggcatgccccatgccttctcagatcctttactaaagaatcttaatgacttgcctgcatcgaatttgtcattacctgctggttcttacataacccaatcattttcccagaaaatatgccatactaatgagttggagagaacaataagtaggactgggccagcttttgaatgtgtcaaaccccctgacattgcccgtgcagatgaatcaaattatcttgtttctaatcatattgaccaaaggtacaatcaaggaattattggcccagccagttcacagccaccagtatattaccaagatgaaagtttgtcaagtaatgtgacacaaaaatgccatgatggttatcatgtagttcaacagcaggataagttttttcatcaggataaaagcgcaggtccaattattgctccctggaacaattttgttcaaacagggttaatttacaacgcacatggtgcaaagttgccctcagataatttagatgctctagaaagttcagttccaaagccgatgcatgctactgatcattccctttcatatctccttaatgtatcccaaggagacaattcagaaagtggatcacatgtagagaaactgaattcagggcctgttactaaagattatggaactactggctatgtgcatggaactgataaggttgctccaaatcctcaggatctgttgcatataaagtcttctgaagcttttatcacgcaaagatcaatgggcaatggagaatctggtgtatatcagaatgataatttgcacaagtcatcagtgctacatactgggctgattgatactgatccaagtgtgaacttgcacgacaatggtggcctctctgtgtcttcgtctcaaaatccagttgtggactgtgtttctaggagagaggatccccttcgtgattggggcaatatcgcctgcagtgaaggaataattggatgtgaccataccaccaccgataatgaacacataaagctagcacacaggctgcacgataatgttcaaatgaatgtacctgtcatagttgaggacgtgactgataatgtgccttcaggcattccatcatcgagaccagttgttcctcaggttgtaatggcagctgaagaacaccaagaggtgattctttcatcacagaaggatgacgatagtaggaccaacaggccagagttagctaatgaggatcatgatggagttgccgatggatccattagcgatgctgtagttgctgaacttgaagccagcatgtatggattacagatcattaaaaatggtgacctcgaggaactacgtgaactgggatccggaacatttggaactgtatactaatggaaagtggcgaggaactgatgttgctatcaagcgcatcaagaaaagctgttttgctggaagatcatcgaacaagagaaacttgtga

SEQ ID NO: 2909 - DNA, 2987 bp, Zea Mays
cgcgggcgttggcggccgccgccgtgggcgtatcactccggtgtggccggctcggcatcgatttcttcccgtttcccctgggaagggtatacaattacaatgcatgctcttgatgatttgtcacagcaatccccttcgctccgttattagcgaagacagacgtggcatcctggcaggggtttccttcaggagacgaatggtccagcactaggacacattcacaatttgataaaattggcattacagagccaaggtgatgcacaatgaccgtgttttgccccttcaagcctttgtggctgctcagggaagagcttctagcacagcaatccttcctttttttgttctgtaatgaatgaataaccagattgtctatcaagatctgaccaaagttctaggtctggatagatttgactctgagaaccttttggatgtctcaactacagttttgccactgaaaagtgttgctatggatcctacaaatttgttgcatctgaagactgtcccatctgagaatggactcaaactggttgaaaattcaagcgacaatctacaggatttggcttgtgaaagcccccttgctggaaaagtcaagttcatgtgcagctttggtgggaaaatcttgcctaggccaagtgatgggaagctcaggtatgtcggcggggagacacgcctcatctcgataaccaggaacttctcgtggaatgaactagtgcagaaaactctcacaatctacagtcagcctcatatcatcaagtatcaacttcctgacgaggatctggacgccctcatttctctttcgtgtgatgaggatttccagaatatgatggaagaatactgcagtcttgaaaaggccaatggctctgttagactaaggatgtttcttgtctccctcaatgaatgtgaagattcgtcattggacgcaaagagcttggagagtgaaccagagtatcattttgttgttgctgtgaacaatcttgcacatttgggccggagcattagtggcaacaatttaatgagccagccgagccatcaattggatccttctccacactcctttagagactcacctgtctgtcaagccaatacagaagttaaagccaaagattctgttggagcaactctcaatgaatcttcctctcagtttttccttgctccatacacacaacaattggtggtcgagccatcgacaactccgtccccaagtttaagtcagcagaggaccatgaaacaatctaggaagcaaccccctgcagatgaattgacaacaaaccaagaacatgtgagtagaagtgaagtttccagtagctcaaatttgaaaaccatgcttccgaaccatctagataagaagcacaatgatgcggacaagggtattggaactggatctcccttgaaacatcttcacattcgaaggcaggtaaaagattgggctggaaatggtattgacttgattccacataccaactatgatgtttctactccagtggaagcgtccttatattctgaaaaggttatcatgcatccagaaaatgcaggagggacatctgggctgcaggaacatgccggtcaaattctaggcatgccccatgccttctcagatcctttactaaagaatcttaatgacttgcctgcatcgaatttgtcattacctgctggttcttacataacccaatcattttcccagaaaatatgccatactaatgagttggagagaacaataagtaggactgggccagcttttgaatgtgtcaaaccccctgacattgcccgtgcagatgaatcaaattatcttgtttctaatcatattgaccaaaggtacaatcaaggaattattggcccagccagttcacagccaccagtatattaccaagatgaaagtttgtcaagtaatgtgacacaaaaatgccatgatggttatcatgtagttcaacagcaggataagttttttcatcaggataaaagcgcaggtccaattattgctccctggaacaattttgttcaaacagggttaatttacaacgcacatggtgcaaagttgccctcagataatttagatgctctagaaagttcagttccaaagccgatgcatgctactgatcattccctttcatatctccttaatgtatcccaaggagacaattcagaaagtggatcacatgtagagaaactgaattcagggcctgttactaaagattatggaactactggctatgtgcatggaactgataaggttgctccaaatcctcaggatctgttgcatataaagtcttctgaagcttttatcacgcaaagatcaatgggcaatggagaatctggtgtatatcagaatgataatttgcacaagtcatcagtgctacatactgggctgattgatactgatccaagtgtgaacttgcacgacaatggtggcctctctgtgtcttcgtctcaaaatccagttgtggactgtgtttctaggagagaggatccccttcgtgattggggcaatatcgcctgcagtgaaggaataattggatgtgaccataccaccaccgataatgaacacataaagctagcacacaggctgcacgataatgttcaaatgaatgtacctgtcatagttgaggacgtgactgataatgtgccttcaggcattccatcatcgagaccagttgttcctcaggttgtaatggcagctgaagaacaccaagaggtgattctttcatcacagaaggatgacgatagtaggaccaacaggccagagttagctaatgaggatcatgatggagttgccgatggatccattagcgatgctgtagttgctgaacttgaagccagcatgtatggattacagatcattaaaaatggtgacctcgaggaactacgtgaactgggatccggaacatttggaactgtatactaatggaaagtggcgaggaactgatgttgctatcaagcgcatcaagaaaagctgttttgctggaagatcatcgaacaagagaaacttgtga

SEQ ID NO: 2910 - DNA, 2914 bp, Zea Mays
gtggccggctcggcatcgatttcttcccgtttcccctgaggaccagggaagggtatacaattacaatgcatgctcttgatgatttgtcacagcaatccccttcgctccgttattagcgaagacagacgtggcatcctggcaggggtttccttcaggagacgaatggtccagcactaggacacattcacaatttgataaaattggcattacagagccaaggtgatgcacaatgaccgtgttttgccccttcaagcctttgtggctgctcagggaagagcttctagcacagcaatccttcctttttttgttctgtaatgaatgaataaccagattgtctatcaagatctgaccaaagttctaggtctggatagatttgactctgagaaccttttggatgtctcaactacagttttgccactgaaaagtgttgctatggatcctacaaatttgttgcatctgaagactgtcccatctgagaatggactcaaactggttgaaaattcaagcgacaatctacaggatttggcttgtgaaagcccccttgctggaaaagtcaagttcatgtgcagctttggtgggaaaatcttgcctaggccaagtgatgggaagctcaggtatgtcggcggggagacacgcctcatctcgataaccaggaacttctcgtggaatgaactagtgcagaaaactctcacaatctacagtcagcctcatatcatcaagtatcaacttcctgacgaggatctggacgccctcatttctctttcgtgtgatgaggatttccagaatatgatggaagaatactgcagtcttgaaaaggccaatggctctgttagactaaggatgtttcttgtctccctcaatgaatgtgaagattcgtcattggacgcaaagagcttggagagtgaaccagagtatcattttgttgttgctgtgaacaatcttgcacatttgggccggagcattagtggcaacaatttaatgagccagccgagccatcaattggatccttctccacactcctttagagactcacctgtctgtcaagccaatacagaagttaaagccaaagattctgttggagcaactctcaatgaatcttcctctcagtttttccttgctccatacacacaacaattggtggtcgagccatcgacaactccgtccccaagtttaagtcagcagaggaccatgaaacaatctaggaagcaaccccctgcagatgaattgacaacaaaccaagaacatgtgagtagaagtgaagtttccagtagctcaaatttgaaaaccatgcttccgaaccatctagataagaagcacaatgatgcggacaagggtattggaactggatctcccttgaaacatcttcacattcgaaggcaggtaaaagattgggctggaaatggtattgacttgattccacataccaactatgatgtttctactccagtggaagcgtccttatattctgaaaaggttatcatgcatccagaaaatgcaggagggacatctgggctgcaggaacatgccggtcaaattctaggcatgccccatgccttctcagatcctttactaaagaatcttaatgacttgcctgcatcgaatttgtcattacctgctggttcttacataacccaatcattttcccagaaaatatgccatactaatgagttggagagaacaataagtaggactgggccagcttttgaatgtgtcaaaccccctgacattgcccgtgcagatgaatcaaattatcttgtttctaatcatattgaccaaaggtacaatcaaggaattattggcccagccagttcacagccaccagtatattaccaagatgaaagtttgtcaagtaatgtgacacaaaaatgccatgatggttatcatgtagttcaacagcaggataagttttttcatcaggataaaagcgcagggttaatttacaacgcacatggtgcaaagttgccctcagataatttagatgctctagaaagttcagttccaaagccgatgcatgctactgatcattccctttcatatctccttaatgtatcccaaggagacaattcagaaagtggatcacatgtagagaaactgaattcagggcctgttactaaagattatggaactactggctatgtgcatggaactgataaggttgctccaaatcctcaggatctgttgcatataaagtcttctgaagcttttatcacgcaaagatcaatgggcaatggagaatctggtgtatatcagaatgataatttgcacaagtcatcagtgctacatactgggctgattgatactgatccaagtgtgaacttgcacgacaatggtggcctctctgtgtcttcgtctcaaaatccagttgtggactgtgtttctaggagagaggatccccttcgtgattggggcaatatcgcctgcagtgaaggaataattggatgtgaccataccaccaccgataatgaacacataaagctagcacacaggctgcacgataatgttcaaatgaatgtacctgtcatagttgaggacgtgactgataatgtgccttcaggcattccatcatcgagaccagttgttcctcaggttgtaatggcagctgaagaacaccaagaggtgattctttcatcacagaaggatgacgatagtaggaccaacaggccagagttagctaatgaggatcatgatggagttgccgatggatccattagcgatgctgtagttgctgaacttgaagccagcatgtatggattacagatcattaaaaatggtgacctcgaggaactacgtgaactgggatccggaacatttggaactgtatactaatggaaagtggcgaggaactgatgttgctatcaagcgcatcaagaaaagctgttttgctggaagatcatcgaacaagagaaacttgtga

SEQ ID NO: 2911 - DNA, 2124 bp, Zea Mays
ggaggttttgggtgtcgttaaaccccacctggtgatggtacgcctgctcagctgtgctagactgctagtccgtggttccgtgctcgcggagtcgcggtgctaccactaccatcctctccgtcggccgcactcccgcctcccgctctcgcagaggtccccgcgccgcctccactgatctactactcatcactcattgattgcccgtagctcaccaccctgggcattgcgcccccttcccgcaaactccccccttcagccatggtcaagccgccgccgccgccgcccacctccacctgtacctccgacaccccgctacccaccccagggggcctcctcggctcgctctcctcctccgcgcactccctcctcgccgcggcgcgccgctccccggtcaccaccctggtcgccgccttcttcctcctcgcgctcttcatgtacggcgaggacgtccgcaccatcgccgagctttccatcgacgactacctctaccccgacgccgacttctacaacgtctccgccctcccgcccctcgcgctgcccccggccacctgcgacctctcccgcggccgctgggtcttcgacaacgtctccctcccggcgtatcgggagaaggactgcaccttcctcaccaagcaggtcacctgcctcgccaacggacgacccgacgatctgtggcagtactggaaatggcagcccaacgagtgctccctccccacgttcgacgctcggaggttcatggaggcgatgcgcgggaagcggctcatgttcgtgggggactcgctcaaccgcaaccagtgggagtcgctggtgtgcttggtgcagcccattctgtcgaagggcaggaagaagatcgtcaagcggggctccctcactgtattccacgccaaggagtaccgcgccaccctcgaattctactgggcgcccttcctcgtcgagtccaactccgataaccccaagatccacagcatcgagcaccggatcatcaggcccgagcggatcgaggggcacgccaagtactggagaggcgtcgactacctcatcttcaacacctacatctggtggatgaacacagccgacatgaaagtcaggagaccaaattcgaggtattggtctgaacatgacgaggttcccaggattgaggcgtatggactggtgttcaagacgtggtctgattggctcaatgacaacatcgatcctgaccgcacacttgtattcttcatgacaatttctccactccacatcagcccacataactgggggaacccggacgggatcaggtgcgtgaaggagacgcttccgtaccagaactacagccagccgctggacctgtaccacgacatgcggatgcacgacctggtggtgaaggtggccagcgccatggcgaaggtgccagtgacggtgatcaacatcaccaggatgtcggactaccggaaggacgcacatacggggctgtactccatccggcaagggaagctgctgacgccggagcagaagggggacccggagaagttcgcggactgcatccactggtgcctccccggcgtgccggacgtgtggaaccagatactctacacgaggatcctttccaaaccgccttcttggggttcttctaatgttagccccttatctccatcccagtccctgcctccccggtgaggatcacaagcagggaaggcagggtctttttctaccacagcctaagcctaggaaaagcgtacggtttttcgttctctttctcctcctttttagtcggtagggtaggttgagtgaaggttagagcaaaagggaaatggagggggaggttactaatggcatggcatgtaggatctttgaggtgtagatgagctgtgagttttgccaattgagcaaacagcagctagctcgtagacagttgcgctatgcacatgtatgtatatatatatatatatataatataaagccttcttcctgctgtactgtatgctacaaaaggtgtctattgctttgttaatgctttgttaattcctttttacaaatattttttcttcttcttctttcaaaacaatatctgttcctagaaaattatgcgatgcaattgcctcaagaaaaagaaatttacgcaattacaaaaaaaaataaaggagc

SEQ ID NO: 2912 - DNA, 2885 bp, Zea Mays
aatgagggcccaaaagatatggtttttgcagggttagtttcttgaccatatacgctacacgtcctctctgactgactaaacaagctttgtttccattccaatcatccatataaatgatgactagctaaggaagcaagcaatcgagacgctactgcttggcgcaagtagacgacgaccggcacagtgaactggctacctacaatcctacatgcaccaccagctcctcctcttcctcttcttgctcctcctcgatgcaacaaccttcgcggcgcccgccgggccgtgcaaccgtcggtgcggaagcacgaccgtgccgtacccgttcggcttctccggcggcggggcctgcccgatcctcctcgcctgcaacgccacggcgtccacggcgctcctcccgcgcagcacggccgccgccgccgcgtcgtacccggtgcaatcgttcgactccgcggcatccaccttcctggtctccctcgtgccgtcgtgcggccgcggcgtggccgaggccagggcggcgctgggaggcgccggctacggcgtgtcgtcccgcaccgggctgttcctccgcggcggctgcgggcgcgcggcggggtcgaggtcgccgagcgactgcaacgtcccctcgggcgtcatggccgccatcctccgcacggtgcagtgcggcggcggcaacgacagctcctggacgtgcgtgctgtccgcgccgccggcccccggcagccccgccgcggcgagaggccagggccagttcatgcgctgggacgaggtggccgccgccgggtgcgaggacgcgctcacctcggccgtgtacgcgtactcgccgcagggcgtcccgtccatccagttcggcatcgcggagatgggctggtgggtcgacgggagatgcggtgacggaggcggcggcggcggccggtgcgcgcggaacgcgacgtgccacgacgtgcagacgcccggcggggcctgggggcaccggtgcgcgtgcgtggacgggatggccggagacgggttcgccgccgggcaagggtgctactacgacggcgctccgagagagcgttccgcgaagaagattgtcctcgtagttgcagcaggtaaaacgacaaaaacgattaacagaactcttctgccttgcttttggatagtacaaccggcagtaatcctgtttgagtacggcatggtgagaacaaacgacgagacgagtccagtcaaaagtcagctttgtctcgcctgctccatcttttcgccgccggttacgtgcagtttcaagcacgttgatttgctgaccgggacctggaaaagataaatggaagaaacgaaaaaaagaaaatcttttgtatagtgaagtcagatttttgttgcagactgctgcagtagacctggaatgatgagatttgtcaattctgacggcaggtgttgcggcgagcgtggcggcggccaccggcgcgcttctgctgtgctggctgcagtgccggcggcgcaaggccgggcgctcggcgtcggagcggctggcggcgatgcggctgctgtcggaggcggcgacgtcgagcggcgtgccggtgtactcgtacggcgagatcgcgcgcgcgaccaactccttctcgcacacacaccgcctgggcacgggcgcgtacggcaccgtgtacgtgggcaagctcccgggcacgggcagcgcgccggcgctggtggccatcaagcgcctgcgccgacgccaccaccacgacgaggacgaggacgcggctgcggaggcggcgctgctgctgaacgagatcaagctcatctcctccgtgagccacccgaacctggtccgcctcctcggctgctgcctcgacggcggcgagcaggtgctcgtctacgagtacgtgcccaacggcacgctctcccagcacctccactccgcgggcgccagcaccgggggccgcggcgcgttgacgtggcgcgcgcggctcggcgtggcggtggagacggcgggcgccatcgcgcacctgcacggcatgcggccgcccatcttccaccgcgacgtcaagtccagcaacatcttgctcgacgccgcgctgcgccccaagctggccgacttcggcctgtcccgcgccgtggaccgcctggaggccgcgcgctcgcacgtgtccaccgcgccgcagggcacacccgggtacgtggacccggagtaccaccagaacttccacctctccgacaagagcgacgtgtacagcttcggcgtcgtgctgctagagctcgtcaccgctatgaaggtcgtcgacttcgaccgcccgcccgccgaggtcaacctcgcctccctcgcgctcgaccgcatcggcaagggccaggtcgccgagatcgtcgacccggccctccttggcgccggcgaggactgggtcatgggctccgtccgccacgtcagcgagctagccttccggtgcctggcgttccagaaggacgtccggccgtccatgcgcgaggtggccgccgagctgcagcggatccggtccgccgccccggacggcgccgatcccgaggagcccgcggggtctaggctccggcctgtgagtatgatggacatccagatcgacgtgagcttgggcggcccggacacggcggcaaagaaggcggcttcgcccgtgtcggtgcaggaggtgtgggtcagcgaccggagctcgccgtccaccaacggctccatgccgcgctttgctgcgtagcttaagctagctagctcttgtacactgatgagaaaaaccaatgtaatttagcaaaaaaaaagaacattttttgtctagtaaaattttctctataaaaaaaccactgtacaagatgccatccattgttgtaacggaaacgtaatttactgtatagcattaccttaaattcccaccggcattagcacgaaaactgcc

SEQ ID NO: 2913 - DNA, 2356 bp, Zea Mays
gcgccgcctgcacttcctcctcctcctcttcctccatgcaacctcctccgcagccgcgcccgcggccgctagcggcggcgtcgggtgcgaccggcagtgcggcaacaccacagtgccgtaccctttcggcttctccggcgcctgtcccatccgcctggactgcaacgtcaccacgccgcagctcgtcacgaacagctccgcggcgtcgccctacccgatcctctcgttcgacgccaccgcctccactttcctcgtctcgctgccgccctcgtgcaaccgcaccgtcggagaggccagggcggcgctcgacggctcccgctacggcgtcacgagccacaccgggctcttcctggcccgtggctgcctcgggaaagcggcggccaccggcaactgctccgtgtccgcgaccatcatgaaaaccgcgctccgcacggcggggtgcggcgacaaaggcgccatctggacgtgcgtggccgcgccgctgccgccgccgcagggcctcaacgccacggctgctgctgcggcgtgggacggggaggcgggccagttcctgccgtggaagaaggtggaggacgctgggtgcgaggacgcactcacgtccgcggtgtccgcgttatcgccggaggggctgccgtcggtggatttcggcgccgcggagctggggtggtggctcgacgggacgtgcgccaacgctaccgcgggcggccagtgcgcgcggaacgcgacatgccaggacatcgagacgtcgagaggcacgaggggccaccgctgcgcgtgcgtggtcgccgggatgtccggtgacggatacgccgccggcgatggatgctactacgtcgccgagcgttccgcgaagaagattgtcctcgtagttgcagcaggtgttgcggcgagcgtggcggcggccaccggcgcgcttctgctgtgctggctgcagtgccggcggcgcaaggccgggcgctcggcgtcggagcggctggcggcgatgcggctgctgtcggaggcggcgacgtcgagcggcgtgccggtgtactcgtacggcgagatcgcgcgcgcgaccaactccttctcgcacacacaccgcctgggcacgggcgcgtacggcaccgtgtacgtgggcaagctcccgggcacgggcagcgcgccggcgctggtggccatcaagcgcctgcgccgacgccaccaccacgacgaggacgaggacgcggctgcggaggcggcgctgctgctgaacgagatcaagctcatctcctccgtgagccacccgaacctggtccgcctcctcggctgctgcctcgacggcggcgagcaggtgctcgtctacgagtacgtgcccaacggcacgctctcccagcacctccactccgcgggcgccagcaccgggggccgcggcgcgttgacgtggcgcgcgcggctcggcgtggcggtggagacggcgggcgccatcgcgcacctgcacggcatgcggccgcccatcttccaccgcgacgtcaagtccagcaacatcttgctcgacgccgcgctgcgccccaagctggccgacttcggcctgtcccgcgccgtggaccgcctggaggccgcgcgctcgcacgtgtccaccgcgccgcagggcacacccgggtacgtggacccggagtaccaccagaacttccacctctccgacaagagcgacgtgtacagcttcggcgtcgtgctgctagagctcgtcaccgctatgaaggtcgtcgacttcgaccgcccgcccgccgaggtcaacctcgcctccctcgcgctcgaccgcatcggcaagggccaggtcgccgagatcgtcgacccggccctccttggcgccggcgaggactgggtcatgggctccgtccgccacgtcagcgagctagccttccggtgcctggcgttccagaaggacgtccggccgtccatgcgcgaggtggccgccgagctgcagcggatccggtccgccgccccggacggcgccgatcccgaggagcccgcggggtctaggctccggcctgtgagtatgatggacatccagatcgacgtgagcttgggcggcccggacacggcggcaaagaaggcggcttcgcccgtgtcggtgcaggaggtgtgggtcagcgaccggagctcgccgtccaccaacggctccatgccgcgctttgctgcgtagcttaagctagctagctcttgtacactgatgagaaaaaccaatgtaatttagcaaaaaaaaagaacattttttgtctagtaaaattttctctataaaaaaaccactgtacaagatgccatccattgttgtaacggaaacgtaatttactgtatagcattaccttaaattcccaccggcattagcacgaaaactgcc

SEQ ID NO: 2914 - DNA, 1125 bp, Zea Mays
ctgagcaacagcagcagcaggcggagatcgcgccggccagcccggaccagcagctgctctccgcggccgccggcgccagggacttcctgctcaagcgctcctactccttcggcttcgagcgcaacctcgccgtggaggcgtcgtcccctccgtggcgctaccgctcggttgtcgccgcaaccgacggtggcgcggcctcccgcggccgcggcttctggagcaagcgctggccatccccgttcggcggcggatccgcggccgcccgcgtcttctccttccggtcgtaccgcggcgcggcgggcaagccgtccccgttgtcccgccggtgccgcggcgggagcggcttcttcatgtcgctggcgtcggagccgccgtcggtgctggccgcggcgaggcggagccgcgcggccgccgcgtccagccggctccggtgcggggaccccgaggcgctgctgtcgccggaccggctggctgagccgctgaggcagcggctgtgactgtgactgtgactgtgtgcggatctcggtctcgctggccgctcgtggtggtgggcctggcgcctgcgtggagacgagggcgggcagtaatggcgcgataaatgcgacgccctgccacggttttaatggcgggaggacgtgtgcccagaccgcgtggtggtgtcgcttccggttccgcccctagcagcactcactcactcccacgggccactgcgcttggctccgcagcgcagcgcagcgctgtctcctctgctctctcgtctcgtttgaccatgggcgtgtaggggccaccagtgggcacgggcaggcatgtccgggccgtccgatcagaaaacgacggcatcggatggagcccccgttttctcgccggacggcctcgatcaagcgtctcctgttttcgactgtattttcagcgaagcgattgttctgctgcgtcttgggtctccgatgggcactccgctcttctgagtctccactctccaccggggttgtttcatagaaatttgcatcccattcgatgttggtttagatattttaaaaaataacggaaacaaaaaaaaagaatacaaactgatctatgaaaggagcccgattcgtggtgcagctcagaatcaaactagcaaattgc

SEQ ID NO: 2915 - DNA, 2044 bp, Zea Mays
ctccaccgctggagcatatcccgccaccactgacgcttcccgctattggaaacaacaaagctgcgcgcgggggccagaaatagcacgcgctagagcgattggggaaggatttggctcacgaaaatatgctggagggagagccacggattcgggatgtgaagcttttgggaagaagataaacatgatgttggagggcataaaaatgccccctagcctgataaatgcttttggggttcttttacaccttctgttggaggtgctctgacaacctaactctgcaatggctactctcgtggaggatggctactctcgtggaggatgaaaagagagagagaaagtgcttaattaatagtatactgtaattattaggccggaagatttcctcaaatattgccagtgccagattttgaaaaacggcccgtaaaggcccaaatagaaagccgattctcctttcttgcccgcctcacttctgagttccgactctggagcggagcggcagccaaatctcgaccacgtccggcaaccgcgccccctcggctttgcgcccacaccaagccaccctctgttctcctcttccgtggcggactagcggcgcactggtgtggtgctcctccaagctctggtctgctccgcgccccgcctccccgtcgaccggcgactttggccccggcccccgggctaggaagcgagttcaccggtggatccgcgcgtgtccctccctgttacctgcgggtcgccccagccggccacccgcgcccccgcaccctactgacttgggcttgctgtatagcacggaccagatcaagggtcgtcgtcgaccacgtttgaggcttggccatgcctttaaatatagatattgatctgttcaagctggatattgatgagctgatagctgattattccaaggagaactgtacatcactcttcgaattcaaacgagtatggatgggcaagaaattttcttatatctatgaaggcagacctaagacaaactcaggtcatttgacttctcaaagttcactgcaccaaagattggctgggctatactgcctttactgtctgtatgagtgccagccatacaagccgcagttcaagatttacttgtctcttgaggagtgcaggcaactgaaggatatcgttgttatggcgaagcaaaatggactgcagctcgtgcctgcacttgtcaaaaggatgctggataaagacatgtttttgtttggctacatgaatttgatcaacgacaacggggacaagcaggtcgaggaattgaccgcattgcagaacaagcaagtaaaatttgcatgtgacaagttatttgcaaatagccaagcagaaagatatatgcacatggacttgggtgctgagttcgagcttgataccatcaaaaaattgtcaaaggagtatgcagaagcaaaggaactggcccttgcagaggcaagccaaactgtcgaagttgaagatgctaagcacctccttcagagtgagaggctgttgggcgacaagatagatgaagtcgtcaaagaatgggatgtccagaaggaggggttctacgagagaactggattatcctcatcccctggtgaccagctcatggcggtcgacaacgatgaatcaggagctcaatgtcacaaggatggatcctgtggcgatcagctcatggcggtcgacaatgatgaatcgggagtacaggatcacgaggacctcgacgacgacgacgatggctttgccgagttagaactgctgctagagtgaagaacatatacaagtctgtaaactcttactaccgccgtataaccgtgtaatcagaacaccgagagatgtaatcctcgctcgtctttactaggctctcctttttagttgccagaccttctgttcatctacactggctgcagtaactgtacattgaaataatccagttcgccagcctatgcgggggagagaaaaaagaggtgaccttgagtaaaaatgtacatgaacagtgacgagaaaaaacgctggctgcagtaactgtacattgaaacggtagtgtgccagagtaaaaaaa

SEQ ID NO: 2916 - DNA, 1282 bp, Zea Mays
accaaacttatgtgaaattatgaagtttgaggcttggccatgcctttaaatatagatattgatctgttcaagctggatattgatgagctgatagctgattattccaaggagaactgtacatcactcttcgaattcaaacgagtatggatgggcaagaaattttcttatatctatgaaggcagacctaagacaaactcaggtttattcatgcagtccctctttctgcattgtattggtcatttgacttctcaaagttcactgcaccaaagattggctgggctatactgcctttactgtctgtatgagtgccagccatacaagccgcagttcaagatttacttgtctcttgaggagtgcaggcaactgaaggatatcgttgttatggcgaagcaaaatggactgcagctcgtgcctgcacttgtcaaaaggatgctggataaagacatgtttttgtttggctacatgaatttgatcaacgacaacggggacaagcaggtcgaggaattgaccgcattgcagaacaagcaagtaaaatttgcatgtgacaagttatttgcaaatagccaagcagaaagatatatgcacatggacttgggtgctgagttcgagcttgataccatcaaaaaattgtcaaaggagtatgcagaagcaaaggaactggcccttgcagaggcaagccaaactgtcgaagttgaagatgctaagcacctccttcagagtgagaggctgttgggcgacaagatagatgaagtcgtcaaagaatgggatgtccagaaggaggggttctacgagagaactggattatcctcatcccctggtgaccagctcatggcggtcgacaacgatgaatcaggagctcaatgtcacaaggatggatcctgtggcgatcagctcatggcggtcgacaatgatgaatcgggagtacaggatcacgaggacctcgacgacgacgacgatggctttgccgagttagaactgctgctagagtgaagaacatatacaagtctgtaaactcttactaccgccgtataaccgtgtaatcagaacaccgagagatgtaatcctcgctcgtctttactaggctctcctttttagttgccagaccttctgttcatctacactggctgcagtaactgtacattgaaataatccagttcgccagcctatgcgggggagagaaaaaagaggtgaccttgagtaaaaatgtacatgaacagtgacgagaaaaaacgctggctgcagtaactgtacattgaaacggtagtgtgccagagtaaaaaaa

SEQ ID NO: 2917 - DNA, 1296 bp, Zea Mays
caaggattttgcgtagtgttgtcaccatggcgctcttagtttgaggcttggccatgcctttaaatatagatattgatctgttcaagctggatattgatgagctgatagctgattattccaaggagaactgtacatcactcttcgaattcaaacgagtatggatgggcaagaaattttcttatatctatgaaggcagacctaagacaaactcaggtttattcatgcagtccctctttctgcattgtattggtcatttgacttctcaaagttcactgcaccaaagattggctgggctatactgcctttactgtctgtatgagtgccagccatacaagccgcagttcaagatttacttgtctcttgaggagtgcaggcaactgaaggatatcgttgttatggcgaagcaaaatggactgcagctcgtgcctgcacttgtcaaaaggatgctggataaagacatgtttttgtttggctacatgaatttgatcaacgacaacggggacaagcaggtcgaggaattgaccgcattgcagaacaagcaagtaaaatttgcatgtgacaagttatttgcaaatagccaagcagaaagatatatgcacatggacttgggtgctgagttcgagcttgataccatcaaaaaattgtcaaaggagtatgcagaagcaaaggaactggcccttgcagaggcaagccaaactgtcgaagttgaagatgctaagcacctccttcagagtgagaggctgttgggcgacaagatagatgaagtcgtcaaagaatgggatgtccagaaggaggggttctacgagagaactggattatcctcatcccctggtgaccagctcatggcggtcgacaacgatgaatcaggagctcaatgtcacaaggatggatcctgtggcgatcagctcatggcggtcgacaatgatgaatcgggagtacaggatcacgaggacctcgacgacgacgacgatggctttgccgagttagaactgctgctagagtgaagaacatatacaagtctgtaaactcttactaccgccgtataaccgtgtaatcagaacaccgagagatgtaatcctcgctcgtctttactaggctctcctttttagttgccagaccttctgttcatctacactggctgcagtaactgtacattgaaataatccagttcgccagcctatgcgggggagagaaaaaagaggtgaccttgagtaaaaatgtacatgaacagtgacgagaaaaaacgctggctgcagtaactgtacattgaaacggtagtgtgccagagtaaaaaaa

SEQ ID NO: 2918 - DNA, 126 bp, Zea Mays
cttgcaggtgttctcgctcgactgaactcttcttctttccgatgcaatgcaatcatggacctgccacctttcgacgttgcggttgttcaattccttcttgagtgtctctgatcctgcaacccgttc

SEQ ID NO: 2919 - DNA, 2026 bp, Zea Mays
cttgggatttggcttagtggtgtggtactctgggtaatcgctcgggctcggaggatagggtcatcaccaatgattcggcttgtttggatagaacgccgagtccctttgttgactgaatttgtaatcaggagcccaaggattagtatccatgttgcttcgtcttgttcgctaaagggattctgatcatcacttaagctcaagatcatgagttggttaaacaaaatttttaagggttcagtaaacagagtttcaaggggtcactatgatggagactggcatgaaggtcattcatctgatcacaccagagatacttacgatgacagtgataatgaagatatagatcgtgccattgcattatcgctagctgaggaagatcataataagggaaagtcggtggctattgatactgactataatctggaggaagatgaacaacttgcacgggctctgcaggaaagcctgaatgcagagtctcctcctcgacagaatgttcctattgaggatgtgccagtgcctcaatggaatattcctgttgagcgggtgcctcctcgacagtatgttccagcaaatgaaccaaccccacatgtttacccacggggtggatccaggatttgtgctggatgccaaaacccaattggccatggacgtttccttagttgtatggattcagtttggcatcctcaatgcttcagatgttttgcttgcaacaaacccatatcagagtatgagtttgctatgcatgatgatcagccataccacaaatcctgctacaaagagttttttcatccgaaatgcgatgtttgcaacaactttattccaacaaatagagatggcctcattgaataccgagcacatcctttctggatgcagaagtactgtccttcccatgaagatgatggcactcctcggtgctgcagttgtgaacgaatggagccaagggagatcaagtacataacattagatgatgggaggaaactctgcttggaatgtctcaattctgcagtaatggattctccagaatgtcaacatctttacatggatattcaggaattttttgaaggtttgaacatgaaagtagaacagcaaattccattacttttggttgagaggcaggctcttaatgaagccttggaagccgagaaaaatgggcaccacctaccggaaaccagaggtctatgcctttctgaggagcaagttgttagaacgatcttaaaaagaccacagattggaccaggaaacagaatcttagatatgattataggaccatacaagctgtctcggcggtgtgaagtgactgcaatccttatattatatggtctgccaagattacaaactggttccattcttgcccatgagatgatgcatgcatatcttcgtctcaaaggattccgaaaccttagtattgaggttgaagaaggcatctgccaagttctatcccacctgtggttagagtcggaaatcatcgctggttctagtagcaacgttgcatccagttcagaagcatcatcatcttcgtcatcctcagctcctacctcttcaaagaagggtgcgaagaccgaattcgagaagaagcttggggcattcatcaagcaccagatcgaaacggattcttccgaggcatacggaggtggttttagagctggctatccggctgttgagcgctatggcttgaaaagaacccttgatcatatgaagttgacagggtctttcccatattaaagcaacagaagtaaaggagggggctttcttccagttgtgaggatacactccacattggaggttttggtttgggttatacataactgatatgcataccaaacgaggggaattgtctgtaaatcaggagaaccctctgctgcgcggaaacttattgcaaactgtctttttataggaaaacgatacatgcaagttttcagacagggaacttgagaggatcatatgtaatttttgggcacttgtttttgactcctttggttatcaaaaacaaggcaacataataagattgaaatttatcttcatctttaaa

SEQ ID NO: 2920 - DNA, 1863 bp, Zea Mays
cacaggaatttttggcacttttatgttttgtccctcggctcttcctaaggctaaagggattctgatcatcacttaagctcaagatcatgagttggttaaacaaaatttttaagggttcagtaaacagagtttcaaggggtcactatgatggagactggcatgaaggtcattcatctgatcacaccagagatacttacgatgacagtgataatgaagatatagatcgtgccattgcattatcgctagctgaggaagatcataataagggaaagtcggtggctattgatactgactataatctggaggaagatgaacaacttgcacgggctctgcaggaaagcctgaatgcagagtctcctcctcgacagaatgttcctattgaggatgtgccatatgttccagcaaatgaaccaaccccacatgtttacccacggggtggatccaggatttgtgctggatgccaaaacccaattggccatggacgtttccttagttgtatggattcagtttggcatcctcaatgcttcagatgttttgcttgcaacaaacccatatcagagtatgagtttgctatgcatgatgatcagccataccacaaatcctgctacaaagagttttttcatccgaaatgcgatgtttgcaacaactttattccaacaaatagagatggcctcattgaataccgagcacatcctttctggatgcagaagtactgtccttcccatgaagatgatggcactcctcggtgctgcagttgtgaacgaatggagccaagggagatcaagtacataacattagatgatgggaggaaactctgcttggaatgtctcaattctgcagtaatggattctccagaatgtcaacatctttacatggatattcaggaattttttgaaggtttgaacatgaaagtagaacagcaaattccattacttttggttgagaggcaggctcttaatgaagccttggaagccgagaaaaatgggcaccacctaccggaaaccagaggtctatgcctttctgaggagcaagttgttagaacgatcttaaaaagaccacagattggaccaggaaacagaatcttagatatgattataggaccatacaagctgtctcggcggtgtgaagtgactgcaatccttatattatatggtctgccaagattacaaactggttccattcttgcccatgagatgatgcatgcatatcttcgtctcaaaggattccgaaaccttagtattgaggttgaagaaggcatctgccaagttctatcccacctgtggttagagtcggaaatcatcgctggttctagtagcaacgttgcatccagttcagaagcatcatcatcttcgtcatcctcagctcctacctcttcaaagaagggtgcgaagaccgaattcgagaagaagcttggggcattcatcaagcaccagatcgaaacggattcttccgaggcatacggaggtggttttagagctggctatccggctgttgagcgctatggcttgaaaagaacccttgatcatatgaagttgacagggtctttcccatattaaagcaacagaagtaaaggagggggctttcttccagttgtgaggatacactccacattggaggttttggtttgggttatacataactgatatgcataccaaacgaggggaattgtctgtaaatcaggagaaccctctgctgcgcggaaacttattgcaaactgtctttttataggaaaacgatacatgcaagttttcagacagggaacttgagaggatcatatgtaatttttgggcacttgtttttgactcctttggttatcaaaaacaaggcaacataataagattgaaatttatcttcatctttaaa

SEQ ID NO: 2921 - DNA, 1194 bp, Zea Mays
taagtgccgacaatccaagtttatggatacgcatgaagaagtactgtccttcccatgaagatgatggcactcctcggtgctgcagttgtgaacgaatggagccaagggagatcaagtacataacattagatgatgggaggaaactctgcttggaatgtctcaattctgcagtaatggattctccagaatgtcaacatctttacatggatattcaggaattttttgaaggtttgaacatgaaagtagaacagcaaattccattacttttggttgagaggcaggctcttaatgaagccttggaagccgagaaaaatgggcaccacctaccggaaaccagaggtctatgcctttctgaggagcaagttgttagaacgatcttaaaaagaccacagattggaccaggaaacagaatcttagatatgattataggaccatacaagctgtctcggcggtgtgaagtgactgcaatccttatattatatggtctgccaagattacaaactggttccattcttgcccatgagatgatgcatgcatatcttcgtctcaaaggattccgaaaccttagtattgaggttgaagaaggcatctgccaagttctatcccacctgtggttagagtcggaaatcatcgctggttctagtagcaacgttgcatccagttcagaagcatcatcatcttcgtcatcctcagctcctacctcttcaaagaagggtgcgaagaccgaattcgagaagaagcttggggcattcatcaagcaccagatcgaaacggattcttccgaggcatacggaggtggttttagagctggctatccggctgttgagcgctatggcttgaaaagaacccttgatcatatgaagttgacagggtctttcccatattaaagcaacagaagtaaaggagggggctttcttccagttgtgaggatacactccacattggaggttttggtttgggttatacataactgatatgcataccaaacgaggggaattgtctgtaaatcaggagaaccctctgctgcgcggaaacttattgcaaactgtctttttataggaaaacgatacatgcaagttttcagacagggaacttgagaggatcatatgtaatttttgggcacttgtttttgactcctttggttatcaaaaacaaggcaacataataagattgaaatttatcttcatctttaaa

SEQ ID NO: 2922 - DNA, 1158 bp, Zea Mays
tccaagtttatggatacgcatgaagaagtactgtccttcccatgaagatgatggcactcctcggtgctgcagttgtgaacgaatggaggaattttttgaaggtttgaacatgaaagtagaacagcaaattccattacttttggttgagaggcaggctcttaatgaagccttggaagccgagaaaaatgggcaccacctaccggaaaccagaggtctatgcctttctgaggagcaagttgttagaacggtgagttctttgttgcttttctctgctgatttgactactaccgcaggtaaagtataagggatggatgtactgagtgatataattcgtccagatcttaaaaagaccacagattggaccaggaaacagaatcttagatatgattataggaccatacaagctgtctcggcggtgtgaagtgactgcaatccttatattatatggtctgccaagattacaaactggttccattcttgcccatgagatgatgcatgcatatcttcgtctcaaaggattccgaaaccttagtattgaggttgaagaaggcatctgccaagttctatcccacctgtggttagagtcggaaatcatcgctggttctagtagcaacgttgcatccagttcagaagcatcatcatcttcgtcatcctcagctcctacctcttcaaagaagggtgcgaagaccgaattcgagaagaagcttggggcattcatcaagcaccagatcgaaacggattcttccgaggcatacggaggtggttttagagctggctatccggctgttgagcgctatggcttgaaaagaacccttgatcatatgaagttgacagggtctttcccatattaaagcaacagaagtaaaggagggggctttcttccagttgtgaggatacactccacattggaggttttggtttgggttatacataactgatatgcataccaaacgaggggaattgtctgtaaatcaggagaaccctctgctgcgcggaaacttattgcaaactgtctttttataggaaaacgatacatgcaagttttcagacagggaacttgagaggatcatatgtaatttttgggcacttgtttttgactcctttggttatcaaaaacaaggcaacataataagattgaaatttatcttcatctttaaa

SEQ ID NO: 2923 - DNA, 2052 bp, Zea Mays
ctcagccggaaggcccaattgatgaagacggataagctcggctcaggttaggccccggcatcgccgtcgactaggctggccctccgccgtctgccatgacgagatccgcgtccccgagcgtggacgctccacgcctccgcctcccggacgccggcgaggtgcgtccggcgtccctgctgcacacaacctgacaacctacttctctcttctatctaccacaagatccttccgccgcctccccctcctgacagagcagaggcagagctgaggcccggcctggccgggcttcggcggcccagcccaaataacccgacgggtccgcatcctgagctccgcctccacacaccttggcacctcgccctcgcctccagctccgcacgtcccgtcgcccgcttccacctccacgcgacgcgacggctcgccttcacctcctcgccgccagacgcgcccgccgccacccagcgagccggcagccgcccgctatcccaggcttcgttttcttgttggctccgccactgtgacagatggctgcggggggcgggcggtgcttgctcgccttggcgctcgccgccgcttggatctccggcgcggtggtcgccgcctcatcgtcgggaaggcggaagccgcacacccgtcaaatgcatgccctgctctagaacgtacattggtggtgcacatctggacaccttgacgggccagcttgctcagcgtcgtgacatagtggaaatgtctgattctggtgaattgtgcaaaggacttgctgatgatgtcgaagttcctatgctttcaaaactacgccggcaactggttggtaaaggttctcaccgccgtttagtctattctgtggattttggtgcccatgaaggtgctatggttaatttccttgatcactacgatgcccatctggtgatatttgaaaaacttcctgatggagtgtttgccgacccatttgagctacagcattttgttgagcgcaaagttttcgttgatgttgctgtttttggagacgccaaccttgaactgcccacagctctatccaatgggtcatctgttgagatccattttgatctcaggcgaatcatttcaatcaactgtaaccttgtaatagagatgcctctccatgctagatacccgcctcttgatgccagtggctatgccacagtggagtttggtagcgcagatctattcctccgctacagaaaaaaggacatccattctggttcctgtctttgggtgatcaataatctcaaagctgcacccctggagaaagctgcatggcgcataccctgtggagacgaggcccacataggatttgtatctagcatcacgtttctttcagctcttgtttgctccatgtccattgtcttggcttctctcattttttgacgtcttagggtcctatcagaccttttttttgtttacataaatactgaagtgcgagacaggagaattctcttcatgcatccacacatccttgcaaatgacaacccagttgccattaattttgctagctttagtggagtctttgcaagttccattgaacggagttgccaacttcgaatcacatacagaccagaaccagataagggtgttcctctttgtgatggaaaaaggagtcccaaaagaaaaatcatctacttcaagttcggtttgtgctcatgagtcatgaggcagtcagagccagaagctgaatgccaccatcatcttggaagaagacttgatccgctggctggaaagaaatcgaaacctaaccagtctgtcggatgctgacaaacattactgcagagcacctgatgtcctggttgatgcctgacagaaataacaaatactactaaaaagaatacaattttagatgcactcttaattgaaacgtgtaaaagtttgatcagatatatagatttaaaaggcactgatgtttatgacgccgaaagtaaatatgctatgaaaacatacctaatgacaaatttgatggtatttatttgatattagaattttctgttctttttaataatgttattacagatttaaagacattaacttggtgtattaaac

SEQ ID NO: 2924 - DNA, 1503 bp, Zea Mays
gatccttccgccgcctccccctcctgacagagcagaggcagagctgaggcccggcctggccgggcttcggcggcccagcccaaataacccgacgggtccgcatcctgagctccgcctccacacaccttggcacctcgccctcgcctccagctccgcacgtcccgtcgcccgcttccacctccacgcgacgcgacggctcgccttcacctcctcgccgccagacgcgcccgccgccacccagcgagccggcagccgcccgctatcccaggcttcgttttcttgttggctccgccactgtgacagatggctgcggggggcgggcggtgcttgctcgccttggcgctcgccgccgcttggatctccggcgcggtggtcgccgcctcatcgtcgggtgagcaggcggaagccgcacacccgtcaaatgcatgccctgctctagaacgtacattggtggtgcacatctggacaccttgacgggccagcttgctcagcgtcgtgacatagtggaaatgtctgattctggtgaattgtgcaaaggacttgctgatgatgtcgaagttcctatgctttcaaaactacgccggcaactggttggtaaaggttctcaccgccgtttagtctattctgtggattttggtgcccatgaaggtgctatggttaatttccttgatcactacgatgcccatctggtgatatttgaaaaacttcctgatggagtgtttgccgacccatttgagctacagcattttgttgagcgcaaagttttcgttgatgttgctgtttttggagacgccaaccttgaactgcccacagctctatccaatgggtcatctgttgagatccattttgatctcaggcgaatcatttcaatcaactgtaaccttgtaatagagatgcctctccatgctagatacccgcctcttgatgccagtggctatgccacagtggagtttggtagcgcagatctattcctccgctacagaaaaaaggacatccattctggttcctgtctttgggtgatcaataatctcaaagctgcacccctggagaaagctgcatggcgcataccctgtggagacgaggcccacataggatttgtatctagcatcacgtttctttcagctcttgtttgctccatgtccattgtcttggcttctctcattttttgacgtcttagggtcctatcagaccttttttttgtttacataaatactgaagtgcgagacaggagaattctcttcatgcatccacacatccttgcaaatgacaacccagttgccattaattttgctagctttagtggagtctttgcaagttccattgaacggagttgccaacttcgaatcacatacagaccagaaccagataagggtgttcctctttgtgatggaaaaaggagtcccaaaagaaaaatcatctacttcaagttcggtttgtgctcatgagtcatgaggcagtcagagccagaagctgaatgccaccatcatcttggaagaaggcaag

SEQ ID NO: 2925 - DNA, 1280 bp, Zea Mays
cccgaaacggcaacgccgagagctccgggagagaagagaacacgcgcggcacgggcgcaccgcgcaccccgaccccgcacaccgacgacgaagagaggagaggaggcggagctcgagcccaaccgcgcaactcacttccccgtcgcgatttgcattgccctcctcttggcccccgatctcgccgtgccctacccccagcctcgctccgccgccaccagagagatagcgccccccattcccacaatctaatccttccgtccctcgaggagccgagccctccgcgcggccgtgggatggggcggtgacaacaccggtgagtggcgtggggcagggagccggtggcgagggcatatcatggtgcagtgcctggacggggtgaggcagctgctcgcggtcctgctcaagtgctgcgacgtcgagctcaagcagccgcccgggctcgaggaccctcaggttctcgcgagggagaccgtcttcagcgtgagcgaggtcgaggctctgtacgagctgttcaagaagataagcagtgctgtcatcgatgatgggctgattaacaaggaggagtttcagttggcactatttaagaccagcaagaaggagagcctgttcgcagaccgcgtatttgatttgtttgacacaaagcacaatggaattttaggatttgaagaatttgctcgtgctctctcagtatttcatcctaatgctccccttgatgagaaaattgacttttcattccggctgtatgatctcaagcagcaaggctacattgagagacaagaggttaagcagatggttgttgctacacttgctgagtcaggaatgaatctttcagatgaaattgtagagagtataattgacaaggcgtccaggcgcccgaaggatccaaggcgtccccgtcgcctaggtgagaagcagcaagagggcataggggaagggaaaggggcgctgctgtttcagggtggcagcaccgaatcgggagcggcggaggccaaatccagggcggcagaggccaaatccagggcggcggaggctgaatcgtcggcggcagcgtccaaatcgtcggcggcggcggcgaatctgagatggcgacggcgaatctgaggcggcggcggctcaatcgggggcagcggcagctgaatggtggggagagaggcaacctagggttgccagaggaaggattatatgggctggctggtgggctgggcctcctaccccttccttctccttttttctttttctttttttctttttcttcctcctccatggggctgttttgctga

SEQ ID NO: 2926 - DNA, 1338 bp, Zea Mays
cccgaaacggcaacgccgagagctccgggagagaagagaacacgcgcggcacgggcgcaccgcgcaccccgaccccgcacaccgacgacgaagagaggagaggaggcggagctcgagcccaaccgcgcaactcacttccccgtcgcgatttgcattgccctcctcttggcccccgatctcgccgtgccctacccccagcctcgctccgccgccaccagagagatagcgccccccattcccacaatctaatccttccgtccctcgaggagccgagccctccgcgcggccgtgggatggggcggtgacaacaccggtgagtggcgtggggcagggagccggtggcgagggcatatcatggtgcagtgcctggacggggtgaggcagctgctcgcggtcctgctcaagtgctgcgacgtcgagctcaagcagccgcccgggctcgaggaccctcaggttctcgcgagggagaccgtcttcagcgtgagcgaggtcgaggctctgtacgagctgttcaagaagataagcagtgctgtcatcgatgatgggctgattaacaaggaggagtttcagttggcactatttaagaccagcaagaaggagagcctgttcgcagaccgcgtatttgatttgtttgacacaaagcacaatggaattttaggatttgaagaatttgctcgtgctctctcagtatttcatcctaatgctccccttgatgagaaaattgacttttcattccggctgtatgatctcaagcagcaaggctacattgagagacaagaggttaagcagatggttgttgctacacttgctgagtcaggaatgaatctttcagatgaaattgtagagagtataattgacaagagtcacttgcgtcaagaatcaagatcactagatgccttgttttaaaggcgtcgcctaggcgtccaggcgcccgaaggatccaaggcgtccccgtcgcctaggtgagaagcagcaagagggcataggggaagggaaaggggcgctgctgtttcagggtggcagcaccgaatcgggagcggcggaggccaaatccagggcggcagaggccaaatccagggcggcggaggctgaatcgtcggcggcagcgtccaaatcgtcggcggcggcggcgaatctgagatggcgacggcgaatctgaggcggcggcggctcaatcgggggcagcggcagctgaatggtggggagagaggcaacctagggttgccagaggaaggattatatgggctggctggtgggctgggcctcctaccccttccttctccttttttctttttctttttttctttttcttcctcctccatggggctgttttgctga

SEQ ID NO: 2927 - DNA, 2189 bp, Zea Mays
cccgaaacggcaacgccgagagctccgggagagaagagaacacgcgcggcacgggcgcaccgcgcaccccgaccccgcacaccgacgacgaagagaggagaggaggcggagctcgagcccaaccgcgcaactcacttccccgtcgcgatttgcattgccctcctcttggcccccgatctcgccgtgccctacccccagcctcgctccgccgccaccagagagatagcgccccccattcccacaatctaatccttccgtccctcgaggagccgagccctccgcgcggccgtgggatggggcggtgacaacaccggtgagtggcgtggggcagggagccggtggcgagggcatatcatggtgcagtgcctggacggggtgaggcagctgctcgcggtcctgctcaagtgctgcgacgtcgagctcaagcagccgcccgggctcgaggaccctcaggttctcgcgagggagaccgtcttcagcgtgagcgaggtcgaggctctgtacgagctgttcaagaagataagcagtgctgtcatcgatgatgggctgattaacaaggaggagtttcagttggcactatttaagaccagcaagaaggagagcctgttcgcagaccgcgtatttgatttgtttgacacaaagcacaatggaattttaggatttgaagaatttgctcgtgctctctcagtatttcatcctaatgctccccttgatgagaaaattgacttttcattccggctgtatgatctcaagcagcaaggctacattgagagacaagaggttaagcagatggttgttgctacacttgctgagtcaggaatgaatctttcagatgaaattgtagagagtataattgacaaggtttgctaaagttgtgcatttatgttatggtatattcaatttatctgtatcgtgcagtgctcctccagtgagctttatataatatttaggacaccaagtttgacctgaaatgtcgcatgaagataacaagagggagtatgtgttagagtgttgtgtgtctttctctatatcttctctactatataaagcactagtttccaccgtcgtcgtgcccggccccacacacacacattaaatggtaaagaagtaaaattattcacaaatggactattggagattcaaactatggttgttggcattatgcccacttttacatccacctagccaacagaacatacatgtttttgtgttttatattctatactcaagtataaatggaaaccgtagcaatatatgagcactttgctagttcaactacataatactgttccatacttacatttccgaaagagtatttgggagcactacagtaaaccgaggggccttgttggtaaccattatttgagtccaggatatgatgcagaagtaggcaaatgtagttggacataccattctatcaattttgattactgtttggtgcatccttcaagaaagtgcattagcatttatcgtttattttatttgagaccagacgacgatgaagagtatttgcaagcactgtagtaactgaggggtcttgctggtaaacatttataaaattgagacgtgccaaaacagatgctgtctttcttatttgagtccagcagatgacagacaaatctaatgggacacaccattgtaccatttttggttgtgttaagtttggtgcatcctttaagaaagtgcattagggtttatctcttattttctagagtcacttgcgtcaagaatcaagatcactagatgccttgttttaaaggcgtcgcctaggcgtccaggcgcccgaaggatccaaggcgtccccgtcgcctaggtgagaagcagcaagagggcataggggaagggaaaggggcgctgctgtttcagggtggcagcaccgaatcgggagcggcggaggccaaatccagggcggcagaggccaaatccagggcggcggaggctgaatcgtcggcggcagcgtccaaatcgtcggcggcggcggcgaatctgagatggcgacggcgaatctgaggcggcggcggctcaatcgggggcagcggcagctgaatggtggggagagaggcaacctagggttgccagaggaaggattatatgggctggctggtgggctgggcctcctaccccttccttctccttttttctttttctttttttctttttcttcctcctccatggggctgttttgctga

SEQ ID NO: 2928 - DNA, 1640 bp, Zea Mays
agaatcaggattgctcgatagttaatactgcacaggcgatgaaagctatcaaaaacttaagggtgggaggtatttgatttgtttgacacaaagcacaatggaattttaggatttgaagaatttgctcgtgctctctcagtatttcatcctaatgctccccttgatgagaaaattgacttttcattccggctgtatgatctcaagcagcaaggctacattgagagacaagaggttaagcagatggttgttgctacacttgctgagtcaggaatgaatctttcagatgaaattgtagagagtataattgacaaggtttgctaaagttgtgcatttatgttatggtatattcaatttatctgtatcgtgcagtgctcctccagtgagctttatataatatttaggacaccaagtttgacctgaaatgtcgcatgaagataacaagagggagtatgtgttagagtgttgtgtgtctttctctatatcttctctactatataaagcactagtttccaccgtcgtcgtgcccggccccacacacacacattaaatggtaaagaagtaaaattattcacaaatggactattggagattcaaactatggttgttggcattatgcccacttttacatccacctagccaacagaacatacatgtttttgtgttttatattctatactcaagtataaatggaaaccgtagcaatatatgagcactttgctagttcaactacataatactgttccatacttacatttccgaaagagtatttgggagcactacagtaaaccgaggggccttgttggtaaccattatttgagtccaggatatgatgcagaagtaggcaaatgtagttggacataccattctatcaattttgattactgtttggtgcatccttcaagaaagtgcattagcatttatcgtttattttatttgagaccagacgacgatgaagagtatttgcaagcactgtagtaactgaggggtcttgctggtaaacatttataaaattgagacgtgccaaaacagatgctgtctttcttatttgagtccagcagatgacagacaaatctaatgggacacaccattgtaccatttttggttgtgttaagtttggtgcatcctttaagaaagtgcattagggtttatctcttattttctagagtcacttgcgtcaagaatcaagatcactagatgccttgttttaaaggcgtcgcctaggcgtccaggcgcccgaaggatccaaggcgtccccgtcgcctaggtgagaagcagcaagagggcataggggaagggaaaggggcgctgctgtttcagggtggcagcaccgaatcgggagcggcggaggccaaatccagggcggcagaggccaaatccagggcggcggaggctgaatcgtcggcggcagcgtccaaatcgtcggcggcggcggcgaatctgagatggcgacggcgaatctgaggcggcggcggctcaatcgggggcagcggcagctgaatggtggggagagaggcaacctagggttgccagaggaaggattatatgggctggctggtgggctgggcctcctaccccttccttctccttttttctttttctttttttctttttcttcctcctccatggggctgttttgctga

SEQ ID NO: 2929 - DNA, 1746 bp, Zea Mays
gacgaggtaggcttttaggcggctacgatccgatttgtacgcctcaactagacctcactcgtacgccgccgccccctccaccgccgtcgtgcgagagggaggagggagctctggacctccgtggggcgtggaggagtgggacgacgcacgcggaggcagccccggtcggttgctgctgtatccgtccaggatcgggggaattccaggaggcaggaaggaaagttggagtgctacatagctgagtaccacaggtgatagattgatggctggcgctttggctgaggacaatgctggggatggtagatcctcatcaactgaagagatgtcaagtgatgaccagattcattccgagaatcctctatctgagtggaggtccagtcagcaagttgagaacagagtaccgcccaccttacggatttacttgggcaatgatgatgatgatgattttagttatggagtgagctaaggagcacttcatttgatgtcggcgcatataagtggtatatattaatatacccgcgaggatgtggtgtctgcgatcacctctctctctttctttgtgctgaccataataagctactcccaggatggagtcactttgcgcaatttacaatagctcttattaataaagaccctaagaaatctaagtattctgaaagagcatgattgggggtggaaaaagtttatggagctgtcagaattacacgatggctttattgttcaggatgctcttaccatcaaagcccaagttcaagtcattagggagaagatagaccgtccatttcgttgccttgatggccagtaccgaagggaactaattagggtgtatctatcaactgtggaacaaatttatcggcgttttattgatgaaaaaagaaggatgttcagcaggctgattgaggataaactcgggtggtccagtttcagtggattctggctagcaatggatccaagtgtgcgtcggcacatgacacgggaaaagactgaaactatattgaaagttgtagtgaaacagttctttatagagaaagaagttacatcaaccttggtatttgactcgctatatagcggacttaaggcacttgaataccagagcaacaacaaaaaggggatacctaaaataacagaggcagatgctcggagcactccaatggtgcttattgatcaagacatgtttgttttggctgatgatgcgctactgttgtttgaaagagctgcattggacacacaatcacaccaaccattgcccaaaaaagatgataaaggatcaccgaaccgtacaaaggatgacacctcaagtgacgagtttgacaaagattctattgagcgtgatgatagatggcttgaagagctaggctgcaagacactggaactttttgccgtaactcatatattcagccgagcagaagcggcgtaccaagaagcgatggctttgcagctccaagaggaactcattcgtgaagaagcatccgagcgagctggaactgaacttaagccaaagcgtcgtgctgctgataagaaaaggcgtggcaagaacatgtgaagtgttatattttctttttaaaaaactagcaataattcatcggatgctaggctatttcccctcattttttgtgaacagacatatatatgccgccgttcgtagattctagtctcgtgcattccctttgagaatgtaagattgaagtgtgtttttccattggttgatctcaggtttatatacatgttattaggctgggttcaagt

SEQ ID NO: 2930 - DNA, 1769 bp, Zea Mays
gacgaggtaggcttttaggcggctacgatccgatttgtacgcctcaactagacctcactcgtacgccgccgccccctccaccgccgtcgtgcgagagggaggagggagctctggacctccgtggggcgtggaggagtgggacgacgcacgcggaggcagccccggtcggttgctgctgtatccgtccaggatcgggggaattccaggaggcaggaaggaaagttggagtgctacatagctgagtaccacaggtgatagattgatggctggcgctttggctgaggacaatgctggggatggtagatcctcatcaactgaagagatgtcaagtgatgaccagattcattccgagaatcctctatctgagtggaggtccagtcagcaagttgagaacagagtaccgcccaccttacggatttacttgggcaatgatgatgatgatgattttagttatggagtgagctaaggagcacttcatttgatgtcggcgcatataagtggtatatattaatatacccgcgaggatgtggtgtctgcgatcacctctctctctttctttgtgctgaccataataagctactcccaggatggagtcactttgcgcaatttacaatagctcttattaataaagaccctaagaaatctaagtattctgatacactgcatcggttttggaagaaagagcatgattgggggtggaaaaagtttatggagctgtcagaattacacgatggctttattgttcaggatgctcttaccatcaaagcccaagttcaagtcattagggagaagatagaccgtccatttcgttgccttgatggccagtaccgaagggaactaattagggtgtatctatcaactgtggaacaaatttatcggcgttttattgatgaaaaaagaaggatgttcagcaggctgattgaggataaactcgggtggtccagtttcagtggattctggctagcaatggatccaagtgtgcgtcggcacatgacacgggaaaagactgaaactatattgaaagttgtagtgaaacagttctttatagagaaagaagttacatcaaccttggtatttgactcgctatatagcggacttaaggcacttgaataccagagcaacaacaaaaaggggatacctaaaataacagaggcagatgctcggagcactccaatggtgcttattgatcaagacatgtttgttttggctgatgatgcgctactgttgtttgaaagagctgcattggacacacaatcacaccaaccattgcccaaaaaagatgataaaggatcaccgaaccgtacaaaggatgacacctcaagtgacgagtttgacaaagattctattgagcgtgatgatagatggcttgaagagctaggctgcaagacactggaactttttgccgtaactcatatattcagccgagcagaagcggcgtaccaagaagcgatggctttgcagctccaagaggaactcattcgtgaagaagcatccgagcgagctggaactgaacttaagccaaagcgtcgtgctgctgataagaaaaggcgtggcaagaacatgtgaagtgttatattttctttttaaaaaactagcaataattcatcggatgctaggctatttcccctcattttttgtgaacagacatatatatgccgccgttcgtagattctagtctcgtgcattccctttgagaatgtaagattgaagtgtgtttttccattggttgatctcaggtttatatacatgttattaggctgggttcaagt

SEQ ID NO: 2931 - DNA, 1778 bp, Zea Mays
gacgaggtaggcttttaggcggctacgatccgatttgtacgcctcaactagacctcactcgtacgccgccgccccctccaccgccgtcgtgcgagagggaggagggagctctggacctccgtggggcgtggaggagtgggacgacgcacgcggaggcagccccggtcggttgctgctgtatccgtccaggatcgggggaattccaggaggcaggaaggaaagttggagtgctacatagctgagtaccacaggtgatagattgatggctggcgctttggctgaggacaatgctggggatggtagatcctcatcaactgaagagatgtcaagtgatgaccagattcattccgagaatcctctatctgagtggaggtccagtcagcaagttgagaacagagacctaggccttctgaactttatggaaagtttacatggagaattgattatttctcccaaatcaacaggagtgagctaaggagcacttcatttgatgtcggcgcatataagtggtatatattaatatacccgcgaggatgtggtgtctgcgatcacctctctctctttctttgtgctgaccataataagctactcccaggatggagtcactttgcgcaatttacaatagctcttattaataaagaccctaagaaatctaagtattctgatacactgcatcggttttggaagaaagagcatgattgggggtggaaaaagtttatggagctgtcagaattacacgatggctttattgttcaggatgctcttaccatcaaagcccaagttcaagtcattagggagaagatagaccgtccatttcgttgccttgatggccagtaccgaagggaactaattagggtgtatctatcaactgtggaacaaatttatcggcgttttattgatgaaaaaagaaggatgttcagcaggctgattgaggataaactcgggtggtccagtttcagtggattctggctagcaatggatccaagtgtgcgtcggcacatgacacgggaaaagactgaaactatattgaaagttgtagtgaaacagttctttatagagaaagaagttacatcaaccttggtatttgactcgctatatagcggacttaaggcacttgaataccagagcaacaacaaaaaggggatacctaaaataacagaggcagatgctcggagcactccaatggtgcttattgatcaagacatgtttgttttggctgatgatgcgctactgttgtttgaaagagctgcattggacacacaatcacaccaaccattgcccaaaaaagatgataaaggatcaccgaaccgtacaaaggatgacacctcaagtgacgagtttgacaaagattctattgagcgtgatgatagatggcttgaagagctaggctgcaagacactggaactttttgccgtaactcatatattcagccgagcagaagcggcgtaccaagaagcgatggctttgcagctccaagaggaactcattcgtgaagaagcatccgagcgagctggaactgaacttaagccaaagcgtcgtgctgctgataagaaaaggcgtggcaagaacatgtgaagtgttatattttctttttaaaaaactagcaataattcatcggatgctaggctatttcccctcattttttgtgaacagacatatatatgccgccgttcgtagattctagtctcgtgcattccctttgagaatgtaagattgaagtgtgtttttccattggttgatctcaggtttatatacatgttattaggctgggttcaagt

SEQ ID NO: 2932 - DNA, 1832 bp, Zea Mays
gacgaggtaggcttttaggcggctacgatccgatttgtacgcctcaactagacctcactcgtacgccgccgccccctccaccgccgtcgtgcgagagggaggagggagctctggacctccgtggggcgtggaggagtgggacgacgcacgcggaggcagccccggtcggttgctgctgtatccgtccaggatcgggggaattccaggaggaaggaaagttggagtgctacatagctgagtaccacaggtgatagattgatggctggcgctttggctgaggacaatgctggggatggtagatcctcatcaactgaagagatgtcaagtgatgaccagattcattccgagaatcctctatctgagtggaggtccagtcagcaagttgagaacagagtaccgcccaccttacggatttacttgggcaatgatgatgatgatgattttagttatggacctaggccttctgaactttatggaaagtttacatggagaattgattatttctcccaaatcaacaggagtgagctaaggagcacttcatttgatgtcggcgcatataagtggtatatattaatatacccgcgaggatgtggtgtctgcgatcacctctctctctttctttgtgctgaccataataagctactcccaggatggagtcactttgcgcaatttacaatagctcttattaataaagaccctaagaaatctaagtattctgatacactgcatcggttttggaagaaagagcatgattgggggtggaaaaagtttatggagctgtcagaattacacgatggctttattgttcaggatgctcttaccatcaaagcccaagttcaagtcattagggagaagatagaccgtccatttcgttgccttgatggccagtaccgaagggaactaattagggtgtatctatcaactgtggaacaaatttatcggcgttttattgatgaaaaaagaaggatgttcagcaggctgattgaggataaactcgggtggtccagtttcagtggattctggctagcaatggatccaagtgtgcgtcggcacatgacacgggaaaagactgaaactatattgaaagttgtagtgaaacagttctttatagagaaagaagttacatcaaccttggtatttgactcgctatatagcggacttaaggcacttgaataccagagcaacaacaaaaaggggatacctaaaataacagaggcagatgctcggagcactccaatggtgcttattgatcaagacatgtttgttttggctgatgatgcgctactgttgtttgaaagagctgcattggacacacaatcacaccaaccattgcccaaaaaagatgataaaggatcaccgaaccgtacaaaggatgacacctcaagtgacgagtttgacaaagattctattgagcgtgatgatagatggcttgaagagctaggctgcaagacactggaactttttgccgtaactcatatattcagccgagcagaagcggcgtaccaagaagcgatggctttgcagctccaagaggaactcattcgtgaagaagcatccgagcgagctggaactgaacttaagccaaagcgtcgtgctgctgataagaaaaggcgtggcaagaacatgtgaagtgttatattttctttttaaaaaactagcaataattcatcggatgctaggctatttcccctcattttttgtgaacagacatatatatgccgccgttcgtagattctagtctcgtgcattccctttgagaatgtaagattgaagtgtgtttttccattggttgatctcaggtttatatacatgttattaggctgggttcaagt

SEQ ID NO: 2933 - DNA, 1813 bp, Zea Mays
gacgaggtaggcttttaggcggctacgatccgatttgtacgcctcaactagacctcactcgtacgccgccgccccctccaccgccgtcgtgcgagagggaggagggagctctggacctccgtggggcgtggaggagtgggacgacgcacgcggaggcagccccggtcggttgctgctgtatccgtccaggatcgggggaattccaggaggcaggaaggaaagttggagtgctacatagctgagtaccacaggtgatagattgatggctggcgctttggctgaggacaatgctggggatggtagatcctcatcaactgaagagatgtcaagtgatgaccagattcattccgagaatcctctatctgagtggaggtccagtcagcaagttgagaacagagtaccgcccaccttacggatttacttgggcaatgatgatgatgatgattttagttatggacctaggccttctgaactttatggaaagtttacatggagaattgattatttctcccaaatcaacaggagtgagctaaggagcacttcatttgatgtcggcgcatataagtggtatatattaatatacccgcgaggatgtggtgtctgcgatcacctctctctctttctttgtgctgaccataataagctactcccaggatggagtcactttgcgcaatttacaatagctcttattaataaagaccctaagaaatctaagtattctgaaagagcatgattgggggtggaaaaagtttatggagctgtcagaattacacgatggctttattgttcaggatgctcttaccatcaaagcccaagttcaagtcattagggagaagatagaccgtccatttcgttgccttgatggccagtaccgaagggaactaattagggtgtatctatcaactgtggaacaaatttatcggcgttttattgatgaaaaaagaaggatgttcagcaggctgattgaggataaactcgggtggtccagtttcagtggattctggctagcaatggatccaagtgtgcgtcggcacatgacacgggaaaagactgaaactatattgaaagttgtagtgaaacagttctttatagagaaagaagttacatcaaccttggtatttgactcgctatatagcggacttaaggcacttgaataccagagcaacaacaaaaaggggatacctaaaataacagaggcagatgctcggagcactccaatggtgcttattgatcaagacatgtttgttttggctgatgatgcgctactgttgtttgaaagagctgcattggacacacaatcacaccaaccattgcccaaaaaagatgataaaggatcaccgaaccgtacaaaggatgacacctcaagtgacgagtttgacaaagattctattgagcgtgatgatagatggcttgaagagctaggctgcaagacactggaactttttgccgtaactcatatattcagccgagcagaagcggcgtaccaagaagcgatggctttgcagctccaagaggaactcattcgtgaagaagcatccgagcgagctggaactgaacttaagccaaagcgtcgtgctgctgataagaaaaggcgtggcaagaacatgtgaagtgttatattttctttttaaaaaactagcaataattcatcggatgctaggctatttcccctcattttttgtgaacagacatatatatgccgccgttcgtagattctagtctcgtgcattccctttgagaatgtaagattgaagtgtgtttttccattggttgatctcaggtttatatacatgttattaggctgggttcaagt

SEQ ID NO: 2934 - DNA, 1088 bp, Zea Mays
gagcatgattgggggtggaaaaagtttatggagctgtcagaattacacgatggctttattgttcaggatgctcttaccatcaaagcccaagttcaagtcattagggagaagatagaccgtccatttcgttgccttgatggccagtaccgaagggaactaattagggtgtatctatcaactgtggaacaaatttatcggcgttttattgatgaaaaaagaaggatgttcagcaggctgattgaggataaactcgggtggtccagtttcagtggattctggctagcaatggatccaagtgtgcgtcggcacatgacacgggaaaagactgaaactatattgaaagttgtagtgaaacagttctttatagagaaagaagttacatcaaccttggtatttgactcgctatatagcggacttaaggcacttgaataccagagcaacaacaaaaaggggatacctaaaataacagaggcagatgctcggagcactccaatggtgcttattgatcaagacatgtttgttttggctgatgatgcgctactgttgtttgaaagagctgcattggacacacaatcacaccaaccattgcccaaaaaagatgataaaggatcaccgaaccgtacaaaggatgacacctcaagtgacgagtttgacaaagattctattgagcgtgatgatagatggcttgaagagctaggctgcaagacactggaactttttgccgtaactcatatattcagccgagcagaagcggcgtaccaagaagcgatggctttgcagctccaagaggaactcattcgtgaagaagcatccgagcgagctggaactgaacttaagccaaagcgtcgtgctgctgataagaaaaggcgtggcaagaacatgtgaagtgttatattttctttttaaaaaactagcaataattcatcggatgctaggctatttcccctcattttttgtgaacagacatatatatgccgccgttcgtagattctagtctcgtgcattccctttgagaatgtaagattgaagtgtgtttttccattggttgatctcaggtttatatacatgttattaggctgggttcaagt

SEQ ID NO: 2935 - DNA, 3013 bp, Zea Mays
gtttctctcccagctcgtgtcaccgtcgcttgggctcgtgtcgtcaaggcctccttccctgtccgcgacctggcttctcaactgaccgtgcggatcgcgcgtccgccaacaaactccagctggagattgtggaccgacgtccctgggccataaaaactatgcacaagaccttctatcctctcccttcgtcgttcctcaaccgttaatttctagagagagatagggcatcgttgtgccagggactcggcggcggctccgcctggggctctcggctacctgctcttggctacctgccctgccctggtggtgcgatcgagcgaagtcgcagcggcgctgggtaccagtacggtgcatccgcggacgttgaggaccgacaggatctcgtgaattcctcatcggagttcttccctcgtcgcgagtcgaccctcatcgtggacagctcgctcgcgcgcccgatcctcgctgtgcggtgaggatggaagaagaacggcatgagtcgttgattctgtttttagtgatcgagattatgttataggggcggctcgttggccattggatcggctgttaatggatgcgatcaagtttggtctgaaccggttcggaaatagttctgaccattgatctcgatacggagggctaagatcaggttaggtcttcattgaatttaggccgttgagatcaaaacggatggtcggatcggttgtttgcgtattctctcccacacattaaatcagagccgttgatcctgtcgtgtgtggctgtgatggcataggagtattctagtttggcgatctaattgtggcagtccattattgatcggacggccgaaaagcaacgataccccttcggcctgggcgttttgcgtaagagaccccgagaaataactgaatcaacccgcagtccactaggattgttcactgagtctaggataacttaccaggaggcccctgtcttctctagaaattgaggcgcagtccagggagttaagaaatcaggaaaattaatttagaaatggatttttaatatgaaaataatggctagaatttgtttaattcatagaaatttcatattaagtccaaattaatccatcccagtttctataattttgtaataatattgtttatcaagtgatgtctctgttttgacatgaaaaacatattaaaaaagtgatgtctctgttttgacatgaaaaacatattaaaatttatctcttaattaatctcgtatcaaatacataaaaccttcggaaattcataactcctccgttttaattctgaattgactcgttctagttgcgttagtttcgtataagtatttactacacagtaacaacattaattataccatattgcataatttaatatttagatatttatttatcctatgtctactagattagctcttctaaatcaagactaacctgaccataattataatgtggttaaaacatgatctctagttaagttatacttaagattaaagttgaattgtttatttaagagtatattttctcttatgatgtatactaatcaatttataatagtaaaaccacatagattccccataaatcataacttcgtaaccctgactcagatcttagtagttctcgatcccacgatctcgtagctatgcgtagattattattattcagtttgttcttatgtttggtgtggtgttaattttgtttataccatgtatgtttgtattgctacgactagcagtgaggtcatgaggatttgaagaatcatcctggtacctagaatctcaagtgccaggcaagttgtgctcttgaccactttttacccaataatgttctttattatcactattcaatgcataggtttaattttgatgggacccaataggtcaccctagtctgattatcttttaccttgattacccgtgaatcatttggctagttttgctactgctttacatgattttgggttaatatttcattatatccatgttccaattattctattatgttattatgttcatgtcaagatcattatctttaattggaatatggagcttaacttgagaaacacgtgccaccacaagggtggaatgggacgcccttgacttactaattaggaaagctagtggaagagtaccttacccaaaaggggtaagggcagtaggggagttgcatgcagggaggttctcgggttgattttgctgcgatggcggtcagacgagagattcttgaaagtgctcttcccataaactgtagcgggttttcggaagctagtggaactttgtaaaggcctcgtagtgttaccctgcctcgcttccttggtagatgtgtatgggattcatgaccccttggcagatgggtaacatgacttgtgagtacagggtacaacctctgcagagtgtaaaactggtatactagccgagctcacggtcatgagcagctcaggactctcgcatgattaaattatggaacttaaattcaatttgtcatttgcatttgcatgggattatttattaattttgttctattcttattatggtttggtatttacttacatttagtaactgctaataaaatttgaccaacttattaaaagcaatgctcaactttaacccctattgttgatcagccttacacatcacatgaactcccacctttggtgagttcatgcacattatttcccacaacttgttgagcgatgaacatgtgtgagctcacccttgctgtctcacaccccccataggagaagaacaggtggttcaagaggagccacacaacgaggagtttgacttgatctaggtggcgtctcctagttgactttctggcgccaaggatggactttagttcgttatatatttatcttttatcctgtaagacttccgctatgtaataaatactctgattatattgtgacatttatctctatgcactctgttgtctcttttggcgcatgtatgagatgcacccgactttgtcccttaaatctgggtgtgacaatagcatgggtttattttagataatacataatcatga

SEQ ID NO: 2936 - DNA, 737 bp, Zea Mays
cgtgtcaccgtcgcttgggctcgtgtcgtcaaggcctccttccctgtccgcgacctggcttctcaactgaccgtgcggatcgcgcgtccgccaacaaactccagctggagattgtggaccgacgtccctgggccataaaaactatgcacaagaccttctatcctctcccttcgtcgttcctcaaccgttaatttctagagagagatagggcatcgttgtgccagggactcggcggcggctccgcctggggctctcggctacctgctcttggctacctgccctgccctggtggtgcgatcgagcgaagtcgcagcggcgctgggtaccagtacggtgcatccgcggacgttgaggaccgacaggatctcgtgaattcctcatcggagttcttccctcgtcgcgagtcgaccctcatcgtggacagctcgctcgcgcgcccgatcctcggagaagaacaggtggttcaagaggagccacacaacgaggagtttgacttgatctaggtggcgtctcctagttgactttctggcgccaaggatggactttagttcgttatatatttatcttttatcctgtaagacttccgctatgtaataaatactctgattatattgtgacatttatctctatgcactctgttgtctcttttggcgcatgtatgagatgcacccgactttgtcccttaaatctgggtgtgacaatagcatgggtttattttagataatacataatcatga

SEQ ID NO: 2937 - DNA, 1742 bp, Zea Mays
cgtgtcaccgtcgcttgggctcgtgtcgtcaaggcctccttccctgtccgcgacctggcttctcaactgaccgtgcggatcgcgcgtccgccaacaaactccagctggagattgtggaccgacgtccctgggccataaaaactatgcacaagaccttctatcctctcccttcgtcgttcctcaaccgttaatttctagagagagatagggcatcgttgtgccagggactcggcggcggctccgcctggggctctcggctacctgctcttggctacctgccctgccctggtggtgcgatcgagcgaagtcgcagcggcgctgggtaccagtacggtgcatccgcggacgttgaggaccgacaggatctcgtgaattcctcatcggagttcttccctcgtcgcgagtcgaccctcatcgtggacagctcgctcgcgcgcccgatcctcgcagtgaggtcatgaggatttgaagaatcatcctggtacctagaatctcaagtgccaggcaagttgtgctcttgaccactttttacccaataatgttctttattatcactattcaatgcataggtttaattttgatgggacccaataggtcaccctagtctgattatcttttaccttgattacccgtgaatcatttggctagttttgctactgctttacatgattttgggttaatatttcattatatccatgttccaattattctattatgttattatgttcatgtcaagatcattatctttaattggaatatggagcttaacttgagaaacacgtgccaccacaagggtggaatgggacgcccttgacttactaattaggaaagctagtggaagagtaccttacccaaaaggggtaagggcagtaggggagttgcatgcagggaggttctcgggttgattttgctgcgatggcggtcagacgagagattcttgaaagtgctcttcccataaactgtagcgggttttcggaagctagtggaactttgtaaaggcctcgtagtgttaccctgcctcgcttccttggtagatgtgtatgggattcatgaccccttggcagatgggtaacatgacttgtgagtacagggtacaacctctgcagagtgtaaaactggtatactagccgagctcacggtcatgagcagctcaggactctcgcatgattaaattatggaacttaaattcaatttgtcatttgcatttgcatgggattatttattaattttgttctattcttattatggtttggtatttacttacatttagtaactgctaataaaatttgaccaacttattaaaagcaatgctcaactttaacccctattgttgatcagccttacacatcacatgaactcccacctttggtgagttcatgcacattatttcccacaacttgttgagcgatgaacatgtgtgagctcacccttgctgtctcacaccccccataggagaagaacaggtggttcaagaggagccacacaacgaggagtttgacttgatctaggtggcgtctcctagttgactttctggcgccaaggatggactttagttcgttatatatttatcttttatcctgtaagacttccgctatgtaataaatactctgattatattgtgacatttatctctatgcactctgttgtctcttttggcgcatgtatgagatgcacccgactttgtcccttaaatctgggtgtgacaatagcatgggtttattttagataatacataatcatga

SEQ ID NO: 2938 - DNA, 1739 bp, Zea Mays
cgtgtcaccgtcgcttgggctcgtgtcgtcaaggcctccttccctgtccgcgacctggcttctcaactgaccgtgcggatcgcgcgtccgccaacaaactccagctggagattgtggaccgacgtccctgggccataaaaactatgcacaagaccttctatcctctcccttcgtcgttcctcaaccgttaatttctagagagagatagggcatcgttgtgccagggactcggcggcggctccgcctggggctctcggctacctgctcttggctacctgccctgccctggtggtgcgatcgagcgaagtcgcagcggcgctgggtaccagtacggtgcatccgcggacgttgaggaccgacaggatctcgtgaattcctcatcggagttcttccctcgtcgcgagtcgaccctcatcgtggacagctcgctcgcgcgcccgatcctcgtgaggtcatgaggatttgaagaatcatcctggtacctagaatctcaagtgccaggcaagttgtgctcttgaccactttttacccaataatgttctttattatcactattcaatgcataggtttaattttgatgggacccaataggtcaccctagtctgattatcttttaccttgattacccgtgaatcatttggctagttttgctactgctttacatgattttgggttaatatttcattatatccatgttccaattattctattatgttattatgttcatgtcaagatcattatctttaattggaatatggagcttaacttgagaaacacgtgccaccacaagggtggaatgggacgcccttgacttactaattaggaaagctagtggaagagtaccttacccaaaaggggtaagggcagtaggggagttgcatgcagggaggttctcgggttgattttgctgcgatggcggtcagacgagagattcttgaaagtgctcttcccataaactgtagcgggttttcggaagctagtggaactttgtaaaggcctcgtagtgttaccctgcctcgcttccttggtagatgtgtatgggattcatgaccccttggcagatgggtaacatgacttgtgagtacagggtacaacctctgcagagtgtaaaactggtatactagccgagctcacggtcatgagcagctcaggactctcgcatgattaaattatggaacttaaattcaatttgtcatttgcatttgcatgggattatttattaattttgttctattcttattatggtttggtatttacttacatttagtaactgctaataaaatttgaccaacttattaaaagcaatgctcaactttaacccctattgttgatcagccttacacatcacatgaactcccacctttggtgagttcatgcacattatttcccacaacttgttgagcgatgaacatgtgtgagctcacccttgctgtctcacaccccccataggagaagaacaggtggttcaagaggagccacacaacgaggagtttgacttgatctaggtggcgtctcctagttgactttctggcgccaaggatggactttagttcgttatatatttatcttttatcctgtaagacttccgctatgtaataaatactctgattatattgtgacatttatctctatgcactctgttgtctcttttggcgcatgtatgagatgcacccgactttgtcccttaaatctgggtgtgacaatagcatgggtttattttagataatacataatcatga

SEQ ID NO: 2939 - DNA, 2859 bp, Zea Mays
ctgaccgtgcggatcgcgcgtccgccaacaaactccagctggagattgtggaccgacgtccctgggccataaaaactatgcacaagaccttctatcctctcccttcgtcgttcctcaaccgttaatttctagagagagatagggcatcgttgtgccagggactcggcggcggctccgcctggggctctcggctacctgctcttggctacctgccctgccctggtggtgcgatcgagcgaagtcgcagcggcgctgggtaccagtacggtgcatccgcggacgttgaggaccgacaggatctcgtgaattcctcatcggagttcttccctcgtcgcgagtcgaccctcatcgtggacagctcgctcgcgcgcccgatcctcggggcggctcgttggccattggatcggctgttaatggatgcgatcaagtttggtctgaaccggttcggaaatagttctgaccattgatctcgatacggagggctaagatcaggttaggtcttcattgaatttaggccgttgagatcaaaacggatggtcggatcggttgtttgcgtattctctcccacacattaaatcagagccgttgatcctgtcgtgtgtggctgtgatggcataggagtattctagtttggcgatctaattgtggcagtccattattgatcggacggccgaaaagcaacgataccccttcggcctgggcgttttgcgtaagagaccccgagaaataactgaatcaacccgcagtccactaggattgttcactgagtctaggataacttaccaggaggcccctgtcttctctagaaattgaggcgcagtccagggagttaagaaatcaggaaaattaatttagaaatggatttttaatatgaaaataatggctagaatttgtttaattcatagaaatttcatattaagtccaaattaatccatcccagtttctataattttgtaataatattgtttatcaagtgatgtctctgttttgacatgaaaaacatattaaaaaagtgatgtctctgttttgacatgaaaaacatattaaaatttatctcttaattaatctcgtatcaaatacataaaaccttcggaaattcataactcctccgttttaattctgaattgactcgttctagttgcgttagtttcgtataagtatttactacacagtaacaacattaattataccatattgcataatttaatatttagatatttatttatcctatgtctactagattagctcttctaaatcaagactaacctgaccataattataatgtggttaaaacatgatctctagttaagttatacttaagattaaagttgaattgtttatttaagagtatattttctcttatgatgtatactaatcaatttataatagtaaaaccacatagattccccataaatcataacttcgtaaccctgactcagatcttagtagttctcgatcccacgatctcgtagctatgcgtagattattattattcagtttgttcttatgtttggtgtggtgttaattttgtttataccatgtatgtttgtattgctacgactagcagtgaggtcatgaggatttgaagaatcatcctggtacctagaatctcaagtgccaggcaagttgtgctcttgaccactttttacccaataatgttctttattatcactattcaatgcataggtttaattttgatgggacccaataggtcaccctagtctgattatcttttaccttgattacccgtgaatcatttggctagttttgctactgctttacatgattttgggttaatatttcattatatccatgttccaattattctattatgttattatgttcatgtcaagatcattatctttaattggaatatggagcttaacttgagaaacacgtgccaccacaagggtggaatgggacgcccttgacttactaattaggaaagctagtggaagagtaccttacccaaaaggggtaagggcagtaggggagttgcatgcagggaggttctcgggttgattttgctgcgatggcggtcagacgagagattcttgaaagtgctcttcccataaactgtagcgggttttcggaagctagtggaactttgtaaaggcctcgtagtgttaccctgcctcgcttccttggtagatgtgtatgggattcatgaccccttggcagatgggtaacatgacttgtgagtacagggtacaacctctgcagagtgtaaaactggtatactagccgagctcacggtcatgagcagctcaggactctcgcatgattaaattatggaacttaaattcaatttgtcatttgcatttgcatgggattatttattaattttgttctattcttattatggtttggtatttacttacatttagtaactgctaataaaatttgaccaacttattaaaagcaatgctcaactttaacccctattgttgatcagccttacacatcacatgaactcccacctttggtgagttcatgcacattatttcccacaacttgttgagcgatgaacatgtgtgagctcacccttgctgtctcacaccccccataggagaagaacaggtggttcaagaggagccacacaacgaggagtttgacttgatctaggtggcgtctcctagttgactttctggcgccaaggatggactttagttcgttatatatttatcttttatcctgtaagacttccgctatgtaataaatactctgattatattgtgacatttatctctatgcactctgttgtctcttttggcgcatgtatgagatgcacccgactttgtcccttaaatctgggtgtgacaatagcatgggtttattttagataatacataatcatga

SEQ ID NO: 2940 - DNA, 2888 bp, Zea Mays
aaactatcaaacgtggaacaaatttgccggcgctttattgatgaaagaagaagcaagcttagcaggttgattgctgataaactggggtggtccagtttcagtggattctggttagcaatggatccaagtgtgcgtcgacacatgacaagggaaaagactgaaactatactgaaagttctagtgaaacaattctttatagagaaagaagttacatcaaccttggtaattgactcactgtatagtggacttaaggcacttgaataccagagcaagaacaaaaagggcatacctaaactaacagagacagatgctcggagcactccaatggtacttattgatcaggatatgtttgttttggctgatgatgtgatacttctgcttgaaagagctgcattggacacactgccacaccaaccattgcccacgaaggatgataaaagttcacaaaaccgcacgaaggatggcaactcaggtgaggagtttagcaaagattctattgagcgtgatgatagacggcttatagagctaggctggaagacattggagctttttgccttgactcatatatttagccgaatagaagtggcacatcaagaggctgtggctttgaagcgccaagaggaactcattcgtgaagaggaagcagctgggctagctgaaattgaacttaaggcaaagcgtagtgctgctgaaaaggaaaaacgtgccaagaaaaaacaggcaaaacagaagaaaaatagtcgaagaagtaataaagggaagagtggcaagtctgacatcaataaggaaatacttatgtacagcagtccttcagcagagacgataattcagatgcgcttcatgttgatattgaagaccgtgaaagtagccctgttaattgggagacagatgcttcagaaactcaagctactgtgcctggaagtagtgaggtgcaaaatgaccatgcagggaagaggacctctactgtagatgatagctcatcgacttgttcatcagactcagtcccttcagttatcgtgaatggatcatatacaggaggtgcctggacaagcgtcagatccttatccaataggggaaacaaccggaggaataaggatactgaagcacgggcagcacttgcacaaggtggatcaagttcagcgcataatggttttataggatctggcggcagtgcctctggccactcaaaggaaagatacgaacctgaggatgataaagttgtcatgcagaggaagcaacatgcacggcacattgatgtcattagcccctctaagtcaagaatggcagtgtcttcattttcttctgtgagccctgttaagaagcaacctaacttgtctcatcagccaaaatttttgctagaaagcaccaatagttcaaatcaccgtgcaagcgaagtttcaggcgccgtgactgccactacaacagcaggttcttgtaccatcaaaatctgaagcgcagaaacaggcttccctaactggcagcgcaagcactcaggtcgtttcggtatcaaggcccttgagtgccccgcaagtccctgcagcaaaacaaagtgtgccagccacaacagctcagaacgcacctcttctttctcgctcagtgagtgctgttgggcggttaggaaatgagccctccgccaatgctcctagcttcattccccggtcacgaacctatcgcaatgccatgatggagaaaagttctggtggcgtaagcagtctcacacatcagcaaggttcatctgagcaggccgtcgcaccatcccaatcgatgtttacatcgcagccttccattctgtcatcggagaccttgtctatgaaagaggaaacgtcgttgagacctgggtttacatttggaaccgtaaagcccgagtcactgaacccttaccagggcagagaagagaactcactgcaagcgagcagcagcagcagcagtgactgtacgccatcgagttcgaacatcagaagtgagatcgcgaagctcagtttgaacggaagatcacggagcaagcaactcctgtctgaaatctctaccagatttactccctaccagccacaaggcttggtagctgacgagttcccacacctggacatcatcaacgacctgctggatgaggagcagagtgacaggagaagggttcttcagcctggtttcgtccagcaattctctgtgcataacggcgtcagcgcgcctgattatggcttgttcagtgagccgtacctgttcgaccggtccgagcagtactttgacgaggagcctccaaggttctacagtccattgagcagcgctcctcggaggatgagggaccggagctactcgcacttcgatctcccttcatactccaggagcagccagcttgatggtctattgatgagccagtggccgccatacagccgcgccgacctcgccatgcctggttttgggtcagacacaggtggctactcctatcagccgcagggtttcccgagtccagcgagtgcagcaagcagatacccgtcgtatcgccctgccaatgggcattgagagttttagcgattgcaattggtaataatgtgtggtggagtccatgctgctcgcttctgagctgagtgtaattgtaatagtccccccatagcagtgatataaagaatggttcctctgttttattcaatccatagttatatcatttgcctctctttttctatagttcagttttgctcagtggcaataaatctcggctaaaatgatctggacaatctaggctcagttttccctagttttgctgagtggccatagaatttgaggattcttttgggacgcaggaatttcacaaaaatggtatatgaattttatagtaattagtgtaaaaacataggaacaatgtaggatttagaaaattttcctttggaacaaag

SEQ ID NO: 2941 - DNA, 3076 bp, Zea Mays
aactatcaaacgtggaacaaatttgccggcgctttattgatgaaagaagaagcaagcttagcaggttgattgctgataaactggggtggtccagtttcagtggattctggttagcaatggatccaagtgtgcgtcgacacatgacaagggaaaagactgaaactatactgaaagttctagtgaaacaattctttatagagaaagaagttacatcaaccttggtaattgactcactgtatagtggacttaaggcacttgaataccagagcaagaacaaaaagggcatacctaaactaacagagacagatgctcggagcactccaatggtacttattgatcaggatatgtttgttttggctgatgatgtgatacttctgcttgaaagagctgcattggacacactgccacaccaaccattgcccacgaaggatgataaaagttcacaaaaccgcacgaaggatggcaactcaggtgaggagtttagcaaagattctattgagcgtgatgatagacggcttatagagctaggctggaagacattggagctttttgccttgactcatatatttagccgaatagaagtggcacatcaagaggctgtggctttgaagcgccaagaggaactcattcgtgaagaggaagcagctgggctagctgaaattgaacttaaggcaaagcgtagtgctgctgaaaaggaaaaacgtgccaagaaaaaacagaagaaaaatagtcgaagaagtaataaagggaagagtggcaagtctgacatcaataaggaaatacttatgtacagcagtccttcaggtgatagaatcctggatgatttttctggacaaacggaagaaatgtcctcaaatgctgacaaccctgaagaagtttctgatatatctgacagcagagacgataattcagatgcgcttcatgttgatattgaagaccgtgaaagtagccctgttaattgggagacagatgcttcagaaactcaagctactgtgcctggaagtagtgaggtgcaaaatgaccatgcagggaagaggacctctactgtagatgatagctcatcgacttgttcatcagactcagtcccttcagttatcgtgaatggatcatatacaggaggtgcctggacaagcgtcagatccttatccaataggggaaacaaccggaggaataaggatactgaagcacgggcagcacttgcacaaggtggatcaagttcagcgcataatggttttataggatctggcggcagtgcctctggccactcaaaggaaagatacgaacctgaggatgataaagttgtcatgcagaggaagcaacatgcacggcacattgatgtcattagcccctctaagtcaagaatggcagtgtcttcattttcttctgtgagccctgttaagaagcaacctaacttgtctcatcagccaaaatttttgctagaaagcaccaatagttcaaatcaccgtgcaagcgaagtttcaggcgccgtgactgccactacaacagcaggtgcctcttcaaccctggcagctcagttagtttcaaataaaggacctgtatccagtgctgcaacccggaatgagaagccagttctagttacaaataaacccctgcaggttcttgtaccatcaaaatctgaagcgcagaaacaggcttccctaactggcagcgcaagcactcaggtcgtttcggtatcaaggcccttgagtgccccgcaagtccctgcagcaaaacaaagtgtgccagccacaacagctcagaacgcacctcttctttctcgctcagtgagtgctgttgggcggttaggaaatgagccctccgccaatgctcctagcttcattccccggtcacgaacctatcgcaatgccatgatggagaaaagttctggtggcgtaagcagtctcacacatcagcaaggttcatctgagcaggccgtcgcaccatcccaatcgatgtttacatcgcagccttccattctgtcatcggagaccttgtctatgaaagaggaaacgtcgttgagacctgggtttacatttggaaccgtaaagcccgagtcactgaacccttaccagggcagagaagagaactcactgcaagcgagcagcagcagcagcagtgactgtacgccatcgagttcgaacatcagaagtgagatcgcgaagctcagtttgaacggaagatcacggagcaagcaactcctgtctgaaatctctaccagatttactccctaccagccacaaggcttggtagctgacgagttcccacacctggacatcatcaacgacctgctggatgaggagcagagtgacaggagaagggttcttcagcctggtttcgtccagcaattctctgtgcataacggcgtcagcgcgcctgattatggcttgttcagtgagccgtacctgttcgaccggtccgagcagtactttgacgaggagcctccaaggttctacagtccattgagcagcgctcctcggaggatgagggaccggagctactcgcacttcgatctcccttcatactccaggagcagccagcttgatggtctattgatgagccagtggccgccatacagccgcgccgacctcgccatgcctggttttgggtcagacacaggtggctactcctatcagccgcagggtttcccgagtccagcgagtgcagcaagcagatacccgtcgtatcgccctgccaatgggcattgagagttttagcgattgcaattggtaataatgtgtggtggagtccatgctgctcgcttctgagctgagtgtaattgtaatagtccccccatagcagtgatataaagaatggttcctctgttttattcaatccatagttatatcatttgcctctctttttctatagttcagttttgctcagtggcaataaatctcggctaaaatgatctggacaatctaggctcagttttccctagttttgctgagtggccatagaatttgaggattcttttgggacgcaggaatttcacaaaaatggtatatgaattttatagtaattagtgtaaaaacataggaacaatgtaggatttagaaaattttcctttggaacaaag

SEQ ID NO: 2942 - DNA, 467 bp, Zea Mays
caaacgtggaacaaatttgccggcgctttattgatgaaagaagaagcaagcttagcaggttgattgctgataaactggggtggtccagtttcagtggattctggttagcaatggatccaagtgtgcgtcgacacatgacaagggaaaagactgaaactatactgaaagttctagtgaaacaattctttatagagaaagaagttacatcaaccttggtaattgactcactgtatagtggacttaaggcacttgaataccagagcaagaacaaaaagggcatacctaaactaacagagacagatgctcggagcactccaatggtacttattgatcaggatatgtttgttttggctgatgatgtgatacttctgcttgaaagagctgcattggacacactgccacaccaaccattgcccacgaaggatgataaaagttcacaaaaccgcacgaagatgctgttgttatag

SEQ ID NO: 2943 - DNA, 2859 bp, Zea Mays
caaacgtggaacaaatttgccggcgctttattgatgaaagaagaagcaagcttagcaggttgattgctgataaactggggtggtccagtttcagtggattctggttagcaatggatccaagtgtgcgtcgacacatgacaagggaaaagactgaaactatactgaaagttctagtgaaacaattctttatagagaaagaagttacatcaaccttggtaattgactcactgtatagtggacttaaggcacttgaataccagagcaagaacaaaaagggcatacctaaactaacagagacagatgctcggagcactccaatggtacttattgatcaggatatgtttgttttggctgatgatgtgatacttctgcttgaaagagctgcattggacacactgccacaccaaccattgcccacgaaggatgataaaagttcacaaaaccgcacgaagccgaatagaagtggcacatcaagaggctgtggctttgaagcgccaagaggaactcattcgtgaagaggaagcagctgggctagctgaaattgaacttaaggcaaagcgtagtgctgctgaaaaggaaaaacgtgccaagaaaaaacaggcaaaacagaagaaaaatagtcgaagaagtaataaagggaagagtggcaagtctgacatcaataaggaaatacttatgtacagcagtccttcaggtgatagaatcctggatgatttttctggacaaacggaagaaatgtcctcaaatgctgacaaccctgaagaagtttctgatatatctgacagcagagacgataattcagatgcgcttcatgttgatattgaagaccgtgaaagtagccctgttaattgggagacagatgcttcagaaactcaagctactgtgcctggaagtagtgaggtgcaaaatgaccatgcagggaagaggacctctactgtagatgatagctcatcgacttgttcatcagactcagtcccttcagttatcgtgaatggatcatatacaggaggtgcctggacaagcgtcagatccttatccaataggggaaacaaccggaggaataaggatactgaagcacgggcagcacttgcacaaggtggatcaagttcagcgcataatggttttataggatctggcggcagtgcctctggccactcaaaggaaagatacgaacctgaggatgataaagttgtcatgcagaggaagcaacatgcacggcacattgatgtcattagcccctctaagtcaagaatggcagtgtcttcattttcttctgtgagccctgttaagaagcaacctaacttgtctcatcagccaaaatttttgctagaaagcaccaatagttcaaatcaccgtgcaagcgaagtttcaggcgccgtgactgccactacaacagcaggttcttgtaccatcaaaatctgaagcgcagaaacaggcttccctaactggcagcgcaagcactcaggtcgtttcggtatcaaggcccttgagtgccccgcaagtccctgcagcaaaacaaagtgtgccagccacaacagctcagaacgcacctcttctttctcgctcagtgagtgctgttgggcggttaggaaatgagccctccgccaatgctcctagcttcattccccggtcacgaacctatcgcaatgccatgatggagaaaagttctggtggcgtaagcagtctcacacatcagcaaggttcatctgagcaggccgtcgcaccatcccaatcgatgtttacatcgcagccttccattctgtcatcggagaccttgtctatgaaagaggaaacgtcgttgagacctgggtttacatttggaaccgtaaagcccgagtcactgaacccttaccagggcagagaagagaactcactgcaagcgagcagcagcagcagcagtgactgtacgccatcgagttcgaacatcagaagtgagatcgcgaagctcagtttgaacggaagatcacggagcaagcaactcctgtctgaaatctctaccagatttactccctaccagccacaaggcttggtagctgacgagttcccacacctggacatcatcaacgacctgctggatgaggagcagagtgacaggagaagggttcttcagcctggtttcgtccagcaattctctgtgcataacggcgtcagcgcgcctgattatggcttgttcagtgagccgtacctgttcgaccggtccgagcagtactttgacgaggagcctccaaggttctacagtccattgagcagcgctcctcggaggatgagggaccggagctactcgcacttcgatctcccttcatactccaggagcagccagcttgatggtctattgatgagccagtggccgccatacagccgcgccgacctcgccatgcctggttttgggtcagacacaggtggctactcctatcagccgcagggtttcccgagtccagcgagtgcagcaagcagatacccgtcgtatcgccctgccaatgggcattgagagttttagcgattgcaattggtaataatgtgtggtggagtccatgctgctcgcttctgagctgagtgtaattgtaatagtccccccatagcagtgatataaagaatggttcctctgttttattcaatccatagttatatcatttgcctctctttttctatagttcagttttgctcagtggcaataaatctcggctaaaatgatctggacaatctaggctcagttttccctagttttgctgagtggccatagaatttgaggattcttttgggacgcaggaatttcacaaaaatggtatatgaattttatagtaattagtgtaaaaacataggaacaatgtaggatttagaaaattttcctttggaacaaag

SEQ ID NO: 2944 - DNA, 684 bp, Zea Mays
aaaaccaggccgcacgagcacactctctcctctcgctcgcgtccgcacaaatcccgtgctcccccgtctgaaaaccctccccacctccggcggcggcggcggcgctggcgaccgggtgtcttctccggcgagtctcccccctagtaacaagaaaatatggatgtacctgttgatgaccctgtggagaacctcactggaagtcctagtacccttggcaatgaggaagaagccactacttatgctaatgtgcaagatcagtccaaggaagaaccagaaaagctttacgaggaacccaaagacccaatgcaagacgagttgggtaaccaagggcatgtgagcatgaacaatgaagatgtgggaggccagaacaaagtggaccaagctacccccacagagcacggcgaggaagctggggtgaagcagcatgatgctacagttcctgatgacaagaaatggcctgggtggcctggagagagtgtgttccgtatactggttcctaccacaaaggtgggtgccgtcattgggcgcaaaggggatttcatcaagaaaatgtgtgaggaatcaagagcccgcatcaaggttcttgagggaccaccagctgtgccagaaagagctgttcttactgctgtctaaggcctcaagttgagtcatttgtgtatccaaatcccaaaatagatgtacaat

SEQ ID NO: 2945 - DNA, 1278 bp, Zea Mays
aaaaccaggccgcacgagcacactctctcctctcgctcgcgtccgcacaaatcccgtgctcccccgtctgaaaaccctccccacctccggcggcggcggcggcgctggcgaccgggtgtcttctccggcgagtctcccccctagtaacaagaaaatatggatgtacctgttgatgaccctgtggagaacctcactggaagtcctagtacccttggcaatgaggaagaagccactacttatgctaatgtgcaagatcagtccaaggaagaaccagaaaagctttacgaggaacccaaagacccaatgcaagacgagttgggtaaccaagggcatgtgagcatgaacaatgaagatgtgggaggccagaacaaagtggaccaagctaccccctcctccgtcaccctggggtcatccaccaccaaaccttcctcctggtggcccaggttatgttgggaacccacactacatgcctccacggccacaagagaactattatcctcctcccgatgtgccccctgtagaaaagcagccacactatggaatttcttcatatggacgagatgcacctccaagtgctcccccagggaatcaaaaccaagcacatgggtcatctcaggtgacacacagcatgcaagttcctctttcctatgctgatgctgtgataggggcagctggtgccagtatcagctacatccgcaggcatagtggagcaactataagtattcaagaaggcgctcctggcgagatgacagtggagattacaggaagtgcttcacaagtacagactgctcaacagctaatcaagggaccaccagccccaggtccacacggtcaaccagtggacacgggttacggctcgtacccaccttacggtggagcatcctatgggtctcctccaggtgctccagctccagcgcctcacaacggtggaagttatggtgctgcaccatactcgtcgagctatggatactaatccggagcaagagcttgcctcagacttagggaaggagggttatcgttatggttttgtttgctagtctattcatctgttgagaactcaagattgttattgttaggacgtgtgaactttggtgttctaggctgctttcagacgccagtgtcgatatactctctttgctttattgttgcggaatttatcgtaatatgttattttaatgttcaagaaaaaaccaacaaaaaaaaacatctataattccaatgctatttttttctgtgcggacattgaaaagaaacttgctttataaagctgttttcagc

SEQ ID NO: 2946 - DNA, 991 bp, Zea Mays
caacaacctctcccaaaagatctccagttggtcgagcccctgccctatattagcaagccaaactctgggcgccctccctcgtccatcctgtaccaccaccgtcgtgatcggagcacgaaaccaagccgagcgaacaccagtcatcaagcgggcgagtcgtcgtgaaagagagaggcgccgccgtgggtgggatcgccgattcgttgatgttgggaatcccggtgcgagcctgggagcgtcaagaaaggcttgaggaatctgcagggcgtgtcgtcgcgcggggagattgtcctgaccccgggaaattcctctccggggatcggtatcgcggcttagccgccgtgtgccggcgatgcgagtctgcgcttcatggctgtcgaagtgtggtggcgagaaatctgaagacccacttggtgaagcacctggaatcgcaagtataaggttaacttgattggaggctcgatctaggaagaagctataaggcagaataatcgatgtcgattagaggctagaatcggcactaaagttaagaatttagtaccagttggttgatagaacatatacttaatatagtagtaccgatttatgtatgaaactattattaaatccttaactttagtaccggttctaaacaccaatggtactaaacccaatggcaggtgcaaccggtaatgaaccttccattaatttttgtgccttccattaatttttataccggtttttggctacaacccatactattcttgccatggccgtagacagcctccatgagtccatgggtttaattcttgcctccacgggctttattctttgtataagatataatgttcatattttcataacagacaacataaaataatgttgagaagatacatacaatcaaaaaccaacatagttcataacattcatcgcatcgtagttcacaacctagcctagagctcacaatcactaaatagttcaactcatatttcacattcactacattgttcac

SEQ ID NO: 2947 - DNA, 3470 bp, Zea Mays
ggacaggatttccagttttccacactaatatacttgcaaactagacatattcaagtgtgtggttacagaggcttcgtcaggctcaggcttaaataaagctgcacaaaattttcaaaagcattccaggtcctaataagtgtctacaagtacaaaaggcaaaaaggcgtccaacccagcacggcagataaaacaaacaggtatctcacgcattgggccaaccctccacatgtaccgcctaccagcccaaatgtagtacacatgaaaaaaagggaaaagctaacaacaaaaccacccccagcacacaaaagcacaaaacccagtgcagtacaaaggcaacaaaaaagcccagtgcagtacacaaccccccagtcgccagccctccagccagccacaagcagccccaacacaaaaccacaaaaccccagccgccagccctccaccccagtcgccagccctctccagaaaaaaaagaacagaacgttcaatgtctatgaggattcaaagaacatgatgatgacagaggaagatgaaagaggcaaagaaattgaaaagattcatgttgatggtactaacaagtttgtcactgaagacaacatattctcagaagatgaaattaccaatttttagcatcatatattggagataattggaagtactcagatggctggaagccgttttactcaaaatggatcaagcagtactcagatatacgcacaaatgacgctgccatatgtttcaaaccagggtggatacatggatctgatgatggaacagatacgtaactcgcaaggagaatcagtgagtgaactaggcaatgaaatgcaaagtgccctatgcacacaaaatgaaaccatgaacaaaaacctactagtggccccatgtgagacatacacacaaatgattcttgaggaggactcaatgcttgcaaatgcagacatatccaaggttggatacatggatctgatgatggaacaaatatataactcgcaaggagaatcagtgagtgaagtaggcaatgaaatgcaaagtggcctatgcacacaaaatgaaacaatgaacaacaacctactaggagaaccatgtgagacatacacacagatgattcttgaggaggactccctgcttgcaagtgcagacatatccaaggagatatttggggaatgcaatgaagctgatacatctaaatatggggaagcagtataccacagggatctctttgagataatgcatgtacaacaactaactgaatgtgcgcaaaatgatgatggaaaagaaactaaaacatcgagtgctagtgcaaactttgatgatgcagatgctgaaacaacaaatgcaggagatgaagagttaacagaggatcagattgatgccttcattatgagtgagcagatagctacaacagaagggaacaatgcatcaatagacagcaaatacacacctcaagttgggatggaatttaagaccaggggagatgcagagcacttcttattcttctatggttttttggctggttttaaaccagcaatcacccacagtttcaggacttccaacaaaaaaagaagcaatgaagtaacaaaagtggagttgaaatgtaacaaacatggcaaaacaaaaaagacaaaccagcaggaacaagatatttgcatagaaaaaaagcgctgcgagaaaggcccaaaaaggaatacaaatgtccaagttaaaacagattgcagagtattcatggttataaaggaacatggacaaaaatgggtgatcgataagttagacttggaacataatcatgagctcagaccagcagacagcaacaacatgtttagtgggcataagtacatgacagatatggaaaaaggaattataagaacattgaaccacaacaacatacctacacggaagatgatagctatattgtcttatctgagaggaggaatgccagaggactttgaggacatagttaactattcactaactgtatctgaatttgagagggactggaagcaaatggttgaggactaccatctagaaaacaacaagtatttcagcaaaatgtgggaaacaagagccaggttcataccggtatatttcaaaaatgacttcttcccattcttgcaaagcacaggtagaagcgagggaacaaactcaaggtttaaagacaatgtgacttcgacttatagtgtgatcagcttcttgcgtgagtaccaaaggattgtggagcaagtgaatgtgtcggaggagtatgaggataatgaaagcaatcgtaaacgtccaaaagaactaatgtttggatatacaatagagaggcaagcacaagaagtctacaatagaaacatattcaagaaattccagttccagttgcaatcaacaccaaggctaagttacagcagaacatctaatctgcatactttcgaggtgtatccaaaatcaaaccaagaagaaaagccacataaattaaggaggtaccttgttatggctaacctaacatatggaatggaagagttcacttgtgtatgtggcaagtttgacaaggatggcattttatgctcccatatacttaaagtgatcattgaagaagggctcacgaaaatcccagagcaatacatactgaacaggtggaagaaaaaacagaaacaaatagatggaccactgttgcgtgcatcaatgccaacccacccagtgctaagacacaacctattgagccggaaagtagcattactcacatcagcagcagcaaaaacagagaaaactatggagtttatatgtgaagaattagacaaactacaagaaaaggtttgccaaatgctatcatctgaagaagatgtaatagcaggaccttcgacaggacgagagaaggaagacaatgctgcaaaacatacaggaccagtagttgaaaatctgcataaccctgaagcagttaaacagaaaggaaggccaaaaaaacctacaaggttaaagccactagtggaggaaatccacatcaagatgaagaaggcagagcaaaagaaaaacaagaaaacaagcaatgcagcagcaagcccacaaggaaaggagaagaagaagatgaaaagaacagcaccttgaagaattgctgctcccccctcctaacagaaccaccaacactcacactgaaaaaagatgcagaaaaaatagagagaaaaatgaagaacacttagtggagaaaggggaagggatggactgtgcaattatgatatattcatatagttggtgcaaacaggaaaaaaagtttgtttttctttcagttgagtcatgtaatcgcttgcaaaaacaaagtgttgaaaaacagatcatgcttgcctgattagatccatcgcatcagcccatacatgtaccgcatagctagcttatctggtattgggtcgtgctccattggctaggcccaccaacaatgatttacacactttataccgcaaaaacattatttagctgccacagattccaatctacttgagtttatg

SEQ ID NO: 2948 - DNA, 3077 bp, Zea Mays
ggacaggatttccagttttccacactaatatacttgcaaactagacatattcaagtgtgtggttacagaggcttcgtcaggctcaggcttaaataaagctgcacaaaattttcaaaagcattccaggtcctaataagtgtctacaagtacaaaaggcaaaaaggcgtccaacccagcacggcagataaaacaaacaggtatctcacgcattgggccaaccctccacatgtaccgcctaccagcccaaatgtagtacacatgaaaaaaagggaaaagctaacaacaaaaccacccccagcacacaaaagcacaaaacccagtgcagtacaaaggcaacaaaaaagcccagtgcagtacacaaccccccagtcgccagccctccagccagccacaagcagccccaacacaaaaccacaaaaccccagccgccagccctccaccccagtcgccagccctctccagaaaaaaaagaacagaacgttcaatgtctatgaggattcaaagaacatgatgatgacagaggaagatgaaagaggcaaagaaattgaaaaggttggatacatggatctgatgatggaacaaatatataactcgcaaggagaatcagtgagtgaagtaggcaatgaaatgcaaagtggcctatgcacacaaaatgaaacaatgaacaacaacctactaggagaaccatgtgagacatacacacagatgattcttgaggaggactccctgcttgcaagtgcagacatatccaaggagatatttggggaatgcaatgaagctgatacatctaaatatggggaagcagtataccacagggatctctttgagataatgcatgtacaacaactaactgaatgtgcgcaaaatgatgatggaaaagaaactaaaacatcgagtgctagtgcaaactttgatgatgcagatgctgaaacaacaaatgcaggagatgaagagttaacagaggatcagattgatgccttcattatgagtgagcagatagctacaacagaagggaacaatgcatcaatagacagcaaatacacacctcaagttgggatggaatttaagaccaggggagatgcagagcacttcttattcttctatggttttttggctggttttaaaccagcaatcacccacagtttcaggacttccaacaaaaaaagaagcaatgaagtaacaaaagtggagttgaaatgtaacaaacatggcaaaacaaaaaagacaaaccagcaggaacaagatatttgcatagaaaaaaagcgctgcgagaaaggcccaaaaaggaatacaaatgtccaagttaaaacagattgcagagtattcatggttataaaggaacatggacaaaaatgggtgatcgataagttagacttggaacataatcatgagctcagaccagcagacagcaacaacatgtttagtgggcataagtacatgacagatatggaaaaaggaattataagaacattgaaccacaacaacatacctacacggaagatgatagctatattgtcttatctgagaggaggaatgccagaggactttgaggacatagttaactattcactaactgtatctgaatttgagagggactggaagcaaatggttgaggactaccatctagaaaacaacaagtatttcagcaaaatgtgggaaacaagagccaggttcataccggtatatttcaaaaatgacttcttcccattcttgcaaagcacaggtagaagcgagggaacaaactcaaggtttaaagacaatgtgacttcgacttatagtgtgatcagcttcttgcgtgagtaccaaaggattgtggagcaagtgaatgtgtcggaggagtatgaggataatgaaagcaatcgtaaacgtccaaaagaactaatgtttggatatacaatagagaggcaagcacaagaagtctacaatagaaacatattcaagaaattccagttccagttgcaatcaacaccaaggctaagttacagcagaacatctaatctgcatactttcgaggtgtatccaaaatcaaaccaagaagaaaagccacataaattaaggaggtaccttgttatggctaacctaacatatggaatggaagagttcacttgtgtatgtggcaagtttgacaaggatggcattttatgctcccatatacttaaagtgatcattgaagaagggctcacgaaaatcccagagcaatacatactgaacaggtggaagaaaaaacagaaacaaatagatggaccactgttgcgtgcatcaatgccaacccacccagtgctaagacacaacctattgagccggaaagtagcattactcacatcagcagcagcaaaaacagagaaaactatggagtttatatgtgaagaattagacaaactacaagaaaaggtttgccaaatgctatcatctgaagaagatgtaatagcaggaccttcgacaggacgagagaaggaagacaatgctgcaaaacatacaggaccagtagttgaaaatctgcataaccctgaagcagttaaacagaaaggaaggccaaaaaaacctacaaggttaaagccactagtggaggaaatccacatcaagatgaagaaggcagagcaaaagaaaaacaagaaaacaagcaatgcagcagcaagcccacaaggaaaggagaagaagaagatgaaaagaacagcaccttgaagaattgctgctcccccctcctaacagaaccaccaacactcacactgaaaaaagatgcagaaaaaatagagagaaaaatgaagaacacttagtggagaaaggggaagggatggactgtgcaattatgatatattcatatagttggtgcaaacaggaaaaaaagtttgtttttctttcagttgagtcatgtaatcgcttgcaaaaacaaagtgttgaaaaacagatcatgcttgcctgattagatccatcgcatcagcccatacatgtaccgcatagctagcttatctggtattgggtcgtgctccattggctaggcccaccaacaatgatttacacactttataccgcaaaaacattatttagctgccacagattccaatctacttgagtttatg

SEQ ID NO: 2949 - DNA, 2900 bp, Zea Mays
ctccagccagccacaagcagccccaacacaaaaccacaaaaccccagccgccagccctccaccccagtcgccagccctctccagaaaaaaaagaacagaacgttcaatgtctatgaggattcaaagaacatgatgatgacagaggaagatgaaagaggcaaagaaattgaaaagggtggatacatggatctgatgatggaacagatacgtaactcgcaaggagaatcagtgagtgaactaggcaatgaaatgcaaagtgccctatgcacacaaaatgaaaccatgaacaaaaacctactagtggccccatgtgagacatacacacaaatgattcttgaggaggactcaatgcttgcaaatgcagacatatccaaggttggatacatggatctgatgatggaacaaatatataactcgcaaggagaatcagtgagtgaagtaggcaatgaaatgcaaagtggcctatgcacacaaaatgaaacaatgaacaacaacctactaggagaaccatgtgagacatacacacagatgattcttgaggaggactccctgcttgcaagtgcagacatatccaaggagatatttggggaatgcaatgaagctgatacatctaaatatggggaagcagtataccacagggatctctttgagataatgcatgtacaacaactaactgaatgtgcgcaaaatgatgatggaaaagaaactaaaacatcgagtgctagtgcaaactttgatgatgcagatgctgaaacaacaaatgcaggagatgaagagttaacagaggatcagattgatgccttcattatgagtgagcagatagctacaacagaagggaacaatgcatcaatagacagcaaatacacacctcaagttgggatggaatttaagaccaggggagatgcagagcacttcttattcttctatggttttttggctggttttaaaccagcaatcacccacagtttcaggacttccaacaaaaaaagaagcaatgaagtaacaaaagtggagttgaaatgtaacaaacatggcaaaacaaaaaagacaaaccagcaggaacaagatatttgcatagaaaaaaagcgctgcgagaaaggcccaaaaaggaatacaaatgtccaagttaaaacagattgcagagtattcatggttataaaggaacatggacaaaaatgggtgatcgataagttagacttggaacataatcatgagctcagaccagcagacagcaacaacatgtttagtgggcataagtacatgacagatatggaaaaaggaattataagaacattgaaccacaacaacatacctacacggaagatgatagctatattgtcttatctgagaggaggaatgccagaggactttgaggacatagttaactattcactaactgtatctgaatttgagagggactggaagcaaatggttgaggactaccatctagaaaacaacaagtatttcagcaaaatgtgggaaacaagagccaggttcataccggtatatttcaaaaatgacttcttcccattcttgcaaagcacaggtagaagcgagggaacaaactcaaggtttaaagacaatgtgacttcgacttatagtgtgatcagcttcttgcgtgagtaccaaaggattgtggagcaagtgaatgtgtcggaggagtatgaggataatgaaagcaatcgtaaacgtccaaaagaactaatgtttggatatacaatagagaggcaagcacaagaagtctacaatagaaacatattcaagaaattccagttccagttgcaatcaacaccaaggctaagttacagcagaacatctaatctgcatactttcgaggtgtatccaaaatcaaaccaagaagaaaagccacataaattaaggaggtaccttgttatggctaacctaacatatggaatggaagagttcacttgtgtatgtggcaagtttgacaaggatggcattttatgctcccatatacttaaagtgatcattgaagaagggctcacgaaaatcccagagcaatacatactgaacaggtggaagaaaaaacagaaacaaatagatggaccactgttgcgtgcatcaatgccaacccacccagtgctaagacacaacctattgagccggaaagtagcattactcacatcagcagcagcaaaaacagagaaaactatggagtttatatgtgaagaattagacaaactacaagaaaaggtttgccaaatgctatcatctgaagaagatgtaatagcaggaccttcgacaggacgagagaaggaagacaatgctgcaaaacatacaggaccagtagttgaaaatctgcataaccctgaagcagttaaacagaaaggaaggccaaaaaaacctacaaggttaaagccactagtggaggaaatccacatcaagatgaagaaggcagagcaaaagaaaaacaagaaaacaagcaatgcagcagcaagcccacaaggaaaggagaagaagaagatgaaaagaacagcaccttgaagaattgctgctcccccctcctaacagaaccaccaacactcacactgaaaaaagatgcagaaaaaatagagagaaaaatgaagaacacttagtggagaaaggggaagggatggactgtgcaattatgatatattcatatagttggtgcaaacaggaaaaaaagtttgtttttctttcagttgagtcatgtaatcgcttgcaaaaacaaagtgttgaaaaacagatcatgcttgcctgattagatccatcgcatcagcccatacatgtaccgcatagctagcttatctggtattgggtcgtgctccattggctaggcccaccaacaatgatttacacactttataccgcaaaaacattatttagctgccacagattccaatctacttgagtttatg

SEQ ID NO: 2950 - DNA, 2140 bp, Zea Mays
cagctccttatccttatccgccgtgggattttttttggccgtcgccccagcctgtcttccacctccatctctccctcgtggccatggtgagctcccctgcgacgcgcctccacgtcacaggccagctcggcctcctccctagcaccgtcccatttcctccctgcaccggatcccctttcccctgcgtgccggactttcctccactcctccatccatggctctctgctgcttttactccctcccctgttcgcccatggaagtcgcgcccttgccaagctccctccgcgccgtggtgctccagctcggcctgcttcccagctcgctcggccgaagcgccctgctcgccctcctgcgtcgcgccctggccccttctctgcgcgctcctccaagccggcgtcctctgcacgccatggccgccgcgccccgggtcgcatgctccaccgtgccgagctccctagcgcttgccctgccctctgccatggacgtcgtcggccttgactccctctggctgcggcatccgtcttgctccctgctccgaccaatccgcctaggttcgaccatggcacgccgcggccgtgtggaaatgtggcggatcgaggaaagccttcgtgttctccctgctctgcgatgccgaggtccctcccttggttgtgctcagctccagctccgtgccttgtccctggttgcgcgcgtgctcgccagtctttcctgtgcgcgctccacctcgtccatggcgtcgcggccttcttgcccgccagcacgccctctcggttcgctcggcctcaatctccatcgcgccgcgctcctccccctgtccctgctacactgtcggcaactccctgtttcccctcaatctccatcgcgccgcgctcctccccctgtccctgctacactgtcggcaactccctgtttccctggtgtcgcgcgcgctcttggtccttgcgagtccaccttggtccgccagcgacacccgtgtcggctctgtaatgcttgtacgcgtctgtccacgtcgctggcagctcggtctctacgtgtgtcttcctcgacatctcgacaccggaactccatcatgtctgtatgtgtgtggaagaatggagtcgatggagaagaaagcgaagcccgtgtggttcttgcgttcatctggtgtggaattggagctatggttgaagaagaaaatgaagtccgaaagcgacgcttgtcatgaacctcgtcgtcgacccacgttgtatccacgacgtgctcgtcgactccgatgatctgttttccaattgcgtgctgcctacgtcgattttcagaactccttgtcgtgctcgaccctattgtcgtcgttccgtgcgtcatcaagaaattccaagagtcaggtgaagacgaagctaatagtgtgatgttcacaagtgctcgacgcaagggccgaaccggaatccttgccgtgttcacgtatagcgcgtcagatttagttatgggtgcgctagttgagcatgtgatacggaatacaagccaagtcgaccccaagatgacgtaacgggtggactactccgcatagtgaagctgatggacgaacctaaagatggataacctgatcaagtgccaggacaaaggatggtcgtcaagtgatcaacgtctaacaaacactaatgtagtgtttattctaggcaagccccggtgcattatccctttccttgtgttttaaaatctttatcaccttgtttgatgcattaggtgataggagttgtgtgctaaacagttgatgcatttccttctttgaaaaattgattacccttccttgatacccttttatgaaaaggatttttatgatgcttagccttgctttagtaaaacaaaatgttttgttttaaaacaaaaggtgatgcttcacggtggatgggaatttttacaaagaaaaacttgtgatgatggatccatcagggccttgatgggttcaacatctgaaaagatgtacctctgccaggtaccaaactttgggtttaaaataataaagctgagaccgggtaggtgacttgcatgagaagggagtctcggtgtagtgtccccgtctgagtcacttaaggaccgtgctgaccgaggactctttaactggtcacatgccttgtcttgggtaagctctgcctcgagcagacca

SEQ ID NO: 2951 - DNA, 9707 bp, Zea Mays
attaattcctccccatcacggtccaactagggcggtggcggctggattcatatctctcctcaactttggatgcttggttgcctgattggttggatggccgtgagatgtgggacctagggacgttcttccttcctagccattttgggaaattcagatgataataatataatatggggttgttaagaagcttttttattcacaaaaatatgtaaaagaaggagttcatcaagcagtttgctgagatttcatcaataaaccaacgaattttgttatccggtccagcaggttctgagatttatcaggaaaattggtaaaggcacttgcgaaacattttggtgctagacttcttgtcgtggattcacttttgctaccttgggtaagctcataatgtatatttatttacccgctcatgaacattcagaagctaagaaactttgaattattgcacgttctattacaattttcctatactgaacatgagacttctcataggcaacccagttatgagcttgcttttgtattgactatcctgtgaaatcagatattctttccccatatcacatttttttgtagcaccatattagtccaatacatatatttgtttatataaattgcttgattgatctccaggggaccaagttatggttatcgaggcagagtgaagcactagatctaaggtgtgtttgaatgcactagatctaatatgtagttggctaaaaaattactagtagagttagctagctaacaaatagatatctaactattagctaatttgcaaaaagtagctaatagttgaattaatagttatgttgtttggatgtctttagctaattttaacagctaactattagttctagtgcattcaaacacccctccctaaatgcatttcatcttgcatttgcatacttctctcaggtcaacagacttgacacgaaggagcagtgtgtatgttcataggagctgttgttctggacatggttttggagtctgtagcagctttagaacattcgcacacctgattgcgatgaattcgtagaaatgcttttaaaacttgattactggtctaaactggctaggccccgtccgaatgtcatcacataacaacagtatggtggccaaatcacaagcttttacacgtatagtatagtgtgtttcatctttacaagatcctttcccttttccttttcacccatatcaccccaacccacctacgctacattacatttcctgctataccaacaatctgtatacaattgaaaaactacaggctactacaacccaatgcttcctttcaggcacatatgtaacacatatataatcatctgaggtactctcttccgttccaaattataaaacgttttgggtatatatctaaacacatatcttatatttagtatagcaaaggccatggatttagaaaaaccaaaaaggtacatgcatctgttggcttgcttttgtattgactatcctgtgaaatcagatattcttttcccatatcacattttttgtagcaccatatctgttgatgagttgactaaagaacatgaggagctaaagtgctcccatgttgatttggcccaaaggtatgaaactatttcaattgagcttgataactctttacattgtatcgctcaattagtaaataggaatgccttgcttaaggaccaagtagaaaagctaaaagttgaaaatctagcttttcaagaaaaatatgatatgcttctatgttctcatgaaaatcttatggataatcatatcatgttaaatattgctcatgaggttgtgatagaaaacttaaaatcctaacaacctcactcatgcacatgtattcaaattaaaactattttaccatgtgctaatgcttgttgtccgtcgacaagcaaatcctcctttgagctagaatttctaggaacaaaagatgatacatgtcaagagctcaaagaagaaaatgcgaggctaaaaatgagcttgacacaactaaaagggaagtgcactgctcaaccttctcaagataaccgtgatcacatggtgaagaagcttgagatgggaacaaccgtggcatgcactaaatcccttgaagaaaatgtcaaggacttgaggattgccaagaggaaggaacaaaagaagaaaatcaatacctctgccaaaagcctcaaccgtgcctccatgcaagatcaagccacacttcacactaagagaagtaaaaagtgtagtgaatgatttgaaaagggacactcgattaggtcatgtccctatattaaaaatggcttgattattaacaaggatgataaactttgttttaaatgctcaaagaaaggacacttaataaagtcttgtccctatttgaaacaaaaaggcatagtgttagaaaagaaagtattaactaaccatgtagcaagcaagaaacaaggaaagaagaaatcttcaagacttgaagatcgcctttgctacatatgtcaaaagaagggacatcaatgcaaggattgtcccattggtaactatctcacttctagcttgtcaattatttcacatgtaactaggcaacccaaaattgcaacttgtgatagaaaggtaatgagtttaccacgtgctaacacaaaggacttttgagttcctagatctttgttgactaaccttgatggacccatcaagagatgggtaccaaaatatgcttgacaagctttgcaggagaaggagatgatatgaagctttggggtgcttgagagagtcaattcaatccttattaactcaagctatcaatcttacaaatgatcaatatatccaagattgacccaaagttattttgaattggtatatctaaaactcatatcatctcgaggaagatattaatgttgtaggaaataaagaattatcctgtgcggaaaatcaaggcctacaacatggaggaaagccaaaggatggtaacatttatgcctttaagtgcaagtatcttaaattatcatttcttatgtgtcttgtgtagtcacatagaaaaaggaagcgcttcaaatgttttcaaattatgtcaccattctttgaagaaattcctctcatatggtagattgcatattcatcatttctatactatggcaatctacatgctttaaattattgtaagtacgtcatggcatgtcttacactaattatcatattatagccatgttctagatatagagagatattccaagttcttaaaagaataaggtgtcatgtaaggaatccaaatccttaggacacttataaagggaatctctctttatatctagaatcgtgagactaatgtttttgtctaaataatctaaatagtctcacatgtagagaataagtttctctatgaaaatgtgtaatccaacatgtcaaagaaaatcaatccaatgctttatgttgtatttcttcttgcttaaattggatatgattcttctacattcatcgctccccatgttatgaattagatttgttcccataaccttaaagaattaactatgcttgttttataagttaaaactaagcatacatcatggaataatctagttcatattataaagtttccatgctttagtaatccacttttcattccgtatcaaaatgattacaaaaagagaaactagtgcttgtgttactaatgacatatctcttgagcttacttatggaaatctacaagagagtaagtgcaagccacaagcctcaagggttgctcttcacccaaaggaagaaaggtaaaagcaaaggtatgggaactcatcttcttatcaaatatagttcccatcaatggttatttactctaaattatcatattctacctatgtgaagaataaattctttattggacttaaatcagctagatgtgcattcaatctcgttctcataaatgcacttgcccattagaatctaattcatgcatctgctatatctgttctcatattgatatgctttaaagttatgataataaattcaatatgaaagaagtaaatttcctatgattgatcaaaatgtttaaaaggtgcgtattcctcttttataatgatatgcactaatgctaaggattttacttcatgtctgtgtgacgaatggatgatgaattgtttatatttcttaataaaatcatccttcataatatactcccttgtgctattaacatctttcttgagtattttcaataagtttggaaggaaaaagagacaactacaaagggatgacactcaaatgaaagaagaagacatcaagaacaacaacacctacttggacaataaggtcttcaaaacaatcaatggtgtggttgtaagcattctaaatctttttcattatgagaacactaggcataagttgtttattgcaaattttataagccttgatcaagatgaataatgtttctccctatttgtctttaagaatgcatatctttagggggagcctatttctatatcttgattatgttgagactaacactttatcttagcaatctcatatagtctcaagtatgagaacaagtttctcatgaagtatgctactacatttcaatccaacttggtaaagtaatgtcatctttatcaaaaattgtaactttcactgttaaagtagcatatttactggattctcctggtttaagcttgtttgataaactaatgcatatgttgttcttttgatcgcatatgttatttgcttgatcattgaataacttcaattatcacttatgtttcttagtgcctcatataatttcaatcgatatctctcttgatatgcactaagttaaaaggagaattcatgatacatttatgcaatttgtgatctacttgatatataataacaatgacttagaaaaggatcactagttgtagaaccctctcttgtgcaaaatatttccatacactatcttgaatataggtcttaagtaactaagactaaggacaaagcacaatgaagagagcatctctatgtgaaggtacaaaagggtaaactacttcctctcatttacacatgtacctaaatcttcctcttctatacattccttgcatatcttgtataaaaggaagagaaagcatgtctatgcatatccctgcttcatacctagtttaacctctcaaaaatttcattcctgcatttatgcatttttgttaaaactaggtgaagtgattttattgtcaaagatcttaaagcttaaccttgtaacgaggataagctacctttgtttcaaaggtggagggtccttaagtctctttgaaatcctgaagggtaattgcttaaaatgtttccaacatgctttcataagtgcataatctatcgtgagcatcacacttatgacacactgcacttcacagtttctatgatatagatatgttctcattaacctaattatgtgcacttggcatttaaggccaaaatctgtattcctctcaaggcacatatttagggggagcaatctatattatatagaactatttacgcttaattgacacatcctcttaatcatgtctctttcctttggtacatttgcatatttcctatctatcttgtgccaaggctaagactaatatgcttccatgagtatcttgtgtattaagtcttagattgaatgggaaatggagtattcggcaaagacatcgcttccactctacaccatcggtattatctacctttttgccgatattccgccatctctcaaaattggtataatctctcattcatacttacttgtaccaatgcgggagaaagtaaaaagggctctaaagactccgtttttggcgattaatgccaaagggggagagagtattagcccaaagcacaaggaccgcaccaccacgccaatttccaaattttttgaaacaaagttgttttcaattggtatctttgaaattagtattcctataagaaattctatctcaattgatatctatatcttaaagaggagtttttcaaattttggtatctaagatatttgatcttctttcaatttgtaaaacccctcttgaacctaagagggagttttgtttagtcaaaggaaaagcatttgaaacagggggaattttttttcaaatcttgaaaatgcttctcgaaatcttattcatatacctttgactatttgcaaaaagactttgaaaaagaatttccaaaaacatttgcaaaaacaaaacaagtggtgcaagcgtggtccaaaattttaaagaaagcaattcatgcatatattatgaaagtataaattggtttaattccaagcaacctttgcacttaccttatgcaaactagttcaattctgcacttatatatttgctttggtttgtgttggcaatcaatcaccaaaaagggggagattgaaagggaaatagggtcaaaccttttcctaaatgattttggtggttgaattgcccaacacaaataattgaactaactagtttgctctagattatacattctacaggtgccaaaggttcaacacaaaccaataaaaagaacaagttagggttcaaaagaaatgagcaaaaaggaaactgaagtgttccatggtctggcgcaccgcactgtccggtgcaccaggggtcgtacattccaaactcctcagcttcgggtttcccaggcacagctccgctttaattcaccggactgtctggtgcaccagtggagcaatggctatctgcgcgcaatggtcaactctgatggatgaacagtgcaccacagtaacgcggcagaagtcagagcagaaggtcagaggggcaccggactgtccggtgtggcaccggactatccggtgtggcaccggactgtccggtgtgggcccggactgtctgctgccgcatgaggacaaagcctccaacggtcgaccagctccagaccctaacgacagggtgacatggcggcgcaccagacactatccgatggcgcaccggactgtccggtgtgcccatcgccagcagccttctccaacggctacaatttggttggtggctataaataccaccccaaccggccacttcaaggtgtgggagcccaagcaacattccaagtcatatagttgacatatccaagccctcccaaccacctctattcattgatccatcctatacacgagatttagaccacttcaaccaacacaagtgccacaaaagagagagcaagcaaaagaaagcttctcgtgtgagtttagcaatagtgccttgtgagattcatcgagagaaagtgtgtgctacatcttgtgttcatttctgcgtggagttttgactcccattgaacttcctcaaagttttgggaggcttgtaaagctagcaagagacacctaagagtgtggtgatccttgcggggtcttaagtgacccttgagaaaaagaagagctcgccagtcttggtgatcggtggagagagggaaagggttgaaagagactcatccttagtggactcctcaacggggactaggccttcgagggccgaacctcggtaaaacaaatcacccgtgtcccttgtgtttattgcttgtgatttgtttgttctctccctttctaagttctcttgcgctactctttgctaatattattttgtgttgcttcaagttaaattctcatttagagaagcaactccttgcaagaaagaacttgtgtttatcctcttcttatctaaagccctcttgcattattctccactaacatttctagtagtattgctattaattaaattccgcactatttgaaaataatactcgttgcaagcaatagacttagttttattctccgataattgtgaatcttgttctaaccactaatcaagggatctagcttggatttagaattataattttcaggtttcgcctatccacccccctctaggcgactttcatatatacatctcatgaggatgtggggtattacacttatgtgacctaaacctcgataaaaattcttgtgcgggctaaatgccatgtttgagtagataaccttagacaccatcagacttgtgttccgctcttcttaacaatctccttccttgtctcgtacctttggtacccaattcgtatgacgatgacatttggcatgccaggtaggcaattggtgtgttgtgaagctctactcacatggaaatggaatcaccaaccttttcgctggatggagtagtaaccactaatactcgctctagcaacttcgatcgtgagttacaacatggacgacgacgtagcccgtgatagctttgtcccctaagtgcctcatgtaggggggaatccctcagtggggtcatgacgtgattcccctgctggccctgttgagcgttgtgtccctaggtaacaccgtctttccaaggcatcatggaggatgtctcctctaatgttagagaaatcttagaaacatagtcactcaacttcataataaatcactaatgagtcaacctccaaacacaaaggttccaataggatccctcatataatcatgctcactactcactagtgccatgactttggcaccgccgatgtcattggtcccctcgatgcagcagaagtgcttttctacaatcctttggctctagacgttggagaagcagtagcataacaatggagacaatatgtcgctagactcctatccacaaccaggattaactgtaggtcttctcaccatacgcagcctcgtttagataatgttacatcaaaccatggcataccaattgcatgctctcatgccacaaacaagacctctccaatttgactgataatgacctaccttagtctttggatccatgacatgaggccccacctctacaacatcatccctgtgcctcatgtaatcgacaaggtccatggaacatagtagcaacgcgtggacctaaaaaattattaactaaaacactactgacaaactaaaaattatatcaaattcataaatatatatatacttaccaaccttttgttctttgtctttattcaaccccttcatcgttggaattaaggagtacatgagtagatagactcattcaaagtttcattgttgtggttgcttaggacactatcgtgtctgcaggaggacgaacatcatatggagaaggagcgccacatgggagagcgaatggaggagaaacatatggatgaggagcaccataagatccatatgaaggaataatatatggataccaatacgtgtatggatcagtgaaagattgaggaggaggaggagcgtcattggtaggaactcctaaagtaggagtaggaggatggtcagtgataggattttctttggtaagaggagaaacatccatggatggtgagtaagaatacgaggaaggaggatatgggtatgaaaacagagggtgtagacttatagaacaaggacgaatagaaacattctcctatggctatgtcgatgcattgaagaagatccaccccacatcagtaaaggtctatgttaggttatctccagcagcttacccatccctatctctcattttaaactctattttatagtacaaaactgtgttttgcatgatcatatgcacgatcggctgaccatagctgtcggtgtttagtgcccgaccgcacacccagggatacccttgcagtgcttttgggtaggacggtgttgttgattgtagctcgatggtttgtgcttggagcacgagagagagagagacagtcgattttctaaaggttcggccgctttgagaggcgtaataccctacttcctagggtgggtttgtatgtgtggtgtgttacaagtggcgtctcctgaatggagaagggctaat

SEQ ID NO: 2952 - DNA, 9123 bp, Zea Mays
ttttggtgctagacttcttgtcgtggattcacttttgctaccttgggggaccaagttatggttatcgaggcagagtgaagcactagatctaaggtgtgtttgaatgcactagatctaatatgtagttggctaaaaaattactagtagagttagctagctaacaaatagatatctaactattagctaatttgcaaaaagtagctaatagttgaattaatagttatgttgtttggatgtctttagctaattttaacagctaactattagttctagtgcattcaaacacccctccctaaatgcatttcatcttgcatttgcatacttctctcaggtcaacagacttgacacgaaggagcagtgtgtatgttcataggagctgttgttctggacatggttttggagtctgtagcagctttagaacattcgcacacctgattgcgatgaattcgtagaaatgcttttaaaacttgattactggtctaaactggctaggccccgtccgaatgtcatcacataacaacagtatggtggccaaatcacaagcttttacacgtatagtatagtgtgtttcatctttacaagatcctttcccttttccttttcacccatatcaccccaacccacctacgctacattacatttcctgctataccaacaatctgtatacaattgaaaaactacaggctactacaacccaatgcttcctttcaggcacatatgtaacacatatataatcatctgaggtactctcttccgttccaaattataaaacgttttgggtatatatctaaacacatatcttatatttagtatagcaaaggccatggatttagaaaaaccaaaaaggtacatgcatctgttggcttgcttttgtattgactatcctgtgaaatcagatattcttttcccatatcacattttttgtagcaccatatctgttgatgagttgactaaagaacatgaggagctaaagtgctcccatgttgatttggcccaaaggtatgaaactatttcaattgagcttgataactctttacattgtatcgctcaattagtaaataggaatgccttgcttaaggaccaagtagaaaagctaaaagttgaaaatctagcttttcaagaaaaatatgatatgcttctatgttctcatgaaaatcttatggataatcatatcatgttaaatattgctcatgaggttgtgatagaaaacttaaaatcctaacaacctcactcatgcacatgtattcaaattaaaactattttaccatgtgctaatgcttgttgtccgtcgacaagcaaatcctcctttgagctagaatttctaggaacaaaagatgatacatgtcaagagctcaaagaagaaaatgcgaggctaaaaatgagcttgacacaactaaaagggaagtgcactgctcaaccttctcaagataaccgtgatcacatggtgaagaagcttgagatgggaacaaccgtggcatgcactaaatcccttgaagaaaatgtcaaggacttgaggattgccaagaggaaggaacaaaagaagaaaatcaatacctctgccaaaagcctcaaccgtgcctccatgcaagatcaagccacacttcacactaagagaagtaaaaagtgtagtgaatgatttgaaaagggacactcgattaggtcatgtccctatattaaaaatggcttgattattaacaaggatgataaactttgttttaaatgctcaaagaaaggacacttaataaagtcttgtccctatttgaaacaaaaaggcatagtgttagaaaagaaagtattaactaaccatgtagcaagcaagaaacaaggaaagaagaaatcttcaagacttgaagatcgcctttgctacatatgtcaaaagaagggacatcaatgcaaggattgtcccattggtaactatctcacttctagcttgtcaattatttcacatgtaactaggcaacccaaaattgcaacttgtgatagaaaggtaatgagtttaccacgtgctaacacaaaggacttttgagttcctagatctttgttgactaaccttgatggacccatcaagagatgggtaccaaaatatgcttgacaagctttgcaggagaaggagatgatatgaagctttggggtgcttgagagagtcaattcaatccttattaactcaagctatcaatcttacaaatgatcaatatatccaagattgacccaaagttattttgaattggtatatctaaaactcatatcatctcgaggaagatattaatgttgtaggaaataaagaattatcctgtgcggaaaatcaaggcctacaacatggaggaaagccaaaggatggtaacatttatgcctttaagtgcaagtatcttaaattatcatttcttatgtgtcttgtgtagtcacatagaaaaaggaagcgcttcaaatgttttcaaattatgtcaccattctttgaagaaattcctctcatatggtagattgcatattcatcatttctatactatggcaatctacatgctttaaattattgtaagtacgtcatggcatgtcttacactaattatcatattatagccatgttctagatatagagagatattccaagttcttaaaagaataaggtgtcatgtaaggaatccaaatccttaggacacttataaagggaatctctctttatatctagaatcgtgagactaatgtttttgtctaaataatctaaatagtctcacatgtagagaataagtttctctatgaaaatgtgtaatccaacatgtcaaagaaaatcaatccaatgctttatgttgtatttcttcttgcttaaattggatatgattcttctacattcatcgctccccatgttatgaattagatttgttcccataaccttaaagaattaactatgcttgttttataagttaaaactaagcatacatcatggaataatctagttcatattataaagtttccatgctttagtaatccacttttcattccgtatcaaaatgattacaaaaagagaaactagtgcttgtgttactaatgacatatctcttgagcttacttatggaaatctacaagagagtaagtgcaagccacaagcctcaagggttgctcttcacccaaaggaagaaaggtaaaagcaaaggtatgggaactcatcttcttatcaaatatagttcccatcaatggttatttactctaaattatcatattctacctatgtgaagaataaattctttattggacttaaatcagctagatgtgcattcaatctcgttctcataaatgcacttgcccattagaatctaattcatgcatctgctatatctgttctcatattgatatgctttaaagttatgataataaattcaatatgaaagaagtaaatttcctatgattgatcaaaatgtttaaaaggtgcgtattcctcttttataatgatatgcactaatgctaaggattttacttcatgtctgtgtgacgaatggatgatgaattgtttatatttcttaataaaatcatccttcataatatactcccttgtgctattaacatctttcttgagtattttcaataagtttggaaggaaaaagagacaactacaaagggatgacactcaaatgaaagaagaagacatcaagaacaacaacacctacttggacaataaggtcttcaaaacaatcaatggtgtggttgtaagcattctaaatctttttcattatgagaacactaggcataagttgtttattgcaaattttataagccttgatcaagatgaataatgtttctccctatttgtctttaagaatgcatatctttagggggagcctatttctatatcttgattatgttgagactaacactttatcttagcaatctcatatagtctcaagtatgagaacaagtttctcatgaagtatgctactacatttcaatccaacttggtaaagtaatgtcatctttatcaaaaattgtaactttcactgttaaagtagcatatttactggattctcctggtttaagcttgtttgataaactaatgcatatgttgttcttttgatcgcatatgttatttgcttgatcattgaataacttcaattatcacttatgtttcttagtgcctcatataatttcaatcgatatctctcttgatatgcactaagttaaaaggagaattcatgatacatttatgcaatttgtgatctacttgatatataataacaatgacttagaaaaggatcactagttgtagaaccctctcttgtgcaaaatatttccatacactatcttgaatataggtcttaagtaactaagactaaggacaaagcacaatgaagagagcatctctatgtgaaggtacaaaagggtaaactacttcctctcatttacacatgtacctaaatcttcctcttctatacattccttgcatatcttgtataaaaggaagagaaagcatgtctatgcatatccctgcttcatacctagtttaacctctcaaaaatttcattcctgcatttatgcatttttgttaaaactaggtgaagtgattttattgtcaaagatcttaaagcttaaccttgtaacgaggataagctacctttgtttcaaaggtggagggtccttaagtctctttgaaatcctgaagggtaattgcttaaaatgtttccaacatgctttcataagtgcataatctatcgtgagcatcacacttatgacacactgcacttcacagtttctatgatatagatatgttctcattaacctaattatgtgcacttggcatttaaggccaaaatctgtattcctctcaaggcacatatttagggggagcaatctatattatatagaactatttacgcttaattgacacatcctcttaatcatgtctctttcctttggtacatttgcatatttcctatctatcttgtgccaaggctaagactaatatgcttccatgagtatcttgtgtattaagtcttagattgaatgggaaatggagtattcggcaaagacatcgcttccactctacaccatcggtattatctacctttttgccgatattccgccatctctcaaaattggtataatctctcattcatacttacttgtaccaatgcgggagaaagtaaaaagggctctaaagactccgtttttggcgattaatgccaaagggggagagagtattagcccaaagcacaaggaccgcaccaccacgccaatttccaaattttttgaaacaaagttgttttcaattggtatctttgaaattagtattcctataagaaattctatctcaattgatatctatatcttaaagaggagtttttcaaattttggtatctaagatatttgatcttctttcaatttgtaaaacccctcttgaacctaagagggagttttgtttagtcaaaggaaaagcatttgaaacagggggaattttttttcaaatcttgaaaatgcttctcgaaatcttattcatatacctttgactatttgcaaaaagactttgaaaaagaatttccaaaaacatttgcaaaaacaaaacaagtggtgcaagcgtggtccaaaattttaaagaaagcaattcatgcatatattatgaaagtataaattggtttaattccaagcaacctttgcacttaccttatgcaaactagttcaattctgcacttatatatttgctttggtttgtgttggcaatcaatcaccaaaaagggggagattgaaagggaaatagggtcaaaccttttcctaaatgattttggtggttgaattgcccaacacaaataattgaactaactagtttgctctagattatacattctacaggtgccaaaggttcaacacaaaccaataaaaagaacaagttagggttcaaaagaaatgagcaaaaaggaaactgaagtgttccatggtctggcgcaccgcactgtccggtgcaccaggggtcgtacattccaaactcctcagcttcgggtttcccaggcacagctccgctttaattcaccggactgtctggtgcaccagtggagcaatggctatctgcgcgcaatggtcaactctgatggatgaacagtgcaccacagtaacgcggcagaagtcagagcagaaggtcagaggggcaccggactgtccggtgtggcaccggactatccggtgtggcaccggactgtccggtgtgggcccggactgtctgctgccgcatgaggacaaagcctccaacggtcgaccagctccagaccctaacgacagggtgacatggcggcgcaccagacactatccgatggcgcaccggactgtccggtgtgcccatcgccagcagccttctccaacggctacaatttggttggtggctataaataccaccccaaccggccacttcaaggtgtgggagcccaagcaacattccaagtcatatagttgacatatccaagccctcccaaccacctctattcattgatccatcctatacacgagatttagaccacttcaaccaacacaagtgccacaaaagagagagcaagcaaaagaaagcttctcgtgtgagtttagcaatagtgccttgtgagattcatcgagagaaagtgtgtgctacatcttgtgttcatttctgcgtggagttttgactcccattgaacttcctcaaagttttgggaggcttgtaaagctagcaagagacacctaagagtgtggtgatccttgcggggtcttaagtgacccttgagaaaaagaagagctcgccagtcttggtgatcggtggagagagggaaagggttgaaagagactcatccttagtggactcctcaacggggactaggccttcgagggccgaacctcggtaaaacaaatcacccgtgtcccttgtgtttattgcttgtgatttgtttgttctctccctttctaagttctcttgcgctactctttgctaatattattttgtgttgcttcaagttaaattctcatttagagaagcaactccttgcaagaaagaacttgtgtttatcctcttcttatctaaagccctcttgcattattctccactaacatttctagtagtattgctattaattaaattccgcactatttgaaaataatactcgttgcaagcaatagacttagttttattctccgataattgtgaatcttgttctaaccactaatcaagggatctagcttggatttagaattataattttcaggtttcgcctatccacccccctctaggcgactttcatatatacatctcatgaggatgtggggtattacacttatgtgacctaaacctcgataaaaattcttgtgcgggctaaatgccatgtttgagtagataaccttagacaccatcagacttgtgttccgctcttcttaacaatctccttccttgtctcgtacctttggtacccaattcgtatgacgatgacatttggcatgccaggtaggcaattggtgtgttgtgaagctctactcacatggaaatggaatcaccaaccttttcgctggatggagtagtaaccactaatactcgctctagcaacttcgatcgtgagttacaacatggacgacgacgtagcccgtgatagctttgtcccctaagtgcctcatgtaggggggaatccctcagtggggtcatgacgtgattcccctgctggccctgttgagcgttgtgtccctaggtaacaccgtctttccaaggcatcatggaggatgtctcctctaatgttagagaaatcttagaaacatagtcactcaacttcataataaatcactaatgagtcaacctccaaacacaaaggttccaataggatccctcatataatcatgctcactactcactagtgccatgactttggcaccgccgatgtcattggtcccctcgatgcagcagaagtgcttttctacaatcctttggctctagacgttggagaagcagtagcataacaatggagacaatatgtcgctagactcctatccacaaccaggattaactgtaggtcttctcaccatacgcagcctcgtttagataatgttacatcaaaccatggcataccaattgcatgctctcatgccacaaacaagacctctccaatttgactgataatgacctaccttagtctttggatccatgacatgaggccccacctctacaacatcatccctgtgcctcatgtaatcgacaaggtccatggaacatagtagcaacgcgtggacctaaaaaattattaactaaaacactactgacaaactaaaaattatatcaaattcataaatatatatatacttaccaaccttttgttctttgtctttattcaaccccttcatcgttggaattaaggagtacatgagtagatagactcattcaaagtttcattgttgtggttgcttaggacactatcgtgtctgcaggaggacgaacatcatatggagaaggagcgccacatgggagagcgaatggaggagaaacatatggatgaggagcaccataagatccatatgaaggaataatatatggataccaatacgtgtatggatcagtgaaagattgaggaggaggaggagcgtcattggtaggaactcctaaagtaggagtaggaggatggtcagtgataggattttctttggtaagaggagaaacatccatggatggtgagtaagaatacgaggaaggaggatatgggtatgaaaacagagggtgtagacttatagaacaaggacgaatagaaacattctcctatggctatgtcgatgcattgaagaagatccaccccacatcagtaaaggtctatgttaggttatctccagcagcttacccatccctatctctcattttaaactctattttatagtacaaaactgtgttttgcatgatcatatgcacgatcggctgaccatagctgtcggtgtttagtgcccgaccgcacacccagggatacccttgcagtgcttttgggtaggacggtgttgttgattgtagctcgatggtttgtgcttggagcacgagagagagagagacagtcgattttctaaaggttcggccgctttgagaggcgtaataccctacttcctagggtgggtttgtatgtgtggtgtgttacaagtggcgtctcctgaatggagaagggctaat

SEQ ID NO: 2953 - DNA, 2063 bp, Zea Mays
cgacggcattggcccgaccgctcgcgccgcgtgcacactctcctcgcgtttcccgccattaactctgcaacctattctcttcctcgcgaaaccgcttccttcgattcattccccctctcccctctccaagacccaaaaccctaacccctacgacccccgtgaccgccgccgccgtcgatgcctgcgctctccgacgtcgcgcttcaggctgccatcgccggcaacctccgcctcctgaagctggtggcgagcaagatgaatctgcgcgaagcgaaggacgccgctgggcggaacgcgctccacctggccgcggagatgggccgtcttgaggtttgcaggttcctggtggaggaatcgggcttcgaggtgaacttcgcctgcgccgaaggcgggtcgccggtccactgcgccgcggccgggggcagcgagagcgtcttgggctaccttctcgaccacggtggcgaccctgtgatgccggactccatgggctccactccactgcatgatgcggcagaggaagggcattgtgcggctgtgaggatgctgctgtccaagggtgtcgatgtggatccacacggctgtcgtgggacgccgctgcacttggcctgctccaatgaccgggatcaggttgttaggatcctgctggaacatggcgcagatcccaacaaagttgtcggtcatgtcctcccaccactcatgatggcatactgtggcggttctttgagatgcatgaagctactgattgaggctggtgcggatgtgaacttgattgctccttctggagtaattttggctcaggcagtttgtgatgggtcaactgagattgtcaagtttttgctagaggttggagctgatcctaacattcctgatgaggatgggaaaatcccgatcatgtacccagcatttaatgggcatcgggagcttgttgaaattctatttcctaagacaagaccagtttcatctttgccagactggagcgttgatgggattattagaagtatgaaagatctgtttttcaagcctcaggatgcagctgtggtggaaaaaaagatagctgatgcgaagtcacaagggaaggaagctttcgcaaggggagagtaccctgcagcagtatacttctataccatggtactagagaacgaccttgatgctactgcgtttgccaaccggagcctgtgctggttgcggctgagggagggggccaaggctctgttagatgctcaacagtgcaaaatgatacggcctcgttggtcgaaggcatggtatcgcgagggcgcggctctcagcttgctgaaggactaccaaggggcagtcaacgcgttcacggaagcattgaaactggatcctgcaagtttagagatcaagaaagccttaagggaggccaccgattccctggcgaacgttggccgctccggagaacagaacccatgagctgctgctgcatccatgtgctttatctcacgttaagaatcctctaacactatgtggctcagcctcatattatatgttgatatatgtcgccttaacgcactgctggagatactagtttcgatctcagcctatatgttttgctccttcgggatgcagcctaagatacatgtggcaaccaagtgaggttgggcagggtagcatatctatggactggttgaactattatatgtatctggatatctaagtgcacctgttgctcctagtaaagttgcagttctaatgaccccttcgtcaaattcgattgggtgcacacttgcaggtaaagaattagtcgatgccgccactcggtttctgttaatacaaaacatgctccaccattctgctgctgggataaaagggcaccaacaatgcctgccaaaaaaacaaaacccgaaatacccgaatctggaatacctcaacttgaattttgttctagaatttcggatggtatcttgtaaaaaaaaattggatgtataattcgggtaccacaatcttgtacctaaaatatccgaagtacctaaactttcatgtgttaattatatcaaagtttgtatgaacatgtatttgcagaatgtctttgttttttatgtgca

SEQ ID NO: 2954 - DNA, 1655 bp, Zea Mays
acactctcctcgcgtttcccgccattaactctgcaacctattctcttcctcgcgaaaccgcttccttcgattcattccccctctcccctctccaagacccaaaaccctaacccctacgacccccgtgaccgccgccgccgtcgatgcctgcgctctccgacgtcgcgcttcaggctgccatcgccggcaacctccgcctcctgaagctggtggcgagcaagatgaatctgcgcgaagcgaaggacgccgctgggcggaacgcgctccacctggccgcggagatgggccgtcttgaggtttgcaggttcctggtggaggaatcgggcttcgaggtgaacttcgcctgcgccgaaggcgggtcgccggtccactgcgccgcggccgggggcagcgagagcgtcttgggctaccttctcgaccacggtggcgaccctgtgatgccggactccatgggctccactccactgcatgatgcggcagaggaagggcattgtgcggctgtgaggatgctgctgtccaagggtgtcgatgtggatccacacggctgtcgtgggacgccgctgcacttggcctgctccaatgaccgggatcaggttgttaggatcctgctggaacatggcgcagatcccaacaaagttgtcggtcatgtcctcccaccactcatgatggcatactgtggcggttctttgagatgcatgaagctactgattgaggctggtgcggatgtgaacttgattgctccttctggagtaattttggctcaggcagtttgtgatgggtcaactgagattgtcaagtttttgctagaggttggagctgatcctaacattcctgatgaggatgggaaaatcccgatcatgtacccagcatttaatgggcatcgggagcttgttgaaattctatttcctaagacaagaccagtttcatctttgccagactggagcgttgatgggattattagaagtatgaaagatctgtttttcaagcctcaggatgcagctgtggtggaaaaaaagatagctgatgcgaagtcacaagggaaggaagctttcgcaaggggagagtaccctgcagcagtatacttctataccatggtactagagaacgaccttgatgctactgcgtttgccaaccggagcctgtgctggttgcggctgagggagggggccaaggctctgttagatgctcaacagtgcaaaatgatacggcctcgttggtcgaaggcatggtatcgcgagggcgcggctctcagcttgctgaaggactaccaaggggcagtcaacgcgttcacggaagcattgaaactggatcctgcaagtttagagatcaagaaagccttaaggtaaagaattagtcgatgccgccactcggtttctgttaatacaaaacatgctccaccattctgctgctgggataaaagggcaccaacaatgcctgccaaaaaaacaaaacccgaaatacccgaatctggaatacctcaacttgaattttgttctagaatttcggatggtatcttgtaaaaaaaaattggatgtataattcgggtaccacaatcttgtacctaaaatatccgaagtacctaaactttcatgtgttaattatatcaaagtttgtatgaacatgtatttgcagaatgtctttgttttttatgtgca

SEQ ID NO: 2955 - DNA, 2180 bp, Zea Mays
acactctcctcgcgtttcccgccattaactctgcaacctattctcttcctcgcgaaaccgcttccttcgattcattccccctctcccctctccaagacccaaaaccctaacccctacgacccccgtgaccgccgccgccgtcgatgcctgcgctctccgacgtcgcgcttcaggctgccatcgccggcaacctccgcctcctgaagctggtggcgagcaagatgaatctgcgcgaagcgaaggacgccgctgggcggaacgcgctccacctggccgcggagatgggccgtcttgaggtttgcaggttcctggtggaggaatcgggcttcgaggtgaacttcgcctgcgccgaaggcgggtcgccggtccactgcgccgcggccgggggcagcgagagcgtcttgggctaccttctcgaccacggtggcgaccctgtgatgccggactccatgggctccactccactgcatgatgcggcagaggaagggcattgtgcggctgtgaggatgctgctgtccaagggtgtcgatgtggatccacacggctgtcgtgggacgccgctgcacttggcctgctccaatgaccgggatcaggttgttaggatcctgctggaacatggcgcagatcccaacaaagttgtcggtcatgtcctcccaccactcatgatggcatactgtggcggttctttgagatgcatgaagctactgattgaggctggtgcggatgtgaacttgattgctccttctggagtaattttggctcaggcagtttgtgatgggtcaactgagattgtcaagtttttgctagaggttggagctgatcctaacattcctgatgaggatgggaaaatcccgatcatgtacccagcatttaatgggcatcgggagcttgttgaaattctatttcctaagacaagaccagtttcatctttgccagactggagcgttgatgggattattagaagtatgaaagatctgtttttcaagcctcagctgtggtggaaaaaaagatagctgatgcgaagtcacaagggaaggaagctttcgcaaggggagagtaccctgcagcagtatacttctataccatggtactagagaacgaccttgatgctactgcgtttgccaaccggagcctgtgctggttgcggctgagggagggggccaaggctctgttagatgctcaacagtgcaaaatgatacggcctcgttggtcgaaggcatggtatcgcgagggcgcggctctcagcttgctgaaggactaccaaggggcagtcaacgcgttcacggaagcattgaaactggatcctgcaagtttagagatcaagaaagccttaagggaggccaccgattccctggcgaacgttggccgctccggagaacagaacccatgagctgctgctgcatccatgtgctttatctcacgttaagaatcctctaacactatgtggctcagcctcatattatatgttgatatatgtcgccttaacgcactgctggagatactagtttcgatctcagcctatatgttttgctccttcgggatgcagcctaagatacatgtggcaaccaagtgaggttgggcagggtagcatatctatggactggttgaactattatatgtatctggatatctaagtgcacctgttgctcctagtaaagttgcagttctaatgaccccttcgtcaaattcgattgggtgcacacttgcaggtttgccgattcatctaaagctttaatctgatcagtttcaacccctctggtcggtttctccatgttcttgttctggtcttcactccgcagttcttcagcatctgccgatcgatatgattgtttctgtgggctgagctattttccatttaatctggcaggtaaagaattagtcgatgccgccactcggtttctgttaatacaaaacatgctccaccattctgctgctgggataaaagggcaccaacaatgcctgccaaaaaaacaaaacccgaaatacccgaatctggaatacctcaacttgaattttgttctagaatttcggatggtatcttgtaaaaaaaaattggatgtataattcgggtaccacaatcttgtacctaaaatatccgaagtacctaaactttcatgtgttaattatatcaaagtttgtatgaacatgtatttgcagaatgtctttgttttttatgtgca

SEQ ID NO: 2956 - DNA, 1560 bp, Zea Mays
gcttggttggagtctaaatacacatcctgcagcacggtgatgttgatgccacaatgctggcatgcattgcattttcctgccccaatttacagtccctggatatcagcatggccaatagcgcggtcaacaggataactggggatgagctatctaggtttgtttcagagaagcgatctctgtcagttcttaaactagatggctgcagcagccttggttttctcaacatcagctcttcaagcctctcaacactttggatgtcaggtctttgttcccttaccaaggcggtcatgaactgcccaaatctgaccgagctatcactggacttccccaaacagaataacgattccaccgacctggctgctctaattgatagtctgggccgcacgtgcccaaacttgagaaacatgcacgtctcgtcgatccgcttatgcaacgaagccgtgtttgctctagaaagcgccaatctcaggggcctatgcatgctgtctttggttctaggttcaaaaataacagatgcagctgttgcatctattgttcgttcatactcaagcttggagctgcttgatttaagtggatctggcattaccgacaacgggcttgggatgatcagcaaagcattccctgacaccctaacacgcctgctcctggctctgtgccccaacatcacgtcgtctggtgtccaggtggctgcagcacagttgccgctcctccgtctcatggactgcggcaacagcatatgcgccaacccccagcctgaagctgggagatcctacttcggcgacctgaccggcgggatcaagttctgctctaagttacctgtccagaagaagcagcagcagcagcaggctgcctgccagaagctgatcataaagcacggcgccctgaagaagctcagcctgtggggctgttcagcgatcgacgccttgtacgtgaactgcccggagctggtcgatctgaacctcaacgcgtgcacgaaccttcatccagagcggctgctgatccagtgccccaagctgaaggacgtgcacgtcagcgggtgccgcgacatgctgatcggcgccgtcaggaaccaggtcctgaacgagttcgcggccgccgagccccggctgccctgcaagcggctggccgacgggtcgaagcgcgtgcacgtgccccacttcatgatcgagcagctggaggagcaggagaaatggggcgggccgcggaagagccagtgcaccgtccacctcacataggcagataggctaggccggccgctgggcgctggcgagtgctactgctggcctgtgaagtgaggccctggtagtcggcggcgcccgcgtcctcgccgtcgaggagctgctgcggcgtcgattcagcgagcctctagacccccctgtatgttccatccagactagagtgccatgatccttctgttcatgctgtgtgtgtgtgtgtttaatctgtggagtctgtaggataataacggggtgcaatgcaaacgtgcccgactcctgtactttgaaaccgtattttgctcttgttcatctaggacaataattgccttcggttttccccaga

SEQ ID NO: 2957 - DNA, 1390 bp, Zea Mays
atctcctcctatctataaaacaccacgccggaccggaccacacgcacagcggcatcaccagctacagctagcatagcaaggaccacgacgtgccgacggcagagaagcgcaactcaactcgtcgggcttcctttttcccgttctttgaggcgcaaaggaaaaaccaagcaagagggagaaggctacctaacctagctagctaaggacgagcaatggaggtggccgcagcagcgagctacagctactacggcttggaggcggccgacgacgacgtcgacaacctcagggccacggagctcaggctcggcctgccgggcacggaggcggcggaggaggaggaggaggcccggcaggcccagaaggtggcggcgccgccgccgtccacgcccaggggcaagaagcgcgacggcgtcagcggcgggatcgacgccgcgccgccggccgccaaggctcaggtggtggggtggccgccggtgaggtcgtacaggaagagctgcttccagcagcagcaggcgggcgccaagggcaagccagcggcggcggatgagggtgctccgggtccggcgggcggcggggtgttcgtgaagcatgttcatcggcacctgcaagcggctgaggatcatgaaggggtctgaggccagactaggcctcgggtcagccaagaacaacgactgagggagagggagacgacgaccattgtgcagacccgaccgagatccacgcacacggcggcttgtgcacgcgtgagcgggggattgttgtgcgtccgaggcatggggtagtatgggcttgtgttgtaccatcccctcctcgtctgccatcaatgagaagatgaagctgcttgcttggattggaacgaggggacggagatggagagagatagaaaagctttaatttgtgcatccaaccaagtggagtggagtggaatgatgtgtggtcgctttgttcttttgttttttttttattttgtggtactagtagggggtgttagcaacacaaaaggagtggagttgaatctccatgcacgcgtgtctgtacaaaagctaaagatcactcttctttccctgtcttaagttacatatctctattacttattaagttagcaatagtagcctgcctttttgtgttctgtcattctgcgatctcagccgtccattctaccgttctacaatctcagccgtccaatcccgcacaccagttttccgcgcgcagaaaaaaaaatcaaaccatggctgcctagggatcaaaccttggatctatttgagcagaatgcctagccttccaccctctagccaacatgactcatgttgaattgtgtacaacttcaactaaaacgttttttgtgtttaacccaccgtccactctatatgctcactgagtctagaaaaac

SEQ ID NO: 2958 - DNA, 2214 bp, Zea Mays
aaaagaccaacagtgtcgccactcgccacagagcgctccatcaacacgaccgccggtataaacgcagcccccctccggcctccaccaaggccaacattgctcaggctgctcccaactcccatcctccccctcccggagtacgaagtactagaaagagagcggctttcctctaagaatggcgggtggcggcgccggcgacgacgacgtggtggtggtgagctgcggcggcagaggcggcggcgaccccggcgcatacgccgcggtgctcaagaggaagctcgacctgtactgcgccgccgtcgccaaatccatggaagctaaatcacaagaacattcgttgggctaccccaactcacaagcttcagatgcttcgcaattgatttctcaagcttcctttgatggtgacatagatggggcaagcctagttacaaactctaatgtcatagaagatgatgattttcaaggcaagccaaccaacagtggcacatcaaaggaactgtcagacgatgatggtgaccttgaagagaatactgaccccgctaacgccaagaagatgaggagttaaatttcggtgttgtgatcagaatggtgtcaaaccgggaatcggctaggcgatcaagaaagaggaagcaagcacacttgaccgatcttgaatcacaggtttccaggttaacgtctgagaatgcatctttgctgaagcgactggctgatatgactcagaaatacaaggacgcttccgttgacaataaaaatctaacagttgatgttgagactatgaggagaaaggttcgttcgtcttgaatgcatcacagacctttttcttcttttttttgttgtacgagaactcttaactgcatccatttatcgatcataacatttttactgggctctgtgtatactcaccgtaatcaacgtttacatctctctagatggctgcaaagggcagtgaaagtaatatgattgttcatagttcttattttagaacctgcaagttcagttttagtttctaatggtttttaactgcacacaaaaggtatggcagcattttcatttgattttctgaaattctgcataccttctacaagtgtgataggaataatttagttccttggttttgttttcttgcagtatcatttcagaaattttatttccttgtattatatatatatatatatttaaagaataacagtgttctcttacaggtgtgaggagttgtaaaacgaaacaaaacattaaaagcgcacataccatgccgcaatgcgccaagtgtgtgtcccattaagcctgtggggtgttgcccttgccttgccttgtggatgggctgctctatctcaaatgataccgagaggagtccaaacagaatactaccatacaaacatttcttaatgcttgtgtgtgagtatatgcacaactctgtactcttgtatcattagtaaaactgtgtttttttaaatatccatgctgaagggttctaacataatcatgttaagtttttatgaaaaaaatttgcttaaactatgactgttccaatcagttttttacctaaagaaggtattcacaagaatcttggcatttaacagacctgcacaccttgactttatgaaaagggacatgtcttcaggaacacagtactgttttaattccaggtgaacatagccgaggaagctgtcaggaggctaactgggatcaccctcatgctaccgaccgcttttgagaagcccacgagcagcgcgcccctgtcatcatgtccatctgatgcagcttctgcttctgcttctgccgccattgaagacagcgtgaagcatttcctccaggcgccacttgaaaacagtgggatcatcccaaacgcagcagtttttcagaccaagccagcttctctgcaccgtgttgctagcctggagaacctgcagaagaggatcgtcggggatgcaatgtattccgagaccgcgtcaacgacattctcagatcctgaagctcttgccgataggtaaaggttgctcctgtcctgtgatgaacagccgtgtgatgctctagcggcctaagtgcttctggtaatggaagttgtagcacccatgcgcctgggtggggtctacacagtgatttgtacactattttgaaggttaataataattgttgagaaatgatctcatccctttgtacctatataagtaaagtattccattaataaagagaatagagttttcactcttcatg

SEQ ID NO: 2959 - DNA, 2096 bp, Zea Mays
caacagtgtcgccactcgccacagagcgctccatcaacacgaccgccggtataaacgcagcccccctccggcctccaccaaggccaacattgctcaggctgctcccaactcccatcctccccctcccggagtacgaagtactagaaagagagcggctttcctctaagaatggcgggtggcggcgccggcgacgacgacgtggtggtggtgagctgcggcggcagaggcggcggcgaccccggcgcatacgccgcggtgctcaagaggaagctcgacctgtactgcgccgccgtcgccaaatccatggtgacatagatggggcaagcctagttacaaactctaatgtcatagaagatgatgattttcaaggcaagccaaccaacagtggcacatcaaaggaactgtcagacgatgatggtgaccttgaagagaatactgaccccgctaacgccaagaagatgaggagaatggtgtcaaaccgggaatcggctaggcgatcaagaaagaggaagcaagcacacttgaccgatcttgaatcacaggtttccaggttaacgtctgagaatgcatctttgctgaagcgactggctgatatgactcagaaatacaaggacgcttccgttgacaataaaaatctaacagttgatgttgagactatgaggagaaaggttcgttcgtcttgaatgcatcacagacctttttcttcttttttttgttgtacgagaactcttaactgcatccatttatcgatcataacatttttactgggctctgtgtatactcaccgtaatcaacgtttacatctctctagatggctgcaaagggcagtgaaagtaatatgattgttcatagttcttattttagaacctgcaagttcagttttagtttctaatggtttttaactgcacacaaaaggtatggcagcattttcatttgattttctgaaattctgcataccttctacaagtgtgataggaataatttagttccttggttttgttttcttgcagtatcatttcagaaattttatttccttgtattatatatatatatatatttaaagaataacagtgttctcttacaggtgtgaggagttgtaaaacgaaacaaaacattaaaagcgcacataccatgccgcaatgcgccaagtgtgtgtcccattaagcctgtggggtgttgcccttgccttgccttgtggatgggctgctctatctcaaatgataccgagaggagtccaaacagaatactaccatacaaacatttcttaatgcttgtgtgtgagtatatgcacaactctgtactcttgtatcattagtaaaactgtgtttttttaaatatccatgctgaagggttctaacataatcatgttaagtttttatgaaaaaaatttgcttaaactatgactgttccaatcagttttttacctaaagaaggtattcacaagaatcttggcatttaacagacctgcacaccttgactttatgaaaagggacatgtcttcaggaacacagtactgttttaattccaggtgaacatagccgaggaagctgtcaggaggctaactgggatcaccctcatgctaccgaccgcttttgagaagcccacgagcagcgcgcccctgtcatcatgtccatctgatgcagcttctgcttctgcttctgccgccattgaagacagcgtgaagcatttcctccaggcgccacttgaaaacagtgggatcatcccaaacgcagcagtttttcagaccaagccagcttctctgcaccgtgttgctagcctggagaacctgcagaagaggatcgtcggggatgcaatgtattccgagaccgcgtcaacgacattctcagatcctgaagctcttgccgataggtaaaggttgctcctgtcctgtgatgaacagccgtgtgatgctctagcggcctaagtgcttctggtaatggaagttgtagcacccatgcgcctgggtggggtctacacagtgatttgtacactattttgaaggttaataataattgttgagaaatgatctcatccctttgtacctatataagtaaagtattccattaataaagagaatagagttttcactcttcatg

SEQ ID NO: 2960 - DNA, 1844 bp, Zea Mays
aacagtgtcgccactcgccacagagcgctccatcaacacgaccgccggtataaacgcagcccccctccggcctccaccaaggccaacattgctcaggctgctcccaactcccatcctccccctcccggagtacgaagtactagaaagagagcggctttcctctaagaatggcgggtggcggcgccggcgacgacgacgtggtggtggtgagctgcggcggcagaggcggcggcgaccccggcgcatacgccgcggtgctcaagaggaagctcgacctgtactgcgccgccgtcgccaaatccatggtgacatagatggggcaagcctagttacaaactctaatgtcatagaagatgatgattttcaaggcaagccaaccaacagtggcacatcaaaggaactgtcagacgatgatggtgaccttgaagagaatactgaccccgctaacgccaagaagatgaggagaatggtgtcaaaccgggaatcggctaggcgatcaagaaagaggaagcaagcacacttgaccgatcttgaatcacaggtttccaggttaacgtctgagaatgcatctttgctgaagcgactggctgatatgactcagaaatacaaggacgcttccgttgacaataaaaatctaacagttgatgttgagactatgaggagaaaggttcgttcgtcttgaatgcatcacagacctttttcttcttttttttgttgtacgagaactcttaactgcatccatttatcgatcataacatttttactgggctctgtgtatactcaccgtaatcaacgtttacatctctctagatggctgcaaagggcagtgaaagtaatatgattgttcatagttcttattttagaacctgcaagttcagttttagtttctaatggtttttaactgcacacaaaaggtatggcagcattttcatttgattttctgaaattctgcataccttctacaagtgtgataggaataatttagttccttggttttgttttcttgcagtatcatttcagaaattttatttccttgtattatatatatatatatatttaaagaataacagtgttctcttacaggtgtgaggagttgtaaaacgaaacaaaacattaaaagcgcacataccatgccgcaatgcgccaagtgtgtgtcccattaagcctgtggggtgttgcccttgccttgccttgtggatgggctgctctatctcaaatgataccgagaggagtccaaacagaatactaccatacaaacatttcttaatgcttgtgtgtgaacatagccgaggaagctgtcaggaggctaactgggatcaccctcatgctaccgaccgcttttgagaagcccacgagcagcgcgcccctgtcatcatgtccatctgatgcagcttctgcttctgcttctgccgccattgaagacagcgtgaagcatttcctccaggcgccacttgaaaacagtgggatcatcccaaacgcagcagtttttcagaccaagccagcttctctgcaccgtgttgctagcctggagaacctgcagaagaggatcgtcggggatgcaatgtattccgagaccgcgtcaacgacattctcagatcctgaagctcttgccgataggtaaaggttgctcctgtcctgtgatgaacagccgtgtgatgctctagcggcctaagtgcttctggtaatggaagttgtagcacccatgcgcctgggtggggtctacacagtgatttgtacactattttgaaggttaataataattgttgagaaatgatctcatccctttgtacctatataagtaaagtattccattaataaagagaatagagttttcactcttcatg

SEQ ID NO: 2961 - DNA, 4030 bp, Zea Mays
aacagtgtcgccactcgccacagagcgctccatcaacacgaccgccggtataaacgcagcccccctccggcctccaccaaggccaacattgctcaggctgctcccaactcccatcctccccctcccggagtacgaagtactagaaagagagcggctttcctctaagaatggcgggtggcggcgccggcgacgacgacgtggtggtggtgagctgcggcggcagaggcggcggcgaccccggcgcatacgccgcggtgctcaagaggaagctcgacctgtactgcgccgccgtcgccaaatccatggtgtggttcctcctcctcctacccctccaaagattagacttttctaggcctatttgagtattggttgtgtgattgtgccttgtgtgcttcgatgtttcagtttcatctctagcttaatttcgagtcacaatggtaggaattgcatgtttttcagttatttccccccttcattttggggaggggagttttactgcaatttctagtttttggaaatcacaagcagcagaagaaaaagtcggttgctttatttgaggactctggaaaatgttgaattgattggtcggtatgcttgtcgtgtaatcctacgctgccattcttaagccagggctacataaaaactcacagtagattttagcacccaccaagcaccaacagatagaaagaaagaaaaaaaagtttcccagcctttgacaaacattagaaaacacagcactgtgcacacaccggcacccatttctcttatggcttgtgatgaacagtatgatcaagatcagagctgtgccattgtcatcgtagtactgtgcagcggcgaaatccaaatgttccaactttacatgggtaccgtagcagatattgctttctgatctgatgcaagtgtagtggagtcctggagtggtgaaactgacatgtgggataatagatttggtatatgtgccatgttgctaggaggcaggctcacttccacacactacatacactgtggtggccggtgggatattctgatggaatgttatggaccacaaatgatttgaatgagtatgatgtgtcggtggtcgagccaataggattttctcctttttgtttctttgtttttttcctggctgaaagcgacaggaaacaaaacaagatgtggatttgaataaatagaactgcaaattcactgtatttagctatttatccgatagtatcagatgttctattgaattgatgaacatgttcacagtttgcgatttgcacatttccctttctcagaagtaaaaataccatacttcactgaatgctagcagttttactgtggctatttttcaatactcttccgcagttgtttgaactagcaaggttaagaatatctaggttttcacaggtggcatgtccaaagattgttatgtgaaaatgaatttgcacgttgattttctaagttaattagcaccacaagttagtttagcagttactttttccataagtagatgctgtaaaaacattatgcatggtggctctcagtcaccctataaataacacacttacttccaattttcttaaatatttagaggctggccttggcacaaccatgatattgaccattgcatccaatgattccacaaaacttcgagctatgtgtgtattatttatataaattatgagggtaaggatgtgcagtactagtggctttccagagcttaacagtgacataaacctcgcgtactggctgcacccagccctttgcccctttgttgcagtgatgtttacgtaagtccatttcaggaagctaaatcacaagaacattcgttgggctaccccaactcacaagcttcagatgcttcgcaattgatttctcaagcttcctttgatggtatttatgacctctcataactgagtgcatgtcagtctatcaaccaacttggggtaaacatgcaggcaggaagatttcgaaggaagtagtgccttaggatggcaggatgtggtctggtttaaaagcatgttagatgccaaatcctattcagttcaccatctccccgctgatcattccaatagggcattagatgcaaacctcacttatcctagtacacttgattaccagccttggtttgagtactgtgagtgtgaagtgtgaaccattcactagagtctacaggttagtcttccatgataattacgtgcacaagatccgatctcaccagcagtttcagtaggataggttagctgatgctcaaggaatccaggtgagtagaaatatcaattccggattacctttgtggtgtggttgaggttgatgtgccggctcattgataattctggaggaatgatctaaactatgagcaatgttggtgagatcagatataaggatgaaaaatgaagtctgatactgcttcagttatactgaacagtcatgtcaactctgttggtgagctgcactgggcatgcaactctggcaccagttttgcactctggcagtgtgaagatatgatgcatgtgtggttcagaaaatatataggccttttttgtgacatttgaaccgttggacttattttactgtactgttttggtttcttccattctacacacaggtgacatagatggggcaagcctagttacaaactctaatgtcatagaagatgatgattttcaaggcaagccaaccaacagtggcacatcaaaggaactgtcagacgatgatggtgaccttgaagagaatactgaccccgctaacgccaagaagatgaggaggtaacatagcatcacaacattttcttgacgagaaatatgactgctaaatagaaaccattacttgattttgttgcgagtgaaagatagatttatcttgttagaaggcatcatattcagttttaccgttcactcctaccattcactgcctttaaaggcagaaagaatccaatcacataaagctttatccaattatccatgcccttaaaaactttcaaaaactgttacattcctagaaaaattggtaattccgtctgaagttgcgggaatagaaaccacatataccttttgccattagtttcctttttctatagatctgtcacctttaccttgaatttacatgaaacatggtatgtgacgtcagaagcttaaccgtccatttctgtgatgaactgctcagttaaatttcggtgttgtgatcagaatggtgtcaaaccgggaatcggctaggcgatcaagaaagaggaagcaagcacacttgaccgatcttgaatcacaggtttcaattgtgttagaatatagatgagtgctcaagttaatatccaactaaaatgaatatactcgtgctaattaccgcacaactctccaggtttccaggttaacgtctgagaatgcatctttgctgaagcgactggctgatatgactcagaaatacaaggacgcttccgttgacaataaaaatctaacagttgatgttgagactatgaggagaaaggtgaacatagccgaggaagctgtcaggaggctaactgggatcaccctcatgctaccgaccgcttttgagaagcccacgagcagcgcgcccctgtcatcatgtccatctgatgcagcttctgcttctgcttctgccgccattgaagacagcgtgaagcatttcctccaggcgccacttgaaaacagtgggatcatcccaaacgcagcagtttttcagaccaagccagcttctctgcaccgtgttgctagcctggagaacctgcagaagaggatcgtcggggatgcaatgtattccgagaccgcgtcaacgacattctcagatcctgaagctcttgccgataggtaaaggttgctcctgtcctgtgatgaacagccgtgtgatgctctagcggcctaagtgcttctggtaatggaagttgtagcacccatgcgcctgggtggggtctacacagtgatttgtacactattttgaaggttaataataattgttgagaaatgatctcatccctttgtacctatataagtaaagtattccattaataaagagaatagagttttcactcttcatg

SEQ ID NO: 2962 - DNA, 1258 bp, Zea Mays
aacagtgtcgccactcgccacagagcgctccatcaacacgaccgccggtataaacgcagcccccctccggcctccaccaaggccaacattgctcaggctgctcccaactcccatcctccccctcccggagtacgaagtactagaaagagagcggctttcctctaagaatggcgggtggcggcgccggcgacgacgacgtggtggtggtgagctgcggcggcagaggcggcggcgaccccggcgcatacgccgcggtgctcaagaggaagctcgacctgtactgcgccgccgtcgccaaatccatggtgacatagatggggcaagcctagttacaaactctaatgtcatagaagatgatgattttcaaggcaagccaaccaacagtggcacatcaaaggaactgtcagacgatgatggtgaccttgaagagaatactgaccccgctaacgccaagaagatgaggagttaaatttcggtgttgtgatcagaatggtgtcaaaccgggaatcggctaggcgatcaagaaagaggaagcaagcacacttgaccgatcttgaatcacaggtttccaggttaacgtctgagaatgcatctttgctgaagcgactggctgatatgactcagaaatacaaggacgcttccgttgacaataaaaatctaacagttgatgttgagactatgaggagaaaggtgaacatagccgaggaagctgtcaggaggctaactgggatcaccctcatgctaccgaccgcttttgagaagcccacgagcagcgcgcccctgtcatcatgtccatctgatgcagcttctgcttctgcttctgccgccattgaagacagcgtgaagcatttcctccaggcgccacttgaaaacagtgggatcatcccaaacgcagcagtttttcagaccaagccagcttctctgcaccgtgttgctagcctggagaacctgcagaagaggatcgtcggggatgcaatgtattccgagaccgcgtcaacgacattctcagatcctgaagctcttgccgataggtaaaggttgctcctgtcctgtgatgaacagccgtgtgatgctctagcggcctaagtgcttctggtaatggaagttgtagcacccatgcgcctgggtggggtctacacagtgatttgtacactattttgaaggttaataataattgttgagaaatgatctcatccctttgtacctatataagtaaagtattccattaataaagagaatagagttttcactcttcatg

SEQ ID NO: 2963 - DNA, 2118 bp, Zea Mays
aacagtgtcgccactcgccacagagcgctccatcaacacgaccgccggtataaacgcagcccccctccggcctccaccaaggccaacattgctcaggctgctcccaactcccatcctccccctcccggagtacgaagtactagaaagagagcggctttcctctaagaatggcgggtggcggcgccggcgacgacgacgtggtggtggtgagctgcggcggcagaggcggcggcgaccccggcgcatacgccgcggtgctcaagaggaagctcgacctgtactgcgccgccgtcgccaaatccatggtgacatagatggggcaagcctagttacaaactctaatgtcatagaagatgatgattttcaaggcaagccaaccaacagtggcacatcaaaggaactgtcagacgatgatggtgaccttgaagagaatactgaccccgctaacgccaagaagatgaggagttaaatttcggtgttgtgatcagaatggtgtcaaaccgggaatcggctaggcgatcaagaaagaggaagcaagcacacttgaccgatcttgaatcacaggtttccaggttaacgtctgagaatgcatctttgctgaagcgactggctgatatgactcagaaatacaaggacgcttccgttgacaataaaaatctaacagttgatgttgagactatgaggagaaaggttcgttcgtcttgaatgcatcacagacctttttcttcttttttttgttgtacgagaactcttaactgcatccatttatcgatcataacatttttactgggctctgtgtatactcaccgtaatcaacgtttacatctctctagatggctgcaaagggcagtgaaagtaatatgattgttcatagttcttattttagaacctgcaagttcagttttagtttctaatggtttttaactgcacacaaaaggtatggcagcattttcatttgattttctgaaattctgcataccttctacaagtgtgataggaataatttagttccttggttttgttttcttgcagtatcatttcagaaattttatttccttgtattatatatatatatatatttaaagaataacagtgttctcttacaggtgtgaggagttgtaaaacgaaacaaaacattaaaagcgcacataccatgccgcaatgcgccaagtgtgtgtcccattaagcctgtggggtgttgcccttgccttgccttgtggatgggctgctctatctcaaatgataccgagaggagtccaaacagaatactaccatacaaacatttcttaatgcttgtgtgtgagtatatgcacaactctgtactcttgtatcattagtaaaactgtgtttttttaaatatccatgctgaagggttctaacataatcatgttaagtttttatgaaaaaaatttgcttaaactatgactgttccaatcagttttttacctaaagaaggtattcacaagaatcttggcatttaacagacctgcacaccttgactttatgaaaagggacatgtcttcaggaacacagtactgttttaattccaggtgaacatagccgaggaagctgtcaggaggctaactgggatcaccctcatgctaccgaccgcttttgagaagcccacgagcagcgcgcccctgtcatcatgtccatctgatgcagcttctgcttctgcttctgccgccattgaagacagcgtgaagcatttcctccaggcgccacttgaaaacagtgggatcatcccaaacgcagcagtttttcagaccaagccagcttctctgcaccgtgttgctagcctggagaacctgcagaagaggatcgtcggggatgcaatgtattccgagaccgcgtcaacgacattctcagatcctgaagctcttgccgataggtaaaggttgctcctgtcctgtgatgaacagccgtgtgatgctctagcggcctaagtgcttctggtaatggaagttgtagcacccatgcgcctgggtggggtctacacagtgatttgtacactattttgaaggttaataataattgttgagaaatgatctcatccctttgtacctatataagtaaagtattccattaataaagagaatagagttttcactcttcatg

SEQ ID NO: 2964 - DNA, 1767 bp, Zea Mays
aacagtgtcgccactcgccacagagcgctccatcaacacgaccgccggtataaacgcagcccccctccggcctccaccaaggccaacattgctcaggctgctcccaactcccatcctccccctcccggagtacgaagtactagaaagagagcggctttcctctaagaatggcgggtggcggcgccggcgacgacgacgtggtggtggtgagctgcggcggcagaggcggcggcgaccccggcgcatacgccgcggtgctcaagaggaagctcgacctgtactgcgccgccgtcgccaaatccatggaagctaaatcacaagaacattcgttgggctaccccaactcacaagcttcagatgcttcgcaattgatttctcaagcttcctttgatggtgacatagatggggcaagcctagttacaaactctaatgtcatagaagatgatgattttcaaggcaagccaaccaacagtggcacatcaaaggaactgtcagacgatgatggtgaccttgaagagaatactgaccccgctaacgccaagaagatgaggagaatggtgtcaaaccgggaatcggctaggcgatcaagaaagaggaagcaagcacacttgaccgatcttgaatcacaggtttccaggttaacgtctgagaatgcatctttgctgaagcgactggctgatatgactcagaaatacaaggacgcttccgttgacaataaaaatctaacagttgatgttgagactatgaggagaaaggtgtgaggagttgtaaaacgaaacaaaacattaaaagcgcacataccatgccgcaatgcgccaagtgtgtgtcccattaagcctgtggggtgttgcccttgccttgccttgtggatgggctgctctatctcaaatgataccgagaggagtccaaacagaatactaccatacaaacatttcttaatgcttgtgtgtgagtatatgcacaactctgtactcttgtatcattagtaaaactgtgtttttttaaatatccatgctgaagggttctaacataatcatgttaagtttttatgaaaaaaatttgcttaaactatgactgttccaatcagttttttacctaaagaaggtattcacaagaatcttggcatttaacagacctgcacaccttgactttatgaaaagggacatgtcttcaggaacacagtactgttttaattccaggtgaacatagccgaggaagctgtcaggaggctaactgggatcaccctcatgctaccgaccgcttttgagaagcccacgagcagcgcgcccctgtcatcatgtccatctgatgcagcttctgcttctgcttctgccgccattgaagacagcgtgaagcatttcctccaggcgccacttgaaaacagtgggatcatcccaaacgcagcagtttttcagaccaagccagcttctctgcaccgtgttgctagcctggagaacctgcagaagaggatcgtcggggatgcaatgtattccgagaccgcgtcaacgacattctcagatcctgaagctcttgccgataggtaaaggttgctcctgtcctgtgatgaacagccgtgtgatgctctagcggcctaagtgcttctggtaatggaagttgtagcacccatgcgcctgggtggggtctacacagtgatttgtacactattttgaaggttaataataattgttgagaaatgatctcatccctttgtacctatataagtaaagtattccattaataaagagaatagagttttcactcttcatg

SEQ ID NO: 2965 - DNA, 2605 bp, Zea Mays
aacagtgtcgccactcgccacagagcgctccatcaacacgaccgccggtataaacgcagcccccctccggcctccaccaaggccaacattgctcaggctgctcccaactcccatcctccccctcccggagtacgaagtactagaaagagagcggctttcctctaagaatggcgggtggcggcgccggcgacgacgacgtggtggtggtgagctgcggcggcagaggcggcggcgaccccggcgcatacgccgcggtgctcaagaggaagctcgacctgtactgcgccgccgtcgccaaatccatggtgacatagatggggcaagcctagttacaaactctaatgtcatagaagatgatgattttcaaggcaagccaaccaacagtggcacatcaaaggaactgtcagacgatgatggtgaccttgaagagaatactgaccccgctaacgccaagaagatgaggaggtaacatagcatcacaacattttcttgacgagaaatatgactgctaaatagaaaccattacttgattttgttgcgagtgaaagatagatttatcttgttagaaggcatcatattcagttttaccgttcactcctaccattcactgcctttaaaggcagaaagaatccaatcacataaagctttatccaattatccatgcccttaaaaactttcaaaaactgttacattcctagaaaaattggtaattccgtctgaagttgcgggaatagaaaccacatataccttttgccattagtttcctttttctatagatctgtcacctttaccttgaatttacatgaaacatggtatgtgacgtcagaagcttaaccgtccatttctgtgatgaactgctcagttaaatttcggtgttgtgatcagaatggtgtcaaaccgggaatcggctaggcgatcaagaaagaggaagcaagcacacttgaccgatcttgaatcacaggtttcaattgtgttagaatatagatgagtgctcaagttaatatccaactaaaatgaatatactcgtgctaattaccgcacaactctccaggtttccaggttaacgtctgagaatgcatctttgctgaagcgactggctgatatgactcagaaatacaaggacgcttccgttgacaataaaaatctaacagttgatgttgagactatgaggagaaaggttcgttcgtcttgaatgcatcacagacctttttcttcttttttttgttgtacgagaactcttaactgcatccatttatcgatcataacatttttactgggctctgtgtatactcaccgtaatcaacgtttacatctctctagatggctgcaaagggcagtgaaagtaatatgattgttcatagttcttattttagaacctgcaagttcagttttagtttctaatggtttttaactgcacacaaaaggtatggcagcattttcatttgattttctgaaattctgcataccttctacaagtgtgataggaataatttagttccttggttttgttttcttgcagtatcatttcagaaattttatttccttgtattatatatatatatatatttaaagaataacagtgttctcttacaggtgtgaggagttgtaaaacgaaacaaaacattaaaagcgcacataccatgccgcaatgcgccaagtgtgtgtcccattaagcctgtggggtgttgcccttgccttgccttgtggatgggctgctctatctcaaatgataccgagaggagtccaaacagaatactaccatacaaacatttcttaatgcttgtgtgtgagtatatgcacaactctgtactcttgtatcattagtaaaactgtgtttttttaaatatccatgctgaagggttctaacataatcatgttaagtttttatgaaaaaaatttgcttaaactatgactgttccaatcagttttttacctaaagaaggtattcacaagaatcttggcatttaacagacctgcacaccttgactttatgaaaagggacatgtcttcaggaacacagtactgttttaattccaggtgaacatagccgaggaagctgtcaggaggctaactgggatcaccctcatgctaccgaccgcttttgagaagcccacgagcagcgcgcccctgtcatcatgtccatctgatgcagcttctgcttctgcttctgccgccattgaagacagcgtgaagcatttcctccaggcgccacttgaaaacagtgggatcatcccaaacgcagcagtttttcagaccaagccagcttctctgcaccgtgttgctagcctggagaacctgcagaagaggatcgtcggggatgcaatgtattccgagaccgcgtcaacgacattctcagatcctgaagctcttgccgataggtaaaggttgctcctgtcctgtgatgaacagccgtgtgatgctctagcggcctaagtgcttctggtaatggaagttgtagcacccatgcgcctgggtggggtctacacagtgatttgtacactattttgaaggttaataataattgttgagaaatgatctcatccctttgtacctatataagtaaagtattccattaataaagagaatagagttttcactcttcatg

SEQ ID NO: 2966 - DNA, 3826 bp, Zea Mays
aacagtgtcgccactcgccacagagcgctccatcaacacgaccgccggtataaacgcagcccccctccggcctccaccaaggccaacattgctcaggctgctcccaactcccatcctccccctcccggagtacgaagtactagaaagagagcggctttcctctaagaatggcgggtggcggcgccggcgacgacgacgtggtggtggtgagctgcggcggcagaggcggcggcgaccccggcgcatacgccgcggtgctcaagaggaagctcgacctgtactgcgccgccgtcgccaaatccatggtgtggttcctcctcctcctacccctccaaagattagacttttctaggcctatttgagtattggttgtgtgattgtgccttgtgtgcttcgatgtttcagtttcatctctagcttaatttcgagtcacaatggtaggaattgcatgtttttcagttatttccccccttcattttggggaggggagttttactgcaatttctagtttttggaaatcacaagcagcagaagaaaaagtcggttgctttatttgaggactctggaaaatgttgaattgattggtcggtatgcttgtcgtgtaatcctacgctgccattcttaagccagggctacataaaaactcacagtagattttagcacccaccaagcaccaacagatagaaagaaagaaaaaaaagtttcccagcctttgacaaacattagaaaacacagcactgtgcacacaccggcacccatttctcttatggcttgtgatgaacagtatgatcaagatcagagctgtgccattgtcatcgtagtactgtgcagcggcgaaatccaaatgttccaactttacatgggtaccgtagcagatattgctttctgatctgatgcaagtgtagtggagtcctggagtggtgaaactgacatgtgggataatagatttggtatatgtgccatgttgctaggaggcaggctcacttccacacactacatacactgtggtggccggtgggatattctgatggaatgttatggaccacaaatgatttgaatgagtatgatgtgtcggtggtcgagccaataggattttctcctttttgtttctttgtttttttcctggctgaaagcgacaggaaacaaaacaagatgtggatttgaataaatagaactgcaaattcactgtatttagctatttatccgatagtatcagatgttctattgaattgatgaacatgttcacagtttgcgatttgcacatttccctttctcagaagtaaaaataccatacttcactgaatgctagcagttttactgtggctatttttcaatactcttccgcagttgtttgaactagcaaggttaagaatatctaggttttcacaggtggcatgtccaaagattgttatgtgaaaatgaatttgcacgttgattttctaagttaattagcaccacaagttagtttagcagttactttttccataagtagatgctgtaaaaacattatgcatggtggctctcagtcaccctataaataacacacttacttccaattttcttaaatatttagaggctggccttggcacaaccatgatattgaccattgcatccaatgattccacaaaacttcgagctatgtgtgtattatttatataaattatgagggtaaggatgtgcagtactagtggctttccagagcttaacagtgacataaacctcgcgtactggctgcacccagccctttgcccctttgttgcagtgatgtttacgtaagtccatttcaggaagctaaatcacaagaacattcgttgggctaccccaactcacaagcttcagatgcttcgcaattgatttctcaagcttcctttgatggtatttatgacctctcataactgagtgcatgtcagtctatcaaccaacttggggtaaacatgcaggcaggaagatttcgaaggaagtagtgccttaggatggcaggatgtggtctggtttaaaagcatgttagatgccaaatcctattcagttcaccatctccccgctgatcattccaatagggcattagatgcaaacctcacttatcctagtacacttgattaccagccttggtttgagtactgtgagtgtgaagtgtgaaccattcactagagtctacaggttagtcttccatgataattacgtgcacaagatccgatctcaccagcagtttcagtaggataggttagctgatgctcaaggaatccaggtgagtagaaatatcaattccggattacctttgtggtgtggttgaggttgatgtgccggctcattgataattctggaggaatgatctaaactatgagcaatgttggtgagatcagatataaggatgaaaaatgaagtctgatactgcttcagttatactgaacagtcatgtcaactctgttggtgagctgcactgggcatgcaactctggcaccagttttgcactctggcagtgtgaagatatgatgcatgtgtggttcagaaaatatataggccttttttgtgacatttgaaccgttggacttattttactgtactgttttggtttcttccattctacacacaggtgacatagatggggcaagcctagttacaaactctaatgtcatagaagatgatgattttcaaggcaagccaaccaacagtggcacatcaaaggaactgtcagacgatgatggtgaccttgaagagaatactgaccccgctaacgccaagaagatgaggagttaaatttcggtgttgtgatcagaatggtgtcaaaccgggaatcggctaggcgatcaagaaagaggaagcaagcacacttgaccgatcttgaatcacaggtttcaattgtgttagaatatagatgagtgctcaagttaatatccaactaaaatgaatatactcgtgctaattaccgcacaactctccaggtttccaggttaacgtctgagaatgcatctttgctgaagcgactggctgatatgactcagaaatacaaggacgcttccgttgacaataaaaatctaacagttgatgttgagactatgaggagaaaggtgtgaggagttgtaaaacgaaacaaaacattaaaagcgcacataccatgccgcaatgcgccaagtgtgtgtcccattaagcctgtggggtgttgcccttgccttgccttgtggatgggctgctctatctcaaatgataccgagaggagtccaaacagaatactaccatacaaacatttcttaatgcttgtgtgtgaacatagccgaggaagctgtcaggaggctaactgggatcaccctcatgctaccgaccgcttttgagaagcccacgagcagcgcgcccctgtcatcatgtccatctgatgcagcttctgcttctgcttctgccgccattgaagacagcgtgaagcatttcctccaggcgccacttgaaaacagtgggatcatcccaaacgcagcagtttttcagaccaagccagcttctctgcaccgtgttgctagcctggagaacctgcagaagaggatcgtcggggatgcaatgtattccgagaccgcgtcaacgacattctcagatcctgaagctcttgccgataggtaaaggttgctcctgtcctgtgatgaacagccgtgtgatgctctagcggcctaagtgcttctggtaatggaagttgtagcacccatgcgcctgggtggggtctacacagtgatttgtacactattttgaaggttaataataattgttgagaaatgatctcatccctttgtacctatataagtaaagtattccattaataaagagaatagagttttcactcttcatg

SEQ ID NO: 2967 - DNA, 1679 bp, Zea Mays
aacagtgtcgccactcgccacagagcgctccatcaacacgaccgccggtataaacgcagcccccctccggcctccaccaaggccaacattgctcaggctgctcccaactcccatcctccccctcccggagtacgaagtactagaaagagagcggctttcctctaagaatggcgggtggcggcgccggcgacgacgacgtggtggtggtgagctgcggcggcagaggcggcggcgaccccggcgcatacgccgcggtgctcaagaggaagctcgacctgtactgcgccgccgtcgccaaatccatggtgacatagatggggcaagcctagttacaaactctaatgtcatagaagatgatgattttcaaggcaagccaaccaacagtggcacatcaaaggaactgtcagacgatgatggtgaccttgaagagaatactgaccccgctaacgccaagaagatgaggagaatggtgtcaaaccgggaatcggctaggcgatcaagaaagaggaagcaagcacacttgaccgatcttgaatcacaggtttccaggttaacgtctgagaatgcatctttgctgaagcgactggctgatatgactcagaaatacaaggacgcttccgttgacaataaaaatctaacagttgatgttgagactatgaggagaaaggtgtgaggagttgtaaaacgaaacaaaacattaaaagcgcacataccatgccgcaatgcgccaagtgtgtgtcccattaagcctgtggggtgttgcccttgccttgccttgtggatgggctgctctatctcaaatgataccgagaggagtccaaacagaatactaccatacaaacatttcttaatgcttgtgtgtgagtatatgcacaactctgtactcttgtatcattagtaaaactgtgtttttttaaatatccatgctgaagggttctaacataatcatgttaagtttttatgaaaaaaatttgcttaaactatgactgttccaatcagttttttacctaaagaaggtattcacaagaatcttggcatttaacagacctgcacaccttgactttatgaaaagggacatgtcttcaggaacacagtactgttttaattccaggtgaacatagccgaggaagctgtcaggaggctaactgggatcaccctcatgctaccgaccgcttttgagaagcccacgagcagcgcgcccctgtcatcatgtccatctgatgcagcttctgcttctgcttctgccgccattgaagacagcgtgaagcatttcctccaggcgccacttgaaaacagtgggatcatcccaaacgcagcagtttttcagaccaagccagcttctctgcaccgtgttgctagcctggagaacctgcagaagaggatcgtcggggatgcaatgtattccgagaccgcgtcaacgacattctcagatcctgaagctcttgccgataggtaaaggttgctcctgtcctgtgatgaacagccgtgtgatgctctagcggcctaagtgcttctggtaatggaagttgtagcacccatgcgcctgggtggggtctacacagtgatttgtacactattttgaaggttaataataattgttgagaaatgatctcatccctttgtacctatataagtaaagtattccattaataaagagaatagagttttcactcttcatg

SEQ ID NO: 2968 - DNA, 1451 bp, Zea Mays
aacagtgtcgccactcgccacagagcgctccatcaacacgaccgccggtataaacgcagcccccctccggcctccaccaaggccaacattgctcaggctgctcccaactcccatcctccccctcccggagtacgaagtactagaaagagagcggctttcctctaagaatggcgggtggcggcgccggcgacgacgacgtggtggtggtgagctgcggcggcagaggcggcggcgaccccggcgcatacgccgcggtgctcaagaggaagctcgacctgtactgcgccgccgtcgccaaatccatggtgacatagatggggcaagcctagttacaaactctaatgtcatagaagatgatgattttcaaggcaagccaaccaacagtggcacatcaaaggaactgtcagacgatgatggtgaccttgaagagaatactgaccccgctaacgccaagaagatgaggagttaaatttcggtgttgtgatcagaatggtgtcaaaccgggaatcggctaggcgatcaagaaagaggaagcaagcacacttgaccgatcttgaatcacaggtttccaggttaacgtctgagaatgcatctttgctgaagcgactggctgatatgactcagaaatacaaggacgcttccgttgacaataaaaatctaacagttgatgttgagactatgaggagaaaggtgtgaggagttgtaaaacgaaacaaaacattaaaagcgcacataccatgccgcaatgcgccaagtgtgtgtcccattaagcctgtggggtgttgcccttgccttgccttgtggatgggctgctctatctcaaatgataccgagaggagtccaaacagaatactaccatacaaacatttcttaatgcttgtgtgtgaacatagccgaggaagctgtcaggaggctaactgggatcaccctcatgctaccgaccgcttttgagaagcccacgagcagcgcgcccctgtcatcatgtccatctgatgcagcttctgcttctgcttctgccgccattgaagacagcgtgaagcatttcctccaggcgccacttgaaaacagtgggatcatcccaaacgcagcagtttttcagaccaagccagcttctctgcaccgtgttgctagcctggagaacctgcagaagaggatcgtcggggatgcaatgtattccgagaccgcgtcaacgacattctcagatcctgaagctcttgccgataggtaaaggttgctcctgtcctgtgatgaacagccgtgtgatgctctagcggcctaagtgcttctggtaatggaagttgtagcacccatgcgcctgggtggggtctacacagtgatttgtacactattttgaaggttaataataattgttgagaaatgatctcatccctttgtacctatataagtaaagtattccattaataaagagaatagagttttcactcttcatg

SEQ ID NO: 2969 - DNA, 679 bp, Zea Mays
atatttacacgtatatgcttatatgaatacaatatatatacatcgatgttgtattataaaagcaaaaacaaaacaaaaagattatagaaaactaatagtaaatgaactaataaaagaaaacgaaaaaaaaggaaacaaaaaaaaacgcacgcccacgttacctgctggccggatgccacgaagccgcgtagcgggcgctgcaggccacgtcccaggccgcgtggacttgcgcgagtcccccaccgccccaacctgctgtagtaaaacagccgcgcgtccatttactcgtcctccttttgttttcaccactcagcctggcaacagcaccacatagcatcagcctccgtcgccgcccccagccatagctagcagagatcgtcggagccggtcgtttcacctgctccctgcagcacgcactcttttcctttctattgccaacatcacccccgacttctcccatgttgatttgaatgtaacattgctgacggagaatacgtgctagtcccgacgtgcgaaagtgttcaacaagagagtaatctgacggtggtcgaggttgtccaagacccgaatcccacttcggaagacattttccccggcccaactcaagaagatactaacatagaggagatggttgctggaataacttggccaagtcatttgccacctggatggacggtcg

SEQ ID NO: 2970 - DNA, 1301 bp, Zea Mays
aaatgaactaataaaagaaaacgaaaaaaaaggaaacaaaaaaaaacgcacgcccacgttacctgctggccggatgccacgaagccgcgtagcgggcgctgcaggccacgtcccaggccgcgtggacttgcgcgagtcccccaccgccccaacctgctgtagtaaaacagccgcgcgtccatttactcgtcctccttttgttttcaccactcagcctggcaacagcaccacatagcatcagcctccgtcgccgcccccagccatagctagcagagatcgtcggagccggtcgtttcacctgctccctgcagcacgcactcttttcctttctattgccaacatcacccccgacttctcccatgttgatttgaatgtaacattgctgacggagaatacgtgctagtcccgacgtgcgaaagtgttcaacaagagagtaatctgacggtggtcgaggttgtccaagacccgaatcccacttcggaagacattttccccggcccaactcaagaagatggcggctcttgatcatgtggtggtggacgagcatgggtttgcccactctgtgtgtctgcactgggagggctttcccgctattttgtgggacctattgaggactgtcggttacaccactcctccccactacgttggatatgagttcgaggagcacggagtgcctcgctgtcgggtacaactcacattgtggtctcatccggtgtaccctgagtggccttctttggacaccgagacggagggctttcgcctcggcgacacatgggaggcatcagctttgcatgcgcttgtggccttctgtgagtacatggggttgtttcccctgaagcagcaagatgaccccttatggttggacaggattgccaacatagtcctcttgggtttcagttgcccccaggaggcgatcctcatggcaacccgatgcatcagggcactgcaacacctccaggcactgcagagtcaggccatgacatatttggtggccctcgctcagacaactcgccagatccttagtgagagacaagttcgcatcatcaatctttctacagaattgtccgaccgaaagctacaaattgaggcgatgggagttcaggttcatgagcttcaggagcaggaacatgttgagatggaggctgaccttgaagatgctgatatggatgaggaggaggaagacccagaggagattgagggtgtttctgagttaaccaccgagagtggagcaccactaccaccagtcgactgagcacacccctcagcagggagtgttatgtcagttaataattaggatagat

SEQ ID NO: 2971 - DNA, 259 bp, Zea Mays
atttactcgtcctccttttgttttcaccactcagcctggcaacagcaccacatagcatcagcctccgtcgccgcccccagccatagctagcagagatcgtcggagccggtcgtttcacctgctccctgcagcacgcactcttttcctttctattgccaacatcacccccgacttctcccatgttgatttgatactaacatagaggagatggttgctggaataacttggccaagtcatttgccacctggatggacggtcg

SEQ ID NO: 2972 - DNA, 2781 bp, Zea Mays
ggcggttaggggccgcggggtacaagtgtaaaccaggagtgggggctttcgccgcgcgcgcatggtgctccgcgaaagccgagcggccggacaagtgaagcgcggccacgatcgaccggccccggccccccatcgtcgcatcccatccatcccatttcccccacgagccctaggcgcgtccacggcggcacggaaccggagatggaggagagcgacgcggcggagggggtggcggtgcagctgatcgacggcgagggcgagttcgcggccgagggggcggagcggttcatggcggccgccggcgtcgccgggtgcgggctctcctacgccgtcgtctccatcatggggccacagagcagcggaaagagtaccttgttgaatcaattatttggtaccaattttagggagatggatgcattcagaggaaggagtcaaactactaaaggtatctggatagcacgctgtgttggtgttgagccttgtactgttgtattggatcttgagggtaccgatggaagagagagaggagaggatgacactgcatttgagaagcaaagttcgttatttgctcttgcaatttcagatatagttctaattaacatgtggtgccatgatattggccgtgagcaagctgccaataaaccactcctaaagacagtatttcaggtcatgatgcgtttgtttagtcctcggaagacaacactgctatttgttatacgtgataaaaccaggactccacttgaacatctagaaccagttctaagggaggatatacaaaagatatggaactctgttgccaagccagaggcacacaaagacacccctatcaatgaattcttcaatgtgcaagttactgcattgtccagttttgaggaaaaagaggaccagtttagggaacaggttcaacaacttaggcagagattttcaaattcaattgcaccaggaggtcttgcaggtgatagaagaggagtagttcctgcttcaggttttttgtttagttcacaacagatttggaaagttatccgagagaacaaggatcttgatcttcctgctcacaaggtaatggttgctacagttcgatgtgatgaaattgcaaacgagaagtttggatgcataacctcagacacagaatggttggatgtggagagtgctgtccaatctggtccagtacctggttttggaaaaaaacttggcaatatcgtcgacgttcacttgcaagagtatgacaaagaagctgtctattttgatgaagctgtaaggaaaggaaaacgacagcatttggagtccagaatactgaatcttgtccaacctgcattccagaaaatgttgactcatctgcgtgtgaaggctctagaaaaatttaaaactggtcttaattcatctttggagagtggaaaaggattcgcagtatctgctcgagacaatactgaatgctctctcaaagaatttgaacaaggctgtgcagtgtttagccatgacaaggattcaattccaagggtctggacaggaaaggaagatgttcgtgcaatagcaaaggaagctcgatctgcggctctcaaacttctgtctgtaatggcggccattcgctgggatgacgagccagataggattgaaagcatcctcacttcaacacttctggaaggctctgttgtatcaaagattgcaagtgctgcttctgctgatccacttgcttctaccacttgggaagagattgctccaaagcatacaatgattaccccgtctcagtgcaagtcactgtggaaacaatttaaagcagaaactgagttcacgattacacaagcagtatccacacagcaagctcacaggcgcggtaatagtaaactgcctcctccttgggcaatcgtggccattgctattcttggtttcaatgagatcatggtgcttattaggaatcccatttatctgttcttgctatttgtgggctacttgatggtcaaagctttggcgatgcagctagatgtcagcagagaattccagaatggagtggttcctggaataatctctgtgtcggtgaagctcctaccagcgatacagaacctggtgaacaaagtggcagccgagcagcaagctgagcaccagcagcagcacccgcaccctcaccctcacactcaggccccaggacccccacagccacagatgcagccgccgccgctgctcctgagcccgagaagccccatgagcgagctgcggaggctgcacatgccgcgcagcccgcgcagcccgcgcaaggtggcgtcgccggcgccatcctcgtcgtcgtcatcgtctgccgtgtcgtcccctaggcacgttggcgaggaccagaagccaagaccaggggcagtcggggcgcctgagaacgaggccaccgtcgccgactcgatagtgtgatccacgcaccagccatcgtggcgcgcgtttgactgctataggtacaaggatatcaaggcagaaataatgcaggaccctcttctgccgtgcaatcctttagtttttgcaaggagagggaggggataatgcatagatggacaattgctacctggcaccatttttcagcatatgtatagaaaggagctacccatttgaaactgaaagtcgtaggcattgtttaattaagtgcgctagaaataccccagccgcattcagctctttttatatatatgctaacaccgtaatctaatgtttaaacgctatccggttcattggctacaactgtcaatgatatgtaccgagacttattacttcatagctatcggtaatctatctactacgacttgtagg

SEQ ID NO: 2973 - DNA, 1598 bp, Zea Mays
gaaagccgagcggccggacaagtgaagcgcggccacgatcgaccggccccggccccccatcgtcgcatcccatccatcccatttcccccacgagccctaggcgcgtccacggcggcacggaaccggagatggaggagagcgacgcggcggagggggtggcggtgcagctgatcgacggcgagggcgagttcgcggccgagggggcggagcggttcatggcggccgccggcgtcgccgggtgcgggctctcctacgccgtcgtctccatcatggggccacagagcagcggaaagagtaccttgttgaatcaattatttggtaccaattttagggagatggatgcattcagaggaaggagtcaaactactaaaggtatctggatagcacgctgtgttggtgttgagccttgtactgttgtattggatcttgagggtaccgatggaagagagagaggagaggatgacactgcatttgagaagcaaagttcgttatttgctcttgcaatttcagatatagttctaattaacatgtggtgccatgatattggccgtgagcaagctgccaataaaccactcctaaagacagtatttcaggtcatgatgcgtttgtttagtcctcggaagacaacactgctatttgttatacgtgataaaaccaggactccacttgaacatctagaaccagttctaagggaggatatacaaaagatatggaactctgttgccaagccagaggcacacaaagacacccctatcaatgaattcttcaatgtgcaagttactgcattgtccagttttgaggaaaaagaggaccagtttagggaacaggttcaacaacttaggcagagattttcaaattcaattgcaccaggaggtcttgcaggtgatagaagaggagtagttcctgcttcaggttttttgtttagttcacaacagatttggaaagttatccgagagaacaaggatcttgatcttcctgctcacaaggtaatggttgctacagttcgatgtgatgaaattgcaaacgagaagtttggatgcataacctcagacacagaatggttggatgtggagagtgctgtccaatctggtccagtacctggttttggaaaaaaacttggcaatatcgtcgacgttcacttgcaagagtatgacaaagaagctgtctattttgatgaagctgtaaggaaaggaaaacgacagcatttggagtccagaatactgaatcttgtccaacctgcattccagaaaatgttgactcatctgcgtgtgaaggctctagaaaaatttaaaactggtcttaattcatctttggagagtggaaaaggattcgcagtatctgctcgagacaatactgaatgctctctcaaagaatttgaacaaggctgtgcagatgctataatcaagcaagcgaactgggactgctctaaaatgctagagaaagttcggcgtgatattgaagatcatgcactttcaattcgtgaaagcaagctatccgaaatgacaagacacgctaaggttatgtatggcaagctgaaagagattttaatcactagcttagcaatgcataattttcttctagatttatttgcatatctg

SEQ ID NO: 2974 - DNA, 2668 bp, Zea Mays
atggaggagagcgacgcggcggagggggtggcggtgcagctgatcgacggcgagggcgagttcgcggccgagggggcggagcggttcatggcggccgccggcgtcgccgggtgcgggctctcctacgccgtcgtctccatcatggggccacagagcagcggaaagagtaccttgttgaatcaattatttggtaccaattttagggagatggatgcattcagaggaaggagtcaaactactaaaggtatctggatagcacgctgtgttggtgttgagccttgtactgttgtattggatcttgagggtaccgatggaagagagagaggagaggatgacactgcatttgagaagcaaagttcgttatttgctcttgcaatttcagatatagttctaattaacatgtggtgccatgatattggccgtgagcaagctgccaataaaccactcctaaagacagtatttcagtttgtaggtcatgatgcgtttgtttagtcctcggaagacaacactgctatttgttatacgtgataaaaccaggactccacttgaacatctagaaccagttctaagggaggatatacaaaagatatggaactctgttgccaagccagaggcacacaaagacacccctatcaatgaattcttcaatgtgcaagttactgcattgtccagttttgaggaaaaagaggaccagtttagggaacaggttcaacaacttaggcagagattttcaaattcaattgcaccaggaggtcttgcaggtgatagaagaggagtagttcctgcttcaggttttttgtttagttcacaacagatttggaaagttatccgagagaacaaggatcttgatcttcctgctcacaaggtaatggttgctacagttcgatgtgatgaaattgcaaacgagaagtttggatgcataacctcagacacagaatggttggatgtggagagtgctgtccaatctggtccagtacctggttttggaaaaaaacttggcaatatcgtcgacgttcacttgcaagagtatgacaaagaagctgtctattttgatgaagctgtaaggaaaggaaaacgacagcatttggagtccagaatactgaatcttgtccaacctgcattccagaaaatgttgactcatctgcgtgtgaaggctctagaaaaatttaaaactggtcttaattcatctttggagagtggaaaaggattcgcagtatctgctcgagacaatactgaatgctctctcaaagaatttgaacaaggctgtgcagtgtttagccatgacaaggattcaattccaagggtctggacaggaaaggaagatgttcgtgcaatagcaaaggaagctcgatctgcggctctcaaacttctgtctgtaatggcggccattcgctgggatgacgagccagataggattgaaagcatcctcacttcaacacttctggaaggctctgttgtatcaaagattgcaagtgctgcttctgctgatccacttgcttctaccacttgggaagagattgctccaaagcatacaatgattaccccgtctcagtgcaagtcactgtggaaacaatttaaagcagaaactgagttcacgattacacaagcagtatccacacagcaagctcacaggcgcggtaatagtaaactgcctcctccttgggcaatcgtggccattgctattcttggtttcaatgagatcatggtgcttattaggaatcccatttatctgttcttgctatttgtgggctacttgatggtcaaagctttggcgatgcagctagatgtcagcagagaattccagaatggagtggttcctggaataatctctgtgtcggtgaagctcctaccagcgatacagaacctggtgaacaaagtggcagccgagcagcaagctgagcaccagcagcagcacccgcaccctcaccctcacactcaggccccaggacccccacagccacagatgcagccgccgccgctgctcctgagcccgagaagccccatgagcgagctgcggaggctgcacatgccgcgcagcccgcgcagcccgcgcaaggtggcgtcgccggcgccatcctcgtcgtcgtcatcgtctgccgtgtcgtcccctaggcacgttggcgaggaccagaagccaagaccaggggcagtcggggcgcctgagaacgaggccaccgtcgccgactcgatagtgtgatccacgcaccagccatcgtggcgcgcgtttgactgctataggtacaaggtatggagtatgaactatggaccttctgctgtctcctatttcaatgcattatgtatagtgattatcgttatgcttcagtaggatatcaaggcagaaataatgcaggaccctcttctgccgtgcaatcctttagtttttgcaaggagagggaggggataatgcatagatggacaattgctacctggcaccatttttcagcatatgtatagaaaggagctacccatttgaaactgaaagtcgtaggcattgtttaattaagtgcgctagaaataccccagccgcattcagctctttttatatatatgctaacaccgtaatctaatgtttaaacgctatccggttcattggctacaactgtcaatgatatgtaccgagacttattacttcatagctatcggtaatctatctactacgacttgtagg

SEQ ID NO: 2975 - DNA, 2517 bp, Zea Mays
atggaggagagcgacgcggcggagggggtggcggtgcagctgatcgacggcgagggcgagttcgcggccgagggggcggagcggttcatggcggccgccggcgtcgccgggtgcgggctctcctacgccgtcgtctccatcatggggccacagagcagcggaaagagtaccttgttgaatcaattatttggtaccaattttagggagatggatgcattcagaggaaggagtcaaactactaaaggtatctggatagcacgctgtgttggtgttgagccttgtactgttgtattggatcttgagggtaccgatggaagagagagaggagaggatgacactgcatttgagaagcaaagttcgttatttgctcttgcaatttcagatatagttctaattaacatgtggtgccatgatattggccgtgagcaagctgccaataaaccactcctaaagacagtatttcagactccacttgaacatctagaaccagttctaagggaggatatacaaaagatatggaactctgttgccaagccagaggcacacaaagacacccctatcaatgaattcttcaatgtgcaagttactgcattgtccagttttgaggaaaaagaggaccagtttagggaacaggttcaacaacttaggcagagattttcaaattcaattgcaccaggaggtcttgcaggtgatagaagaggagtagttcctgcttcaggttttttgtttagttcacaacagatttggaaagttatccgagagaacaaggatcttgatcttcctgctcacaaggtaatggttgctacagttcgatgtgatgaaattgcaaacgagaagtttggatgcataacctcagacacagaatggttggatgtggagagtgctgtccaatctggtccagtacctggttttggaaaaaaacttggcaatatcgtcgacgttcacttgcaagagtatgacaaagaagctgtctattttgatgaagctgtaaggaaaggaaaacgacagcatttggagtccagaatactgaatcttgtccaacctgcattccagaaaatgttgactcatctgcgtgtgaaggctctagaaaaatttaaaactggtcttaattcatctttggagagtggaaaaggattcgcagtatctgctcgagacaatactgaatgctctctcaaagaatttgaacaaggctgtgcagtgtttagccatgacaaggattcaattccaagggtctggacaggaaaggaagatgttcgtgcaatagcaaaggaagctcgatctgcggctctcaaacttctgtctgtaatggcggccattcgctgggatgacgagccagataggattgaaagcatcctcacttcaacacttctggaaggctctgttgtatcaaagattgcaagtgctgcttctgctgatccacttgcttctaccacttgggaagagattgctccaaagcatacaatgattaccccgtctcagtgcaagtcactgtggaaacaatttaaagcagaaactgagttcacgattacacaagcagtatccacacagcaagctcacaggcgcggtaatagtaaactgcctcctccttgggcaatcgtggccattgctattcttggtttcaatgagatcatggtgcttattaggaatcccatttatctgttcttgctatttgtgggctacttgatggtcaaagctttggcgatgcagctagatgtcagcagagaattccagaatggagtggttcctggaataatctctgtgtcggtgaagctcctaccagcgatacagaacctggtgaacaaagtggcagccgagcagcaagctgagcaccagcagcagcacccgcaccctcaccctcacactcaggccccaggacccccacagccacagatgcagccgccgccgctgctcctgagcccgagaagccccatgagcgagctgcggaggctgcacatgccgcgcagcccgcgcagcccgcgcaaggtggcgtcgccggcgccatcctcgtcgtcgtcatcgtctgccgtgtcgtcccctaggcacgttggcgaggaccagaagccaagaccaggggcagtcggggcgcctgagaacgaggccaccgtcgccgactcgatagtgtgatccacgcaccagccatcgtggcgcgcgtttgactgctataggtacaagtaggatatcaaggcagaaataatgcaggaccctcttctgccgtgcaatcctttagtttttgcaaggagagggaggggataatgcatagatggacaattgctacctggcaccatttttcagcatatgtatagaaaggagctacccatttgaaactgaaagtcgtaggcattgtttaattaagtgcgctagaaataccccagccgcattcagctctttttatatatatgctaacaccgtaatctaatgtttaaacgctatccggttcattggctacaactgtcaatgatatgtaccgagacttattacttcatagctatcggtaatctatctactacgacttgtagg

SEQ ID NO: 2976 - DNA, 1814 bp, Zea Mays
gaggacgaccggcgggtgggaggcggttgctctcccggcctgtgatgcttcgggtcggcgtcgcactcctcacccccaacttcgtcgacacggtaatggttgctacagttcgatgtgatgaaattgcaaacgagaagtttggatgcataacctcagacacagaatggttggatgtggagagtgctgtccaatctggtccagtacctggttttggaaaaaaacttggcaatatcgtcgacgttcacttgcaagagtatgacaaagaagctgtctattttgatgaagctgtaaggaaaggaaaacgacagcatttggagtccagaatactgaatcttgtccaacctgcattccagaaaatgttgactcatctgcgtgtgaaggctctagaaaaatttaaaactggtcttaattcatctttggagagtggaaaaggattcgcagtatctgctcgagacaatactgaatgctctctcaaagaatttgaacaaggctgtgcagtgtttagccatgacaaggattcaattccaagggtctggacaggaaaggaagatgttcgtgcaatagcaaaggaagctcgatctgcggctctcaaacttctgtctgtaatggcggccattcgctgggatgacgagccagataggattgaaagcatcctcacttcaacacttctggaaggctctgttgtatcaaagattgcaagtgctgcttctgctgatccacttgcttctaccacttgggaagagattgctccaaagcatacaatgattaccccgtctcagtgcaagtcactgtggaaacaatttaaagcagaaactgagttcacgattacacaagcagtatccacacagcaagctcacaggcgcggtaatagtaaactgcctcctccttgggcaatcgtggccattgctattcttggtttcaatgagatcatggtgcttattaggaatcccatttatctgttcttgctatttgtgggctacttgatggtcaaagctttggcgatgcagctagatgtcagcagagaattccagaatggagtggttcctggaataatctctgtgtcggtgaagctcctaccagcgatacagaacctggtgaacaaagtggcagccgagcagcaagctgagcaccagcagcagcacccgcaccctcaccctcacactcaggccccaggacccccacagccacagatgcagccgccgccgctgctcctgagcccgagaagccccatgagcgagctgcggaggctgcacatgccgcgcagcccgcgcagcccgcgcaaggtggcgtcgccggcgccatcctcgtcgtcgtcatcgtctgccgtgtcgtcccctaggcacgttggcgaggaccagaagccaagaccaggggcagtcggggcgcctgagaacgaggccaccgtcgccgactcgatagtgtgatccacgcaccagccatcgtggcgcgcgtttgactgctataggtacaaggatatcaaggcagaaataatgcaggaccctcttctgccgtgcaatcctttagtttttgcaaggagagggaggggataatgcatagatggacaattgctacctggcaccatttttcagcatatgtatagaaaggagctacccatttgaaactgaaagtcgtaggcattgtttaattaagtgcgctagaaataccccagccgcattcagctctttttatatatatgctaacaccgtaatctaatgtttaaacgctatccggttcattggctacaactgtcaatgatatgtaccgagacttattacttcatagctatcggtaatctatctactacgacttgtagg

SEQ ID NO: 2977 - DNA, 702 bp, Zea Mays
ggacgaccggcgggtgggaggcggttgctctcccggcctgtgatgcttcgggtcggcgtcgcactcctcacccccaacttcgtcgacacggtaatggttgctacagttcgatgtgatgaaattgcaaacgagaagtttggatgcataacctcagacacagaatggttggatgtggagagtgctgtccaatctggtccagtacctggttttggaaaaaaacttggcaatatcgtcgacgttcacttgcaagagtatgacaaagaagctgtctattttgatgaagctgtaaggaaaggaaaacgacagcatttggagtccagaatactgaatcttgtccaacctgcattccagaaaatgttgactcatctgcgtgtgaaggctctagaaaaatttaaaactggtcttaattcatctttggagagtggaaaaggattcgcagtatctgctcgagacaatactgaatgctctctcaaagaatttgaacaaggctgtgcagatgctataatcaagcaagcgaactgggactgctctaaaatgctagagaaagttcggcgtgatattgaagatcatgcactttcaattcgtgaaagcaagctatccgaaatgacaagacacgctaaggttatgtatggcaagctgaaagagattttaatcactagcttagcaatgcataattttcttctagatttatttgcatatctg

SEQ ID NO: 2978 - DNA, 1836 bp, Zea Mays
atccctctctagtctctaccctttccgcctcggcacctccccacccctctcgccttcgcttcgtcgccacggcgagccccacgccgccgatcggggcgccgccagcggcggcggcgcccgatccgatggaagcggaggtggggccgccgaatccgccgcggccggagccagccggatcggagcccgacgacgcgcgcctctccccgcctcctcctgctcctgctccgccgcctccgcccccgcctcctcccgccgccgaggctgccgccgcgcccaccgcctccgcggccttctcgctgcaggctccagctccggcgccggcggaggcgaacggcagctccgacaggaagaggaggaggaaggcggaggacggggacgggtgcaagacctgcagctgcaagaagtccaggtgcctcaagctttactgtgtgtgctttgcttctgggttacattgtactgaatcatgtggatgtgaaccttgtcataacaagccacaattgcaaggtactctgcggatggcaacagttttacctctgaaacctgtccaaacattcgaagctggccaagatatagtgtcataaggtctcctatggatcttattagaagaaaatgcacatgcaagaagtcaggctgccttaagaagtactgcgactgctaccagggaggggcaggatgctccatcaactgtaaatgcgatgattgtagaaacccatttgggagaaaagtcggcgttattttggacggtaaaagcagtcttactgcacctatactgcacgaaagaaacgggactgaagttgactcaagcgacgaggaagacgacttctacatgaatcgacagctctccccaatacctccgtctccggtgtctagggagtcttcgttccaacaggagactctagtcggcgtcgaggtccagaccatgaacgggcacctgtaccccaaaccactgacccaggtgcgccccgagccgtcgtcctggcagctctcccggaggcccatcgaggaaccgcgcggggagatatggcgcttctcgaggaggccgagcgaggacgggacctctgatgccatggaagtgcacgccgtcgccccgagagagagcaagaaggcggcagaggtccgcggggacaggttcggcatcccgcggtgcatcgaggtgatgagcgccatggcggagctgtcgccggtggagaagtcgctggcgcccgacgtcttcttggacgcgagcaaccgggagatcttcctctcgctgagtgtagatattaggccaatctggctgaggcgcaagatgaagagccttgtctagctagacgctacaacagagatagcctgaggaattttcgtcgtcggcgtatacctaataaacccgtgctgtactgtagatatataatatatgtgccttagattcagagttgagttctggaccgatgggtgtaatataccttagtgctaatttatggtgcatgctgttatattggagttcttcctatggtaagttcgttatgatttcagctagaagtttaacagtaaattatctctctctctcttccttggatagatatgttcatgaacctgtttctgacgtgcaaggtgtcattgactgttgactttctcattccatttggccaatggtcgcagtgtttcttggtgcccatagcctgatattaaaccatgttagggcttgttcggtttcttctcaatccatctggattgagtgagatttggtaggtttaaatctcaaacaagtcaaactttttcttatttttttccaatttcattcaatccatgttgttggtcacttgttcttaaatactatgaatcaagaacaatacaacacaa

SEQ ID NO: 2979 - DNA, 2254 bp, Zea Mays
atccctctctagtctctaccctttccgcctcggcacctccccacccctctcgccttcgcttcgtcgccacggcgagccccacgccgccgatcggggcgccgccagcggcggcggcgcccgatccgatggaagcggaggtggggccgccgaatccgccgcggccggagccagccggatcggagcccgacgacgcgcgcctctccccgcctcctcctgctcctgctccgccgcctccgcccccgcctcctcccgccgccgaggctgccgccgcgcccaccgcctccgcggccttctcgctgcaggctccagctccggcgccggcggaggcgaacggcagctccgacaggaagaggaggaggaaggcggaggacggggacgggtgcaagacctgcagctgcaagaagtccaggtgcctcaagctgtaagttgccctattactccccgtgcttgcagttgcagccttctctattgtctcgttcgcccacgagggagggagggatggactaggatgcttcaccattttggttcggtgctgatttggatccctgtcactgacgaattcagtgttttttaggcatgtttagatctgacagtctcacgtttcaaatgtggcaaaatgctgcagttttattgagctcccagtagttcggaattcgatatccattaacgagaaggaaattgccaagatcaagctaccgatatgttctagaaccatggacgaaccagtgattaatctactgagttgaaaactctgcgctaagcaaactgggctggttcatgcacacacctgtggccctgtggacgcttagtgtgtgccattgcctgctcaatgttactgtgtgtgctttgcttctgggttacattgtactgaatcatgtggatgtgaaccttgtcataacaagccacaattgcaaggtactctgcggatggcaacagttttacctctgaaacctgtccaaacattcgaagctggccaagatatagtggaacaagtcataaggtctcctatggatcttattagaagaaaatgcacatgcaagaagtcaggctgccttaagaagtactgcgactgctaccagggaggggcaggatgctccatcaactgtaaatgcgatgattgtagaaacccatttgggagaaaagtcggcgttattttggacggtaaaagcagtcttactgcacctatactgcacgaaagaaacgggactgaagttgactcaagcgacgaggaagacgacttctacatgaatcgacagctctccccaatacctccgtctccggtgtctagggagtcttcgttccaacaggagactctagtcggcgtcgaggtccagaccatgaacgggcacctgtaccccaaaccactgacccaggtgcgccccgagccgtcgtcctggcagctctcccggaggcccatcgaggaaccgcgcggggagatatggcgcttctcgaggaggccgagcgaggacgggacctctgatgccatggaagtgcacgccgtcgccccgagagagagcaagaaggcggcagaggtccgcggggacaggttcggcatcccgcggtgcatcgaggtgatgagcgccatggcggagctgtcgccggtggagaagtcgctggcgcccgacgtcttcttggacgcgagcaaccgggagatcttcctctcgctgagtgtagatattaggccaatctggctgaggcgcaagatgaagagccttgtctagctagacgctacaacagagatagcctgaggaattttcgtcgtcggcgtatacctaataaacccgtgctgtactgtagatatataatatatgtgccttagattcagagttgagttctggaccgatgggtgtaatataccttagtgctaatttatggtgcatgctgttatattggagttcttcctatggtaagttcgttatgatttcagctagaagtttaacagtaaattatctctctctctcttccttggatagatatgttcatgaacctgtttctgacgtgcaaggtgtcattgactgttgactttctcattccatttggccaatggtcgcagtgtttcttggtgcccatagcctgatattaaaccatgttagggcttgttcggtttcttctcaatccatctggattgagtgagatttggtaggtttaaatctcaaacaagtcaaactttttcttatttttttccaatttcattcaatccatgttgttggtcacttgttcttaaatactatgaatcaagaacaatacaacacaa

SEQ ID NO: 2980 - DNA, 1761 bp, Zea Mays
atccctctctagtctctaccctttccgcctcggcacctccccacccctctcgccttcgcttcgtcgccacggcgagccccacgccgccgatcggggcgccgccagcggcggcggcgcccgatccgatggaagcggaggtggggccgccgaatccgccgcggccggagccagccggatcggagcccgacgacgcgcgcctctccccgcctcctcctgctcctgctccgccgcctccgcccccgcctcctcccgccgccgaggctgccgccgcgcccaccgcctccgcggccttctcgctgcaggctccagctccggcgccggcggaggcgaacggcagctccgacaggaagaggaggaggaaggcggaggacggggacgggtgcaagacctgcagctgcaagaagtccagccacaattgcaaggtactctgcggatggcaacagttttacctctgaaacctgtccaaacattcgaagctggccaagatatagtggaacaagtcataaggtctcctatggatcttattagaagaaaatgcacatgcaagaagtcaggctgccttaagaagtactgcgactgctaccagggaggggcaggatgctccatcaactgtaaatgcgatgattgtagaaacccatttgggagaaaagtcggcgttattttggacggtaaaagcagtcttactgcacctatactgcacgaaagaaacgggactgaagttgactcaagcgacgaggaagacgacttctacatgaatcgacagctctccccaatacctccgtctccggtgtctagggagtcttcgttccaacaggagactctagtcggcgtcgaggtccagaccatgaacgggcacctgtaccccaaaccactgacccaggtgcgccccgagccgtcgtcctggcagctctcccggaggcccatcgaggaaccgcgcggggagatatggcgcttctcgaggaggccgagcgaggacgggacctctgatgccatggaagtgcacgccgtcgccccgagagagagcaagaaggcggcagaggtccgcggggacaggttcggcatcccgcggtgcatcgaggtgatgagcgccatggcggagctgtcgccggtggagaagtcgctggcgcccgacgtcttcttggacgcgagcaaccgggagatcttcctctcgctgagtgtagatattaggccaatctggctgaggcgcaagatgaagagccttgtctagctagacgctacaacagagatagcctgaggaattttcgtcgtcggcgtatacctaataaacccgtgctgtactgtagatatataatatatgtgccttagattcagagttgagttctggaccgatgggtgtaatataccttagtgctaatttatggtgcatgctgttatattggagttcttcctatggtaagttcgttatgatttcagctagaagtttaacagtaaattatctctctctctcttccttggatagatatgttcatgaacctgtttctgacgtgcaaggtgtcattgactgttgactttctcattccatttggccaatggtcgcagtgtttcttggtgcccatagcctgatattaaaccatgttagggcttgttcggtttcttctcaatccatctggattgagtgagatttggtaggtttaaatctcaaacaagtcaaactttttcttatttttttccaatttcattcaatccatgttgttggtcacttgttcttaaatactatgaatcaagaacaatacaacacaa

SEQ ID NO: 2981 - DNA, 1831 bp, Zea Mays
atccctctctagtctctaccctttccgcctcggcacctccccacccctctcgccttcgcttcgtcgccacggcgagccccacgccgccgatcggggcgccgccagcggcggcggcgcccgatccgatggaagcggaggtggggccgccgaatccgccgcggccggagccagccggatcggagcccgacgacgcgcgcctctccccgcctcctcctgctcctgctccgccgcctccgcccccgcctcctcccgccgccgaggctgccgccgcgcccaccgcctccgcggccttctcgctgcaggctccagctccggcgccggcggaggcgaacggcagctccgacaggaagaggaggaggaaggcggaggacggggacgggtgcaagacctgcagctgcaagaagtccagttactgtgtgtgctttgcttctgggttacattgtactgaatcatgtggatgtgaaccttgtcataacaagccacaattgcaaggtactctgcggatggcaacagttttacctctgaaacctgtccaaacattcgaagctggccaagatatagtggaacaagtcataaggtctcctatggatcttattagaagaaaatgcacatgcaagaagtcaggctgccttaagaagtactgcgactgctaccagggaggggcaggatgctccatcaactgtaaatgcgatgattgtagaaacccatttgggagaaaagtcggcgttattttggacggtaaaagcagtcttactgcacctatactgcacgaaagaaacgggactgaagttgactcaagcgacgaggaagacgacttctacatgaatcgacagctctccccaatacctccgtctccggtgtctagggagtcttcgttccaacaggagactctagtcggcgtcgaggtccagaccatgaacgggcacctgtaccccaaaccactgacccaggtgcgccccgagccgtcgtcctggcagctctcccggaggcccatcgaggaaccgcgcggggagatatggcgcttctcgaggaggccgagcgaggacgggacctctgatgccatggaagtgcacgccgtcgccccgagagagagcaagaaggcggcagaggtccgcggggacaggttcggcatcccgcggtgcatcgaggtgatgagcgccatggcggagctgtcgccggtggagaagtcgctggcgcccgacgtcttcttggacgcgagcaaccgggagatcttcctctcgctgagtgtagatattaggccaatctggctgaggcgcaagatgaagagccttgtctagctagacgctacaacagagatagcctgaggaattttcgtcgtcggcgtatacctaataaacccgtgctgtactgtagatatataatatatgtgccttagattcagagttgagttctggaccgatgggtgtaatataccttagtgctaatttatggtgcatgctgttatattggagttcttcctatggtaagttcgttatgatttcagctagaagtttaacagtaaattatctctctctctcttccttggatagatatgttcatgaacctgtttctgacgtgcaaggtgtcattgactgttgactttctcattccatttggccaatggtcgcagtgtttcttggtgcccatagcctgatattaaaccatgttagggcttgttcggtttcttctcaatccatctggattgagtgagatttggtaggtttaaatctcaaacaagtcaaactttttcttatttttttccaatttcattcaatccatgttgttggtcacttgttcttaaatactatgaatcaagaacaatacaacacaa

SEQ ID NO: 2982 - DNA, 1485 bp, Zea Mays
cctctttccccttttctgcaaagtttccgccccgcgcccggtttcctcttttgtttcgttgcgtgcggaggaaggcggaggacggggacgggtgcaagacctgcagctgcaagaagtccaggtgcctcaagctccacaattgcaaggtactctgcggatggcaacagttttacctctgaaacctgtccaaacattcgaagctggccaagatatagtggaacaagtcataaggtctcctatggatcttattagaagaaaatgcacatgcaagaagtcaggctgccttaagaagtactgcgactgctaccagggaggggcaggatgctccatcaactgtaaatgcgatgattgtagaaacccatttgggagaaaagtcggcgttattttggacggtaaaagcagtcttactgcacctatactgcacgaaagaaacgggactgaagttgactcaagcgacgaggaagacgacttctacatgaatcgacagctctccccaatacctccgtctccggtgtctagggagtcttcgttccaacaggagactctagtcggcgtcgaggtccagaccatgaacgggcacctgtaccccaaaccactgacccaggtgcgccccgagccgtcgtcctggcagctctcccggaggcccatcgaggaaccgcgcggggagatatggcgcttctcgaggaggccgagcgaggacgggacctctgatgccatggaagtgcacgccgtcgccccgagagagagcaagaaggcggcagaggtccgcggggacaggttcggcatcccgcggtgcatcgaggtgatgagcgccatggcggagctgtcgccggtggagaagtcgctggcgcccgacgtcttcttggacgcgagcaaccgggagatcttcctctcgctgagtgtagatattaggccaatctggctgaggcgcaagatgaagagccttgtctagctagacgctacaacagagatagcctgaggaattttcgtcgtcggcgtatacctaataaacccgtgctgtactgtagatatataatatatgtgccttagattcagagttgagttctggaccgatgggtgtaatataccttagtgctaatttatggtgcatgctgttatattggagttcttcctatggtaagttcgttatgatttcagctagaagtttaacagtaaattatctctctctctcttccttggatagatatgttcatgaacctgtttctgacgtgcaaggtgtcattgactgttgactttctcattccatttggccaatggtcgcagtgtttcttggtgcccatagcctgatattaaaccatgttagggcttgttcggtttcttctcaatccatctggattgagtgagatttggtaggtttaaatctcaaacaagtcaaactttttcttatttttttccaatttcattcaatccatgttgttggtcacttgttcttaaatactatgaatcaagaacaatacaacacaa

SEQ ID NO: 2983 - DNA, 3129 bp, Zea Mays
ccccgtccccgtccccgcgaacccgacggggattaaatttcccccatttagatccccgcggggactaaatttgtcccatacccgtcccctaataggggaattcccgcggggaatcggggatcgggtccccattgccatctctacctgagatgctcatccgcccttccttctcggcacgctcgcgcaggaaggctggagagctacggacggccgacgggaacaaggagagacgtcgcggactcgtctgaccagtcaccgcccttatccagcgggaccaacccaggcccacactgacgacgccccccatctcgcatctcgcgtactatttccacaattccaccgacccgtcgtcgcgccactccgtcttgctcaacaccagtcaccactgctctccaagcctccaccagcgtccagccgaaccatcgccaccgcaggatggcctcccgcctcctcctccacctccacctgcgccgccgcgggcgcgggatcccgggctgccccgtgcccgcgctacccctccacgccgcgcggctcctctcctcctccccaccaaccgcagctgcggcctcgtcgtcggcggcgggcggcgggggcatcgagaaggtgctggtggcgaaccggggcgagatcgcgtgccgggtcatgcgcaccgcgcgccgcctcggggtcgccaccgtggccgtgtacagcgacgccgaccgcggggcgctgcacgtgcgcgccgccgacgaggccgtcaggatcggcccgccgcccgcgcgggagagctacctcaacgccagggccatcatcgaggccgccctccgcaccggcgcccaggctatccacccgggatacggtttcctttcagagagtgctgatttcgcgcagctctgtgaagccgaggggctcaaattcattggaccaccagcatctgcaatccgagacatgggcgataagagtgcatccaagaggatcatgggtgctgctggcgtgccgctggttccagggtaccatggggctgaccaggacgttgagctgttgaaactcgaagcggataaaatcggttatcctgttttaatcaaacccacccatggtggagggggcaaggggatgagaatagtcgaaaggcctgatgaatttgtggattctgtactgagcgctcaacgggaagctgcagcatcgtttggtgtaaacacactattgattgagaagtatattactcaaccaagacacgtagaagtccaggtatttggcgaccaacatggaaatgcgatatacctttatgagagagactgcagtctacagagaaggcatcagaagatcatcgaggaagctccagctccaaatgtgccagctgagtttcggtctcatattggtggagctgctgtatctgcagcaaagttggttactacaatgctggaacagtggagtttattgtggacactctttctggagagttctacttcatggagatgaatactcgactccaggttgaacacccagtgacagagatgattgttggtcaagatcttgtggagtggcaaatacgtgttgcgaatggagaacgactaccattatctcaggagcaggttccattaaatggacatgcatttgaagcacggatatatgctgaaaatgttccaagagggtttctccctgcaacaggaaccttacatcactaccgaccagtcccttctgacccaactgtaagagttgaaactggagtcgaagaaggagataccgtcagcatgcattatgatccaatgatagccaaacttgtagtatggggtgaaagtcgcacggctgcactagtcaagctaaagaagtgtttatcaacctttcaggtttgccaaccaatgttgatttcctccaagaactcgcaagccacagtgcctttgaaaaaggcctagttgacactcacttcattgaacgttataaagatgaccttttgagtatttctacaaagtcctcaaaagaatctcatggtgtagctgagcttggtgcaattttggctgctgcatgcatttgcaagaaggaacacattacatctaaagaatcactacgagccaacaagtcactatctgtatggtacaataatccacctttcaggatgcatcactttgctaggcatcccctggatcttgagttggaagagaatgatggattcagtgagaaacttcttaaactgttcattactcataagtttgatggaagctacttcatcgagacagaagatggcacttctggtttagatgtcaaagttgatcacaagggtgaccacgattttcgtgtggatgtttctggtctgcaaactgatgtgactctagcatcttattcaaagggaaacagcaaacacatacatgtctggcatgggaatcatcaccaccattacagacagactgtaagagctgagcatgcagttgaagatagctcccaacctagtcatgcttctgaagggaagtcgcatccaaaagggagtgttctggcaccgatggctggcttggttgtgaaagttttgcttgaagacggggctcaggtggacgcagggcagcctgtcatggttatggaagcaatgaagatggagcatgttgtgaaggcgcctcgtgccggatacgtgagtggcctgaaggttactgcaggccaacaagtttttgactccagtgtccttttcacaatcaaggacagctctgcaaactgagatggagcgatcactgccctagagtagttgcactgcaactgcatcaagcacccagcggatgctcgtccagatagagaagcgaaggaaataaactgctgggttcgtctgcgggcaatccaatccggcagggcaagcagacggcgcatggtgtttcccggcttgatgcgaatccatcatccgccgcaacaattccattgcgtagtgtacacgaacatgaaactgtaccacgctgagcaagaggaattcttgtttgatttgtgcaatgaaataagttgattccatcaccgttccatttctcataattagtaataataatgaataattagtaataatataatgaggaatgtgtttattttaccaattttatggaatggactcgtgatgtatcacctcatctagaatcaattgattctttaaaccaaacactctctaagcaaatgagatcagtt

SEQ ID NO: 2984 - DNA, 2989 bp, Zea Mays
ggggaatcggggatcgggtccccattgccatctctacctgagatgctcatccgcccttccttctcggcacgctcgcgcaggaaggctggagagctacggacggccgacgggaacaaggagagacgtcgcggactcgtctgaccagtcaccgcccttatccagcgggaccaacccaggcccacactgacgacgccccccatctcgcatctcgcgtactatttccacaattccaccgacccgtcgtcgcgccactccgtcttgctcaacaccagtcaccactgctctccaagcctccaccagcgtccagccgaaccatcgccaccgcaggatggcctcccgcctcctcctccacctccacccgcgctacccctccacgccgcgcggctcctctcctcctccccaccaaccgcagctgcggcctcgtcgtcggcggcgggcggcgggggcatcgagaaggtgctggtggcgaaccggggcgagatcgcgtgccgggtcatgcgcaccgcgcgccgcctcggggtcgccaccgtggccgtgtacagcgacgccgaccgcggggcgctgcacgtgcgcgccgccgacgaggccgtcaggatcggcccgccgcccgcgcgggagagctacctcaacgccagggccatcatcgaggccgccctccgcaccggcgcccaggctatccacccgggatacggtttcctttcagagagtgctgatttcgcgcagctctgtgaagccgaggggctcaaattcattggaccaccagcatctgcaatccgagacatgggcgataagagtgcatccaagaggatcatgggtgctgctggcgtgccgctggttccagggtaccatggggctgaccaggacgttgagctgttgaaactcgaagcggataaaatcggttatcctgttttaatcaaacccacccatggtggagggggcaaggggatgagaatagtcgaaaggcctgatgaatttgtggattctgtactgagcgctcaacgggaagctgcagcatcgtttggtgtaaacacactattgattgagaagtatattactcaaccaagacacgtagaagtccaggtatttggcgaccaacatggaaatgcgatatacctttatgagagagactgcagtctacagagaaggcatcagaagatcatcgaggaagctccagctccaaatgtgccagctgagtttcggtctcatattggtggagctgctgtatctgcagcaaagttggttactacaatgctggaacagtggagtttattgtggacactctttctggagagttctacttcatggagatgaatactcgactccaggttgaacacccagtgacagagatgattgttggtcaagatcttgtggagtggcaaatacgtgttgcgaatggagaacgactaccattatctcaggagcaggttccattaaatggacatgcatttgaagcacggatatatgctgaaaatgttccaagagggtttctccctgcaacaggaaccttacatcactaccgaccagtcccttctgacccaactgtaagagttgaaactggagtcgaagaaggagataccgtcagcatgcattatgatccaatgatagccaaacttgtagtatggggtgaaagtcgcacggctgcactagtcaagctaaagaagtgtttatcaacctttcagattgcaggtttgccaaccaatgttgatttcctccaagaactcgcaagccacagtgcctttgaaaaaggcctagttgacactcacttcattgaacgttataaagatgaccttttgagtatttctacaaagtcctcaaaagaatctcatggtgtagctgagcttggtgcaattttggctgctgcatgcatttgcaagaaggaacacattacatctaaagaatcactacgagccaacaagtcactatctgtatggtacaataatccacctttcaggatgcatcactttgctaggcatcccctggatcttgagttggaagagaatgatggattcagtgagaaacttcttaaactgttcattactcataagtttgatggaagctacttcatcgagacagaagatggcacttctggtttagatgtcaaagttgatcacaagggtgaccacgattttcgtgtggatgtttctggtctgcaaactgatgtgactctagcatcttattcaaagggaaacagcaaacacatacatgtctggcatgggaatcatcaccaccattacagacagactgtaagagctgagcatgcagttgaagatagctcccaacctagtcatgcttctgaagggaagtcgcatccaaaagggagtgttctggcaccgatggctggcttggttgtgaaagttttgcttgaagacggggctcaggtggacgcagggcagcctgtcatggttatggaagcaatgaagatggagcatgttgtgaaggcgcctcgtgccggatacgtgagtggcctgaaggttactgcaggccaacaagtttttgactccagtgtccttttcacaatcaaggacagctctgcaaactgagatggagcgatcactgccctagagtagttgcactgcaactgcatcaagcacccagcggatgctcgtccagatagagaagcgaaggaaataaactgctgggttcgtctgcgggcaatccaatccggcagggcaagcagacggcgcatggtgtttcccggcttgatgcgaatccatcatccgccgcaacaattccattgcgtagtgtacacgaacatgaaactgtaccacgctgagcaagaggaattcttgtttgatttgtgcaatgaaataagttgattccatcaccgttccatttctcataattagtaataataatgaataattagtaataatataatgaggaatgtgtttattttaccaattttatggaatggactcgtgatgtatcacctcatctagaatcaattgattctttaaaccaaacactctctaagcaaatgagatcagtt

SEQ ID NO: 2985 - DNA, 2979 bp, Zea Mays
cggggatcgggtccccattgccatctctacctgagatgctcatccgcccttccttctcggcacgctcgcgcaggaaggctggagagctacggacggccgacgggaacaaggagagacgtcgcggactcgtctgaccagtcaccgcccttatccagcgggaccaacccaggcccacactgacgacgccccccatctcgcatctcgcgtactatttccacaattccaccgacccgtcgtcgcgccactccgtcttgctcaacaccagtcaccactgctctccaagcctccaccagcgtccagccgaaccatcgccaccgcaggatggcctcccgcctcctcctccacctccacccgcgctacccctccacgccgcgcggctcctctcctcctccccaccaaccgcagctgcggcctcgtcgtcggcggcgggcggcgggggcatcgagaaggtgctggtggcgaaccggggcgagatcgcgtgccgggtcatgcgcaccgcgcgccgcctcggggtcgccaccgtggccgtgtacagcgacgccgaccgcggggcgctgcacgtgcgcgccgccgacgaggccgtcaggatcggcccgccgcccgcgcgggagagctacctcaacgccagggccatcatcgaggccgccctccgcaccggcgcccaggctatccacccgggatacggtttcctttcagagagtgctgatttcgcgcagctctgtgaagccgaggggctcaaattcattggaccaccagcatctgcaatccgagacatgggcgataagagtgcatccaagaggatcatgggtgctgctggcgtgccgctggttccagggtaccatggggctgaccaggacgttgagctgttgaaactcgaagcggataaaatcggttatcctgttttaatcaaacccacccatggtggagggggcaaggggatgagaatagtcgaaaggcctgatgaatttgtggattctgtactgagcgctcaacgggaagctgcagcatcgtttggtgtaaacacactattgattgagaagtatattactcaaccaagacacgtagaagtccaggtatttggcgaccaacatggaaatgcgatatacctttatgagagagactgcagtctacagagaaggcatcagaagatcatcgaggaagctccagctccaaatgtgccagctgagtttcggtctcatattggtggagctgctgtatctgcagcaaaggcagttggttactacaatgctggaacagtggagtttattgtggacactctttctggagagttctacttcatggagatgaatactcgactccaggttgaacacccagtgacagagatgattgttggtcaagatcttgtggagtggcaaatacgtgttgcgaatggagaacgactaccattatctcaggagcaggttccattaaatggacatgcatttgaagcacggatatatgctgaaaatgttccaagagggtttctccctgcaacaggaaccttacatcactaccgaccagtcccttctgacccaactgtaagagttgaaactggagtcgaagaaggagataccgtcagcatgcattatgatccaatgatagccaaacttgtagtatggggtgaaagtcgcacggctgcactagtcaagctaaagaagtgtttatcaacctttcaggtttgccaaccaatgttgatttcctccaagaactcgcaagccacagtgcctttgaaaaaggcctagttgacactcacttcattgaacgttataaagatgaccttttgagtatttctacaaagtcctcaaaagaatctcatggtgtagctgagcttggtgcaattttggctgctgcatgcatttgcaagaaggaacacattacatctaaagaatcactacgagccaacaagtcactatctgtatggtacaataatccacctttcaggatgcatcactttgctaggcatcccctggatcttgagttggaagagaatgatggattcagtgagaaacttcttaaactgttcattactcataagtttgatggaagctacttcatcgagacagaagatggcacttctggtttagatgtcaaagttgatcacaagggtgaccacgattttcgtgtggatgtttctggtctgcaaactgatgtgactctagcatcttattcaaagggaaacagcaaacacatacatgtctggcatgggaatcatcaccaccattacagacagactgtaagagctgagcatgcagttgaagatagctcccaacctagtcatgcttctgaagggaagtcgcatccaaaagggagtgttctggcaccgatggctggcttggttgtgaaagttttgcttgaagacggggctcaggtggacgcagggcagcctgtcatggttatggaagcaatgaagatggagcatgttgtgaaggcgcctcgtgccggatacgtgagtggcctgaaggttactgcaggccaacaagtttttgactccagtgtccttttcacaatcaaggacagctctgcaaactgagatggagcgatcactgccctagagtagttgcactgcaactgcatcaagcacccagcggatgctcgtccagatagagaagcgaaggaaataaactgctgggttcgtctgcgggcaatccaatccggcagggcaagcagacggcgcatggtgtttcccggcttgatgcgaatccatcatccgccgcaacaattccattgcgtagtgtacacgaacatgaaactgtaccacgctgagcaagaggaattcttgtttgatttgtgcaatgaaataagttgattccatcaccgttccatttctcataattagtaataataatgaataattagtaataatataatgaggaatgtgtttattttaccaattttatggaatggactcgtgatgtatcacctcatctagaatcaattgattctttaaaccaaacactctctaagcaaatgagatcagtt

SEQ ID NO: 2986 - DNA, 2912 bp, Zea Mays
cccccatctcgcatctcgcgtactatttccacaattccaccgacccgtcgtcgcgccactccgtcttgctcaacaccagtcaccactgctctccaagcctccaccagcgtccagccgaaccatcgccaccgcaggatggcctcccgcctcctcctccacctccacctgcgccgccgcgggcgcgggatcccgggctgccccgtgcccgcgctacccctccacgccgcgcggctcctctcctcctccccaccaaccgcagctgcggcctcgtcgtcggcggcgggcggcgggggcatcgagaaggtgctggtggcgaaccggggcgagatcgcgtgccgggtcatgcgcaccgcgcgccgcctcggggtcgccaccgtggccgtgtacagcgacgccgaccgcggggcgctgcacgtgcgcgccgccgacgaggccgtcaggatcggcccgccgcccgcgcgggagagctacctcaacgccagggccatcatcgaggccgccctccgcaccggcgcccaggctatccacccgggatacggtttcctttcagagagtgctgatttcgcgcagctctgtgaagccgaggggctcaaattcattggaccaccagcatctgcaatccgagacatgggcgataagagtgcatccaagaggatcatgggtgctgctggcgtgccgctggttccagggtaccatggggctgaccaggacgttgagctgttgaaactcgaagcggataaaatcggttatcctgttttaatcaaacccacccatggtggagggggcaaggggatgagaatagtcgaaaggcctgatgaatttgtggattctgtactgagcgctcaacgggaagctgcagcatcgtttggtgtaaacacactattgattgagaagtatattactcaaccaagacacgtagaagtccaggtatttggcgaccaacatggaaatgcgatatacctttatgagagagactgcagtctacagagaaggcatcagaagatcatcgaggaagctccagctccaaatgtgccagctgagtttcggtctcatattggtggagctgctgtatctgcagcaaagttggttactacaatgctggaacagtggagtttattgtggacactctttctggagagttctacttcatggagatgaatactcgactccaggttgaacacccagtgacagagatgattgttggtcaagatcttgtggagtggcaaatacgtgttgcgaatggagaacgactaccattatctcaggagcaggttccattaaatggacatgcatttgaagcacggatatatgctgaaaatgttccaagagggtttctccctgcaacaggaaccttacatcactaccgaccagtcccttctgacccaactggtgaaatatggacataccctatgaccaattatattactagttacatttcagtgttgcacaattaacatattcttcctcagtaagagttgaaactggagtcgaagaaggagataccgtcagcatgcattatgatccaatgatagccaaacttgtagtatggggtgaaagtcgcacggctgcactagtcaagctaaagaagtgtttatcaacctttcagattgcaggtttgccaaccaatgttgatttcctccaagaactcgcaagccacagtgcctttgaaaaaggcctagttgacactcacttcattgaacgttataaagatgaccttttgagtatttctacaaagtcctcaaaagaatctcatggtgtagctgagcttggtgcaattttggctgctgcatgcatttgcaagaaggaacacattacatctaaagaatcactacgagccaacaagtcactatctgtatggtacaataatccacctttcaggatgcatcactttgctaggcatcccctggatcttgagttggaagagaatgatggattcagtgagaaacttcttaaactgttcattactcataagtttgatggaagctacttcatcgagaagatggcacttctggtttagatgtcaaagttgatcacaagggtgaccacgattttcgtgtggatgtttctggtctgcaaactgatgtgactctagcatcttattcaaagggaaacagcaaacacatacatgtctggcatgggaatcatcaccaccattacagacagactgtaagagctgagcatgcagttgaagatagctcccaacctagtcatgcttctgaagggaagtcgcatccaaaagggagtgttctggcaccgatggctggcttggttgtgaaagttttgcttgaagacggggctcaggtggacgcagggcagcctgtcatggttatggaagcaatgaagatggagcatgttgtgaaggcgcctcgtgccggatacgtgagtggcctgaaggttactgcaggccaacaagtttttgactccagtgtccttttcacaatcaaggacagctctgcaaactgagatggagcgatcactgccctagagtagttgcactgcaactgcatcaagcacccagcggatgctcgtccagatagagaagcgaaggaaataaactgctgggttcgtctgcgggcaatccaatccggcagggcaagcagacggcgcatggtgtttcccggcttgatgcgaatccatcatccgccgcaacaattccattgcgtagtgtacacgaacatgaaactgtaccacgctgagcaagaggaattcttgtttgatttgtgcaatgaaataagttgattccatcaccgttccatttctcataattagtaataataatgaataattagtaataatataatgaggaatgtgtttattttaccaattttatggaatggactcgtgatgtatcacctcatctagaatcaattgattctttaaaccaaacactctctaagcaaatgagatcagtt

SEQ ID NO: 2987 - DNA, 2792 bp, Zea Mays
cccccatctcgcatctcgcgtactatttccacaattccaccgacccgtcgtcgcgccactccgtcttgctcaacaccagtcaccactgctctccaagcctccaccagcgtccagccgaaccatcgccaccgcaggatggcctcccgcctcctcctccacctccacccgcgctacccctccacgccgcgcggctcctctcctcctccccaccaaccgcagctgcggcctcgtcgtcggcggcgggcggcgggggcatcgagaaggtgctggtggcgaaccggggcgagatcgcgtgccgggtcatgcgcaccgcgcgccgcctcggggtcgccaccgtggccgtgtacagcgacgccgaccgcggggcgctgcacgtgcgcgccgccgacgaggccgtcaggatcggcccgccgcccgcgcgggagagctacctcaacgccagggccatcatcgaggccgccctccgcaccggcgcccaggctatccacccgggatacggtttcctttcagagagtgctgatttcgcgcagctctgtgaagccgaggggctcaaattcattggaccaccagcatctgcaatccgagacatgggcgataagagtgcatccaagaggatcatgggtgctgctggcgtgccgctggttccagggtaccatggggctgaccaggacgttgagctgttgaaactcgaagcggataaaatcggttatcctgttttaatcaaacccacccatggtggagggggcaaggggatgagaatagtcgaaaggcctgatgaatttgtggattctgtactgagcgctcaacgggaagctgcagcatcgtttggtgtaaacacactattgattgagaagtatattactcaaccaagacacgtagaagtccaggtatttggcgaccaacatggaaatgcgatatacctttatgagagagactgcagtctacagagaaggcatcagaagatcatcgaggaagctccagctccaaatgtgccagctgagtttcggtctcatattggtggagctgctgtatctgcagcaaagttggttactacaatgctggaacagtggagtttattgtggacactctttctggagagttctacttcatggagatgaatactcgactccaggttgaacacccagtgacagagatgattgttggtcaagatcttgtggagtggcaaatacgtgttgcgaatggagaacgactaccattatctcaggagcaggttccattaaatggacatgcatttgaagcacggatatatgctgaaaatgttccaagagggtttctccctgcaacaggaaccttacatcactaccgaccagtcccttctgacccaactgagttgaaactggagtcgaagaaggagataccgtcagcatgcattatgatccaatgatagccaaacttgtagtatggggtgaaagtcgcacggctgcactagtcaagctaaagaagtgtttatcaacctttcagattgcaggtttgccaaccaatgttgatttcctccaagaactcgcaagccacagtgcctttgaaaaaggcctagttgacactcacttcattgaacgttataaagatgaccttttgagtatttctacaaagtcctcaaaagaatctcatggtgtagctgagcttggtgcaattttggctgctgcatgcatttgcaagaaggaacacattacatctaaagaatcactacgagccaacaagtcactatctgtatggtacaataatccacctttcaggatgcatcactttgctaggcatcccctggatcttgagttggaagagaatgatggattcagtgagaaacttcttaaactgttcattactcataagtttgatggaagctacttcatcgagacagaagatggcacttctggtttagatgtcaaagttgatcacaagggtgaccacgattttcgtgtggatgtttctggtctgcaaactgatgtgactctagcatcttattcaaagggaaacagcaaacacatacatgtctggcatgggaatcatcaccaccattacagacagactgtaagagctgagcatgcagttgaagatagctcccaacctagtcatgcttctgaagggaagtcgcatccaaaagggagtgttctggcaccgatggctggcttggttgtgaaagttttgcttgaagacggggctcaggtggacgcagggcagcctgtcatggttatggaagcaatgaagatggagcatgttgtgaaggcgcctcgtgccggatacgtgagtggcctgaaggttactgcaggccaacaagtttttgactccagtgtccttttcacaatcaaggacagctctgcaaactgagatggagcgatcactgccctagagtagttgcactgcaactgcatcaagcacccagcggatgctcgtccagatagagaagcgaaggaaataaactgctgggttcgtctgcgggcaatccaatccggcagggcaagcagacggcgcatggtgtttcccggcttgatgcgaatccatcatccgccgcaacaattccattgcgtagtgtacacgaacatgaaactgtaccacgctgagcaagaggaattcttgtttgatttgtgcaatgaaataagttgattccatcaccgttccatttctcataattagtaataataatgaataattagtaataatataatgaggaatgtgtttattttaccaattttatggaatggactcgtgatgtatcacctcatctagaatcaattgattctttaaaccaaacactctctaagcaaatgagatcagtt

SEQ ID NO: 2988 - DNA, 1348 bp, Zea Mays
gttgtcttgaagaacttcacaaatgtaggcacgttatgagggaatccaattgtgtttgccaaccaatgttgatttcctccaagaactcgcaagccacagtgcctttgaaaaaggcctagttgacactcacttcattgaacgttataaagatgaccttttgagtatttctacaaagtcctcaaaagaatctcatggtgtagctgagcttggtgcaattttggctgctgcatgcatttgcaagaaggaacacattacatctaaagaatcactacgagccaacaagtcactatctgtatggtacaataatccacctttcaggatgcatcactttgctaggcatcccctggatcttgagttggaagagaatgatggattcagtgagaaacttcttaaactgttcattactcataagtttgatggaagctacttcatcgagacagaagatggcacttctggtttagatgtcaaagttgatcacaagggtgaccacgattttcgtgtggatgtttctggtctgcaaactgatgtgactctagcatcttattcaaagcaaacacatacatgtctggcatgggaatcatcaccaccattacagacagactgtaagagctgagcatgcagttgaagatagctcccaacctagtcatgcttctgaagggaagtcgcatccaaaagggagtgttctggcaccgatggctggcttggttgtgaaagttttgcttgaagacggggctcaggtggacgcagggcagcctgtcatggttatggaagcaatgaagatggagcatgttgtgaaggcgcctcgtgccggatacgtgagtggcctgaaggttactgcaggccaacaagtttttgactccagtgtccttttcacaatcaaggacagctctgcaaactgagatggagcgatcactgccctagagtagttgcactgcaactgcatcaagcacccagcggatgctcgtccagatagagaagcgaaggaaataaactgctgggttcgtctgcgggcaatccaatccggcagggcaagcagacggcgcatggtgtttcccggcttgatgcgaatccatcatccgccgcaacaattccattgcgtagtgtacacgaacatgaaactgtaccacgctgagcaagaggaattcttgtttgatttgtgcaatgaaataagttgattccatcaccgttccatttctcataattagtaataataatgaataattagtaataatataatgaggaatgtgtttattttaccaattttatggaatggactcgtgatgtatcacctcatctagaatcaattgattctttaaaccaaacactctctaagcaaatgagatcagtt

SEQ ID NO: 2989 - DNA, 567 bp, Zea Mays
tggagatgttgtgaaggcgcctcgtgccggatacgtgagtggcctgaaggttactgcaggccaacaagtttttgactccagtgtccttttcacaatcaaggacagctctgcaaactgagatggagcgatcactgccctagagtagttgcactgcaactgcatcaagcacccagcggatgctcgtccagatagagaagcgaaggaaataaactgctgggttcgtctgcgggcaatccaatccggcagggcaagcagacggcgcatggtgtttcccggcttgatgcgaatccatcatccgccgcaacaattccattgcgtagtgtacacgaacatgaaactgtaccacgctgagcaagaggaattcttgtttgatttgtgcaatgaaataagttgattccatcaccgttccatttctcataattagtaataataatgaataattagtaataatataatgaggaatgtgtttattttaccaattttatggaatggactcgtgatgtatcacctcatctagaatcaattgattctttaaaccaaacactctctaagcaaatgagatcagtt

SEQ ID NO: 2990 - DNA, 1879 bp, Zea Mays
aattgtccttctcgtaattattgccggcaattccgactcctctgacaatccatctaccacgcgcggccaaactcctgttcttccacctgctggctgctcctgcctcccctgcgccccaaacccacccgcctcgccgtccccgcaggccgcagcctgctctcggctcccgccgccgtctaccgcgtcctgcggctgcggtgttgcgtcacctcgggttcgccttaacttccacaatcctcgccgtcctggtgctccgccgcccctccctttgtactcgcgctggagctgcagatccaccgcgacctggcgaccaattcctcctcccgctgaattggcgaccttggcctccgcccccgcggcgcggaggagtcaactgtggtagcaaccaccgcggaggctgcaagccttcggtaagggaggaaagttgacttgttggaagccggtccagggccgcgatgacgtcgaccgccgccggcgcgtcgtcgtcggcggcgaagagcgagtcctacctgcgggccgacaagatcgacctcgagagcctggacatccagctggagaagcagctggccaagacctgggagaagcacaaggggtcgtacaaccaggggcccagggaggactgggagatcgacctcgccaagctcgagattcgctacgtcatagcgcagggcacctacggcacggtgtatcgcggcacgtatgatgggcaggacgtcgcagtaaaactattggattggggtgaagatggctttgcgtcagaaactgaaactgccacactgcgagcatcatttaagcaggaggttgctgtctggcatgagctcaaccatccgaatgttacaaagtttgttggtgcatcaatgggtactacagaccttaagattccagccaatagttctaacagtggtgggcgcactgagctgccgccaagagcatgttgtgttgtggtcgaatatctcgctggaggatcactgaagcagtatttaataaagaacaggcgaaggaagcttgcatacaaggttgttgttcagatagcactggatcttgccagaggattgaactatctacattcaagaaagatagtacatcgggatgtaaaaactgaaaatatgctgctcgatacacagcgaaaccttaagattgctgattttggtgttgctcgtgttgaggctcagaatccaaaggacatgacaggcgcgactgggacacttggctacatggccccagaggtgcttgaaggcaagccatacaacagaaagtgtgatgtctacagttttggcatatgcttatgggaaatatactgctgtgacatgccatatccagacctcagttttgcagacgtctcgtccgccgtcgttcaccagaacctgcggcctgacatccctcgctgctgcccaagcccaatggcgaacatcatgcggaagtgctgggacgcaaacccggataagcgccctgacatggacgacgtggtgcggttcctggaggccctcgacacgagcaagggcggtggcatgataccagaaggccaggcaggcgggtgcttgtgtttcttcagagcccgtggtccttagaaccaaccaaccctttccagccatcctctacttgtctctgccctactacagtattggagccagatgtaggcctttgttgttcatcggataggggattgcagataacttgatgacaatctttgtgattggttgacacttgttatacgttctatagtgatgtgaataccagtgaggagtccataatacagagttatttcaaccagttcatggttgcatgctcttaatggtttgtttgtggaaatcacatactgggccatcattgattaactgggagaacatatgtgatacacgcattcgccatcgttttctcg

SEQ ID NO: 2991 - DNA, 1847 bp, Zea Mays
aattgtccttctcgtaattattgccggcaattccgactcctctgacaatccatctaccacgcgcggccaaactcctgttcttccacctgctggctgctcctgcctcccctgcgccccaaacccacccgcctcgccgtccccgcaggccgcagcctgctctcggctcccgccgccgtctaccgcgtcctgcggctgcggtgttgcgtcacctcgggttcgccttaacttccacaatcctcgccgtcctggtgctccgccgcccctccctttgtactcgcgctggagctgcagatccaccgcgacctggcgaccaattcctcctcccgctgaagaattggcgaccttggcctccgcccccgcggcgcggaggagtcaactgtggtagcaaccaccgcggaggctgcaagccttcggtaagggaggaaagttgacttgttggaagccggtccagggccgcgatgacgtcgaccgccgccggcgcgtcgtcgtcggcggcgaagagcgagtcctacctgcgggccgacaagatcgacctcgagagcctggacatccagctggagaagcagctggccaagacctgggagaagcacaaggggtcgtacaaccaggggcccagggaggactgggagatcgacctcgccaagctcgagattcgctacgtcatagcgcagggcacctacggcacggtgtatcgcggcacgtatgatgggcaggacgtcgcagtaaaactattggattggggtgaagatggctttgcgtcagaaactgaaactgccacactgcgagcatcatttaagcaggaggttgctgtctggcatgagctcaaccatccgaatgttacaaagtttgttggtgcatcaatgggtactacagaccttaagattccagccaatagttctaacagtggtgggcgcactgagctgccgccaagagcatgttgtgttgtggtcgaatatctcgctggaggatcactgaagcagtatttaataaagaacaggcgaaggaagcttgcatacaagattgaactatctacattcaagaaagatagtacatcgggatgtaaaaactgaaaatatgctgctcgatacacagcgaaaccttaagattgctgattttggtgttgctcgtgttgaggctcagaatccaaaggacatgacaggcgcgactgggacacttggctacatggccccagaggtgcttgaaggcaagccatacaacagaaagtgtgatgtctacagttttggcatatgcttatgggaaatatactgctgtgacatgccatatccagacctcagttttgcagacgtctcgtccgccgtcgttcaccagaacctgcggcctgacatccctcgctgctgcccaagcccaatggcgaacatcatgcggaagtgctgggacgcaaacccggataagcgccctgacatggacgacgtggtgcggttcctggaggccctcgacacgagcaagggcggtggcatgataccagaaggccaggcaggcgggtgcttgtgtttcttcagagcccgtggtccttagaaccaaccaaccctttccagccatcctctacttgtctctgccctactacagtattggagccagatgtaggcctttgttgttcatcggataggggattgcagataacttgatgacaatctttgtgattggttgacacttgttatacgttctatagtgatgtgaataccagtgaggagtccataatacagagttatttcaaccagttcatggttgcatgctcttaatggtttgtttgtggaaatcacatactgggccatcattgattaactgggagaacatatgtgatacacgcattcgccatcgttttctcg

SEQ ID NO: 2992 - DNA, 2490 bp, Zea Mays
gctaactattagctggatttcgtctggatttaaatgaggtaattattacctgcttggaacgggtctgggcctgggccatactaacaacgtctgataactgacgccggcccatactgcccagcactgtcgaacccgcgtccacgccgcaggtattgccgtatgcgacaaaatgaagcggcaaacctccgtgtttcttccactcccgctccttgccttgcctacgtgcgtttcgctcgcacaagccaaacccccctccccaaaagctcaacccccccgcagtcgggctgtcccataccacctaccccctccatccatttgaatctctccccctccccgatcatcgcaggccgatcgatcggcggctgcggcggcgatggggcggaggaatgacgacatcgactggaagagcgtgtttctgtcctacttctctcatggcgcctcctccgaccccgccgcgacgcgggcgtcgggcgtcgcgatggcggcgtcatcggacgacgacgagcgacggcgggggtctccgggcctccaccaacggtccgaggagccgcgcagcgagctggagcggcgcttcggcaagtgctgccgccccggcgcgcaggttgatggcggggcgcaggcgcagcactgccgagtcacccgtgcggcggccaaggctgctgttggtttgggaccggatgtttcttctgcttctaacgttgtatatgacctcagtccaataaatgatgacaaagaaggggaacatgtccatgacaaaaactattctaagttatctcccaagtttagcgagaagaagaattatggccaggtacccttgagcaaacagaaaagtcaaggccatggtggaaaaaggaaatctataccggtggccaagatttactcaagccaaccaaattcaacaactcatgccattgatttaaaggagcctgatcatcaaagttcacttcccagtaaattctctaagaggaggaagcaacaactccaaaaatcatcttctatttattctcgaaaggttcaagatgtggttctattggatgatgaagatatcgaacctaaggaagaagtaaaacttgagatgtctgacagactgaatgaaccaaagatctactacccatcaagagatgatcaagaagttgtcgagctcaccagatctgatatcagatgtcttgatcctgaagtatttttgtcgtcacaggtgatcaatttctacatcaagtacatcaaaatgaccagattgtgcgatgaaaatttcagagacaaattctacatatttaacacatacttctatggaaagcttgaggaagcattgcgtcggccgcgtgacttcccaaagttgagaaggtggtcgaaaggtgtcaatatattcaataacgcatacatcatcttgccgatccatgggaaggagcactggagcttggtaatcatttgccttcctccaaaagagaggacttcttcagaaccgatcattatacttcatctggactccttaggcatgcatcccagcactaagatcttgaacacggttgggaggtaccttgaaaaggagtggcgcttcttatccgttgcatggccgtgtcttctgaatgatatacgcaaggaagctgtccaggttccgcagcagaacaatgcgtacgactgcggtatcttcatgctgtattacattgaacagtttataaagaaggcaccggcaaggttcaccaccgataaacttggcatgtttaatcgcagttggttcaagcctgaagaagcatccggtctaaggcagagaataagagagctactgctgcaagagtttggaagtgccaggccggatgaagctgcatcagaggcagatgttgctgctaagagaaaagaaggcatcagtgctgcagagtggaacgaggaggaggcaggccgtgtcgtatcagaatcagactcatgttcatacggcgccggagacgaaaaaggtacagtaaaggcagattctggcagcgcagaagctgagaaagaaggtgggctggttgtgactgcatcatcgcagaaaagatcgaaggggacggcggaggaggaggaggaggtccgtggtagtagcatgccagtcccggatgcagtttgtgagatcactgggaccaaggtgtggatcaagagggtctacagacgaacagggtggccacctggaaattggtgctggagcagtggcggatccagcagggatgcacgcagggcgttcatagaacaattctctcgaaagtagttagaactaagagcacagatgttggtttgctatcctgaggcgcctgttgttgacactggctagacgatgcttccaggtcggtcgggcacctgcagttgtcatcaacctctcgataaaccgataactttagcaagtgctgcatatactcctgcaagtgctgcattttgttttttataatggaaacaagagttccagcttttcgcacattgtcattacatatcaattattgattcaattgacagttctttgaaaaatga

SEQ ID NO: 2993 - DNA, 970 bp, Zea Mays
cccctccccaaaagctcaacccccccgcagtcgggctgtcccataccacctaccccctccatccatttgaatctctccccctccccgatcatcgcaggccgatcgatcggcggctgcggcggcgatggggcggaggaatgacgacatcgactggaagagcgtgtttctgtcctacttctctcatggcgcctcctccgaccccgccgcgacgcgggcgtcgggcgtcgcgatggcggcgtcatcggacgacgacgagcgacggcgggggtctccgggcctccaccaacggtccgaggagccgcgcagcgagctggagcggcgcttcggcaagtgctgccgccccggcgcgcaggttgatggcggggcgcaggcgcagcactgccgagtcacccgtgcggcggccaaggctgctgttggtttgggaccggatgtttcttctgcttctaacgttgtatatgacctcagtccaataaatgatgacaaagaaggggaacatgtccatgacaaaaactattctaagttatctcccaagtttagcgagaagaagaattatggccaggtacccttgagcaaacagaaaagtcaaggccatggtggaaaaaggaaatctataccggtggccaagatttactcaagccaaccaaattcaacaactcatgccattgatttaaaggagcctgatcatcaaagttcacttcccagtaaattctctaagaggaggaagcaacaactccaaaaatcatcttctatttattctcgaaaggttggtatctgatactaattgttagaatgacattatgctggacattactagtattcctatttatcatttccgtccctaatattagaccatatatgtatgtaattttatagcctataataattatgctagagaatatttttgtattctttattttgcatgtacactgactattgtataagtacaccctataataatacagaatttatt

SEQ ID NO: 2994 - DNA, 1845 bp, Zea Mays
ctattaccactggtggtggagtattatacatgttgtggtccataacccccaatccctacaaaatcaaggtccaataaatgatgacaaagaaggggaacatgtccatgacaaaaactattctaagttatctcccaagtttagcgagaagaagaattatggccaggtacccttgagcaaacagaaaagtcaaggccatggtggaaaaaggaaatctataccggtggccaagatttactcaagccaaccaaattcaacaactcatgccattgatttaaaggagcctgatcatcaaagttcacttcccagtaaattctctaagaggaggaagcaacaactccaaaaatcatcttctatttattctcgaaaggttcaagatgtggttctattggatgatgaagatatcgaacctaaggaagaagtaaaacttgagatgtctgacagactgaatgaaccaaagatctactacccatcaagagatgatcaagaagttgtcgagctcaccagatctgatatcagatgtcttgatcctgaagtatttttgtcgtcacaggtgatcaatttctacatcaagtacatcaaaatgaccagattgtgcgatgaaaatttcagagacaaattctacatatttaacacatacttctatggaaagcttgaggaagcattgcgtcggccgcgtgacttcccaaagttgagaaggtggtcgaaaggtgtcaatatattcaataacgcatacatcatcttgccgatccatgggaaggagcactggagcttggtaatcatttgccttcctccaaaagagaggacttcttcagaaccgatcattatacttcatctggactccttaggcatgcatcccagcactaagatcttgaacacggttgggaggtaccttgaaaaggagtggcgcttcttatccgttgcatggccgtgtcttctgaatgatatacgcaaggaagctgtccaggttccgcagcagaacaatgcgtacgactgcggtatcttcatgctgtattacattgaacagtttataaagaaggcaccggcaaggttcaccaccgataaacttggcatgtttaatcgcagttggttcaagcctgaagaagcatccggtctaaggcagagaataagagagctactgctgcaagagtttggaagtgccaggccggatgaagctgcatcagaggcagatgttgctgctaagagaaaagaaggcatcagtgctgcagagtggaacgaggaggaggcaggccgtgtcgtatcagaatcagactcatgttcatacggcgccggagacgaaaaaggtacagtaaaggcagattctggcagcgcagaagctgagaaagaaggtgggctggttgtgactgcatcatcgcagaaaagatcgaaggggacggcggaggaggaggaggaggtccgtggtagtagcatgccagtcccggatgcagtttgtgagatcactgggaccaaggtgtggatcaagagggtctacagacgaacagggtggccacctggaaattggtgctggagcagtggcggatccagcagggatgcacgcagggcgttcatagaacaattctctcgaaagtagttagaactaagagcacagatgttggtttgctatcctgaggcgcctgttgttgacactggctagacgatgcttccaggtcggtcgggcacctgcagttgtcatcaacctctcgataaaccgataactttagcaagtgctgcatatactcctgcaagtgctgcattttgttttttataatggaaacaagagttccagcttttcgcacattgtcattacatatcaattattgattcaattgacagttctttgaaaaatga

SEQ ID NO: 2995 - DNA, 3065 bp, Zea Mays
gtcactgcttgttaagacgtactactagtttattactgcaaggtccacatggactatctggaagctggcgcaaacattataatcacagcatcgtatcaggccactattcaagggtttgaatcaaagggtttttcaaaagaacagagtgaaaacttactaacaaagagtgtcgagattgcactggaagctcgtgagatgttcttgaaggaacatctggagaagtccactcctatacagcacccggttctggtcgcagcgtctttagggagttatggagcttatcttgccgatggctccgagtacagtggggattatggtgaagctggtacgaaagagttcctgaaagatttccatcggcggaggctccaggttcttgcggaagcaggccccgatttgattgctttcgaaacgattcccaacaaactggaagctgaggcgtatgtcgaacttctcgaggagtgcaacatcaatatccctgcatggttttccttcaactcaaaagatggagtgcatattgtgagcggtgactcgttaatcgaatgcactactattgctgacaagtgtgcaaaggttggtgcggtcgggataaactgcacacctccaagatttatccatggactgatactctccattcgaaaggtcacggacaagcccattctgatatatcccaacagtggcgaaagatacgatggtgaaaaaaaggagtgggtggaatccactggtgtgtcagatggtgattttgtttcttatgtgaacgagtggtgcaaagacggggctgtgcttatcggtggctgctgcaggacaactccaaacactatcagggccatacacagaactctgaacaaaagccccaacaagcagcagttacctgctgtagaataagagctgtgctctactctgatgcgcccgccttcctcctagcagtacctcgaggctataactccatgattccgtaaccgtacgtgttcgttctcttgcaaacgagatgtttgtaaataacgctgtatttctgggttctgagatatgcaacttggatggaggtacaaccggtgaaggggggtgaggaagcagcaacaatggtaagagttctactactgagtgggggaaaaacaacttgcggctgggttagtgaagcttagtagctaccactattcaagagttaaagggagttcgtatgacagttcctctggagatgttatcttcaaagtcttatatcactgctacttgtgagctgtgttaaaacctatatatataagttttgtttgacgtgactgcattaaagatagtacaccaagcttctccagttctcctagctatgtatgttcttgtccattcctccgcttccacaattctaagcaataaattaagggctagcttctccagttctcctagctatgtatgttcttgtccattcctccgcttccacaattctaagcaataaattaagggctagtttaggagccacaaactggagggaattagagggattaaaatccctagcttatttaattttgaattagttgaataactaggagattttagcccctccaatcctcttcggtttttgaactcctaaactagctctaagggtgatgagatgtgacaatttattaggtagcgacaactaaaaaaaaacggagggagtataaggttgtatggttctggggctgtctttcgttgtcctgtaatcgaacacattataagtgtctagctgggatatgctgtggcggcagtttataagatgtagcgagttagaccctatttgtttcggattataatctctttaaattatataatttagtgtaaataattcagtaagtaaacaaatacctagattatggttttagattatataatctaaaactcagattataataatctcataatctactcaagagtagcttatttgagattatttttggcaaaagtcccactacccatagttatataaatagaaattataatatatgatatcttttttcctcacatcgaataaataaataagggtacccttgtatttgtaaataatctatatttttataatctagactaccaaatatatacatgtagattataacctgtctaaattataatctagattatataatctataaattgaaacaaacatacccttagcagccgtttcatccatcgatccatcaccaatgcccaataatgtcgtcgttgggccggcgtctcgtctccggcttcatcaacgtcgcgcggcgggcgaacagcagccacgcatgcatgcgccggatggacgcctattcacttcgctagcaggcgatcaaacccggcaggcgcggtcactactagctatttcgccgtcggcggccgcaggtggcagggcccctctacggctctaccccaacgggaacgacaccgaccaccgtgggttcgtgcccgccgacctcacgctcgcactcgacggcagtggtctgccagaggccacggccacgtaccgcgtgagcatcctcgattacgccaccaacccgttaagtggcagtggatatcgagccagctcaactcgttatagctcgttatactaacaagctaaacatctggctcggctcgactcgttagaaagttcgagccagctcgttaggctcacgagctacacgattaaatacaaatatatatatatatatatatataaccgaaaaatcatattttaagtgtttaacactacaaaccctaaacttttataatattattatcatatcatcgtcctagcttctaacttttaatattaaattaaataaccaaatatgtattaacctacatatttacaaacccttattataataagatagcaacaagcatcattataaagcaatttatcatccattccacaaacatttaacatttcatcgcacaacactaatatcatatgctgctagaaacaaagttcacaaaatcataaccaataatcaaatattaaatatacaatgtaggtatgtagccatgcaataatacaaatatttaagcacatggcacgtctacacatgtccatatcatagatcataactacgagaaaacaagactatgagagatgagacgac

SEQ ID NO: 2996 - DNA, 4026 bp, Zea Mays
ctggcctgcgcttcctcaacgccataaaagtctcaattatatgtggcagaacctcccaagttattggacccacatgcacctgcccttgtctcaaagacctcagacgactatgcatgtgcaccagataacttaacaggatctgtccgagtgccccaaggacctcggataaatcacttacaaccagaaccacgggattaagtaaacacaaatcacacaccaacaatttgcagcggaaatcttataaccaaattttacaagttacatgaagtttacaatgtacatgatcggagtgattaaaaaatttggttcaaagcataaactttgaaatgttataaattatttgtagttttgaaatatatgctagctcaagtgaccatcctcaataagaagtatagaagaggtacttagacttataagaaggtcgagcccaccggcacttagcaccatccacaacaacacacttctatttcggttcttcctcctactagggaaccacctttgcacaaaagtagcaaagctctgcaggctcttcacctaaaacaacatgggacaaagccctgagtacgaagtgtacttttgcaagtcttacccgactaaggaaaaagactctcaagatatgcgggatttaggaatcaaggagaggcttttagcaagaatcaacttagatactttttgcagaaatagcttactaaagtgagtccttactttcaatattttaacgccagattaaatattaatagaatctggttgcacctagtctaatttcaccatctcatcaatacaacatcatttttatgcataatgtttacatcctgaccatggttgcaggtcagtgatcaagtatccactatccggggatataacggcgatccaaatcgatttactcagctgaggatctctaaccacacgacatatgtagcacttaacccttgtatatgtcatccgttcccacagatcctccacaacgtgaaccagtccgcgctacccgggagcacaatactcctctatccatctagccaggagggtacacactactcccaccatctcccacgcccagtgcacggttgtattttcacgtatggaatagccgggttcaagcttatcctgtcccatatctagggcatgtggccatttaagatagttcttgatcatacaagcctacatacacatccaatccttaattaacctgggtggagcatcacctgttcctagcccaagtctcgagttaagtacttccacccttaggattgttttgtgttcctaaggatgaaaagagcattatagggaactttgcagtaagatcccaccatgctcccaatgaaaatattcttgcaggtagaagtcatgcttcctcaggataaacctgagctaggcataagtgcaaaggacaaactctatctgcttataagcagggctaagcatttttttgtaaatcatattttgatacttcaccagaagtatctataaaagaaatgtatttcaaggtagccaatgcatcaaagggtttccaagcaactcctataaacctaatgcacatttagtagacttaaagtgtgtaaaaataatttaaaaacacaaggaaggggttgcatgcaacggggcttgcctgggataaacactaggttagtgttgttagacgatgtctgcttgacgaccatcttttatcttgacattcgtcaaattatccatcttcaggttcgtccgactgacgacgtcgtcttgcggagatgttcactctctgcattatcctggggtcgtcttccgcatcacgtgatcaacaaacgtacctaaatgatttgcataatgcacatgaatgcatataaacaagaatagtatgagactaaatattactacatgttcgcgaattaaacacctagcagcaaggcgttgtactatttcatacggaaacactagttatcgacatacgactaagcgcaataatcacaaaataataaaatatacatactaacactcacgtccttcctacttaaccgaatttaactcatacatcaggcaacaacaccctaagtataagttccatactttagcctataccaaacaattaacaaaaattaggctcacgtttccaagataattaaattcaagactacagatagaaatcatttatagctttctaacccactacgctaattagttcatacagtacactagacaaacaacaatatcacatatgactagactgaccacatcagatacgaagaaccaatttaattatacgttgcacaactaatatgtttaactaaattcatccgaccaaaagcagaagtaacaaattggctactattacctaaatctgacttgaaaccgcgagattgacaatgatgcccagttcgagcctttcattgcgccacaggtggacaacgaatagggaccagtggggacgcaagacgcgacaaggccgttggaataatgacagttccgagggtcaggcgtttcatcgaacatctggcggctgaagcgaggacgacatcgaatcccaagagacggacagtgcgtcgacggccgagtctcacatttagccggacaagtggcacacgaggcgcgacgggaaggagtttgacgcgtcaagtctaaagaaagcgcgacatcaacgatgctgcaagcagtgcttgaagtcgaaaatgcacgacaaaggagacggggacagccactgtacaacaccatggaacttggtgcggccatagcatggcacacaaaaatagcagtgcccgaccaccatggccaaccccggccagccttcccgtgcggccatggcacgacgagaacctaaatgagtggacaaggatgatgatgacgccacgcacgacgttcgatggtaggatcgacaacgatacaagatggtggcgtaaagagctgcagggctagcgagctgaagcaagtgacggagacagccgcgtccgatagcaagcccgtagcgacgcacgacagtggggagctcggcacgatggggagcagcgaccatcggcgtgaggagagccaggaaaacgacacgcatacaaaacgatcctgggcgcgacgggaatgatggaaacgtgcagcatggacagaaggaactcggcaccattgctggccgaggcgagtgcgcttggacatggacaccgaggcgaagagaggaaaaccaaaaggtgatcggggatgtgacggccggacatcaagtgctccccggatttgggcgagcgatgctggctgcttcattcccccgttcgtcgtgccagaactccagatgctctgtgcgggcgcgaacgcataccggccatgagcagtgcaggcaagcacggccggtggagagttgggtctagagggagaagataaggtgtgcgccgtagaagagaccgatggcaccagaggccctggtgatctccccatggtgatgcaggggtacatgtacctgagccccatcccaccgtacaccatgactgaagctcggaagtcagggagagggacgcggcagagggggttcaggcgaggtcgacggtgcggcttccatggtcgagcagggaggagcgcggcgtgcttgagggaggcgagctgagggggggcggccatggcagggaagagcgccggcacgaagagatctgagctgggcgagcacggtagtaagatgggcgtgcggccaacctggagagcaggggcgcgacgagtttggggattgggcagagcgccggtcgagggagagagtgttgggaggcctcggcacaggggctgggcgccgtgggagcttggcaaggaggagaagaaaaactgggtgcgctgcgcgtggccggaggagaagcggctggggaagataaggacgtgaacggcttcaggaaatatcccggtcagcgcgagcagaaaaatctgagaggggcggtgagccggtgacagcagatggagacggctgggatttttctgaggtgcttgagcggcgcggccaaaaaaatctgagagagcgagagcaactggaaaaattcaagggtagagagagaacagcgggagggagaaaatattttcatttcttttattttt

SEQ ID NO: 2997 - DNA, 898 bp, Zea Mays
cgagggtcagacgtttcatcgagcatctggcggctgaagcgaggacgacgtcgaatcccaagagacggacaacgcgtcaatggccgagtctcacatttagccagacaagtggtacacgaggcgcgacgagaaggagtttgacgcgtcaagtctaaagaaggcgcgacatcgacgatgctgcaagcagtgcttgaagtcgaaaatgcacgacaaaagagacggggacagccacgacacaacaacatggaagggggtgtgagtgtgactatagcgtggcacacgaaaatagcagtgcccgaccaccatggccaaccccggccaaccttcccgtgtggccatggcacgacgagaacctaaacgagtggacagggacgatgatgacgccacgcacgatgttcgatgataggatcgacattgatacaatatggtggcgtaaagagctggaaggctagcgagctgacacaagtgacggagacagccaagtccggcagcaagcccgtagcgacgcacgacagtggggagctcggcaagatggggagcaacgaccattggcgtgaggagagccaggaaaatgacacgcataccaaaacgatcctgggcgcgacggatatgagggaaacgtgcagcatggacagaaggaactcggcaccattgctggccgaggcgagtgcgcttggacatggacaccgaggcgaagagaggaaaaccagaacgtgaccggggatgtgacggccggacatcaagtgctccccggatttgggagagcgatgctggctgcttcattcccccgttcgtcgtgccagaactctagatgctctgtgcgggcgcgaacgcataccggccatgagcagtgcaggcaagcacggccggtggagcttggcaaggaggagaagaaaag

SEQ ID NO: 2998 - DNA, 2857 bp, Zea Mays
cccaaccataccagccataatcgcggctaggggatcgggcgcaccattgtcataaagcaagggtgaggggcgcgtccgtggaagcgcacatccgtcgacatagtggtccagcgaggtgtcagacggaagcgggggaccaagccggagatcttcatcgcccaattgtgccgctggggtgactggagcatggtgaatcgctcgccggtgacgcttcgccgccacgatgcgtgggcagagacttccgcggcataacccaccacgagcaagccactgaggacctaggtgtttagcaggtggataattctgagcaggagctcgttgaaggcaagttgtgcccttgaccacttttatttacccaataatgttctctataatcattatgacatgattaggcttaattttgatgggacccaataggtcaccctagtctgctttatcttgtgccttgatcaccactgaactttttaggtagtcttgctattgctatatatggttttgggtattgagataaatttgacacaccatcatcctttattattattgttgattatttattgttcatgataagattactgtgtttattggaacatggagaaccacccgagaaaacagtgctaccacaagggtgaaatgggacacccttggccaagtaattacctgaaaggggcaagcggggaggcgtcactgcagagtatagggagatgaacgggttttcttgaatccgtagcgggttttctcccatgcttccttcttcctgaatcctagggtttagggttttctcctatgattccttcttcctgaatctgtagcgggttttctcgaactagtggaactttggaaaggcctcgtagtgctaccctgtctcgtctcctcggtagagatgaacaggaagtcgcgatcccttggcaaatgggtaacattacttgtgtgtaaagatgtgcaacctctatagactgtaaaactggtatatcagccgtgctcacggtcatgagcggctcggacactcacatgattaatttatggaagttaaatttaatttgtcatttgcatcgcattgtggttattattaattttgatctaccattactttgggatggtatacacttacatttagtaactgctaataaaatttgaccaacttattaaaagcaatgctcaacttcaaccattatttattgatcagccttacacttcaggtgggctcccacctttggcgagttcatgcgcattattccccacaacttgttgagctatgatcttttgtgagctcacccttgtgatatataaacccccccccccacatgagaagaataggtggtccaagaggagacctacaacaaggagtacgagttgatctaggtggcgtatcccagtcagcttgatggtgccaaagaatatacttaattcgctttattgttctcatatatttttgtaagacttccgctatgtaataatgatacttgtgacatttatctctatacactttgtcattatatgtggagttcttctttggcgcacatatgagacgcacccggctttatcccttaaatacgggtgtgacagaagtggtatcagaggaaatgttgactgtaggacgaaatctagataaaactggaaaaagcccttacctacttatgtttactctgattctttctatacttatcttgatcatgtctcacctttggttgttctactctgactactcttaccttttctactctagaaaggcaaaaagggtttcacaccttggaatgctacaactacaaactccctaaagagataggagacctaagacagaaaaattatacacatattttctctatctaaagtgtttggatgtttgtcctgatgataaatgtttgatttgcttctttgattgactgaaatagtatagcagggcattctaacatgtaccaccataaggtaatatattagtattagtaggtgacacactaatctactgagccaataaaacccccaaaagatcatgactcgtaattactcgtcttatctataattctatcttaccatgtgtttctaacccagatggtcaatactaggaagggaggcagaatcgatttacctgccaaccaccacagcaggaggattgatagacaaccacaaccagaaatgaatcctctgaatcctcgaccggctgggatagatccattggttgcagcttagatgcagatgctataacagatggcaaatactatgatggaaatgcaagctcagatgtggcaggaacgtcaggagatgcgccacgagcgttaggagaggcgaaaggaaatgaggcaagagcgattggagcgacaacaacaaccaccactacctccaccaccaccactagctgcaccccgggacaagcaccaggaattcatgagtgacaagcgacctacattctccagctctccagaccgcctacatgctgatgactggctaaaatcagtggaaaatatgcttaatatcgctcaatgcaatgaccaggagaaggtgctctacgcttagggtcatcttactggccctgctgctgattggtgggactcctacattgctgcccatgctaatgccaacactgtcacctgggcagaattttctacacaattcagaaactaccatattcctgttggcttgatgaaaattaagaaggaatttctatcactgaagcaaggcaacatgttagtcagtgaatatcgtgatagatttattcaactgtcaagttatgctctatgcgaggttgctgatgatgaacggaagcaggagcatttcatggacgggctcattgggccgcttcagtaccaactggtatctcatacctccccatctttccagaggcttctagacaaggctatagctg

SEQ ID NO: 2999 - DNA, 3331 bp, Zea Mays
cccaaaaccctactactctgtcgagccagcgccgtctccctcccccactccattcccactcggacttggaccccaaaaccctagcggctagcgcctcctcgccgtcaccgccatgatcaccggcggccagagctacgtctcggcgccgccggccttctcggccgacgggcgcctcctcctcgtctgctccggtcgcgccgtctccgtcttcagcaccgccaccgccatgctagtgtcggagctggaggggcacgagggggacgtcaccgccgtggtggtggtggcgccgccagcgcaggcgaccgcggcggccaagcttgcgagctactgctggacggcggggctcgacggggtgctcatctactgggacttcttggccgcggaggtgatgcggaaggtccaggttgggctccccgtccactccatggtggttcctgacatatataggacctcaaaaggagttgaggtgtcgagcccctttgcattcatctctgtggaggatacgagtaagctggcaagtgaaccaaaagcgctgtgtgggcagatgagagtttatgacctgacaaaggggcgccaagtgggtggcctcctggccgagacacgtaaaccagaaaagatcgttgcaagtagttctggagaattcttgggcattacaaataaaagaaagctccatatatggcgcataccaacaaaagatttcaagcctgacaagataaggaagataaagctccggcacaccaaacacttgaccactctggcattccatccaactgagagaactgtggctggtggtgatgtaacagggcggatcctgatttggagatgttttggaaactcaaagttctctgaaagtagtgtacagtcgaaagaggatgacggaagggatggtgttaggggggatgatgatgcagacacttgcacaacatggcattggcactcaagcagtgtgaggtttctcaagttttcttctgatggagcatacttgttttcaggtggtttggagggagttattgttgtgtggcaactagatactggaaagagaaggtgtcatgtacaaataaccaagtctatcttctaaaaatgcctaatatggaggtcatgagatctattgctggaatcaagctgccaattgcttcaccaaacttgggcggatctaatcgggctgtgtatggatttgattatactaatagacttgttgctataccaactgaagattactgcatacagttctacaatttgtttgagaacgctgaggtttcagaggtgcaagtgtgtgagaggaatttccagcctattgatgatatcactatgtacatttccatggtttcattgtcaatcgatggcgatttgatgtgcaccgtggatgtcaaacttcctgaagaaggtttaggtggtcttgttacattgaagttttggaatcatgggtcaagagctggacattattttttgtccaccgtcatttatgagcctcacagtgatgatggggtttcttctgttgcattccgcccaggaagaaatatggccgttagctcttcttttggtggtaactttaaggtttgggtccagagtttgtcttcacaatcaaatgatgaaagaaattgttctggttggagatgccaatcagttggctcatacaagaagaaacctatgacatcagcagccttctcagccgatggatctgttcttgcagttgcagctgagagtaccatcacattgtgggatcctgataataatgcgcttgttggtgtcattgcagaaacactatcgccagtgacaaatctttctttcgttgggacatcagtgtttttgatgtctctatgtcagagttcaagaccacagattgctctatggaatgtttcaaatctttccatgcagtggtcttacagcatttatgcagaagctgcatgctgttcgccagatgggagtgaatttgcagttcttgctcttcttagttgtcctgatggagaagcatcaacacaacaagatggagtaattcttctttttgatgcagaaagctcaaaccccattgcctcctggtcggtaaagaaggcatcgggtggcagcatttcttttgtaaaaggtgacgtccctttggatgcaaatgctgatagttcgagagacaaagagccaatgttgcttgtttatgtaaatggttctcatgaatacgccatctttgatccccgggagagtgaggaggtggtcattagcaagaacaagcacaagaagattcaagctgaggaacctgcaccaatcggctacgcttctatttacggagagcttacaaaactggagccaaagaaagaagtttcagatgttccattcgtcccttcggacaggccttgggaaaccatattcagcgggtcgtctcatgttctcccgcctctcacaaaactatgctctgcattcttgtcatcgctgctggagaaacggcctgttgcaaacgagtgagccgccctagaacattgtcctctcatacaacggtaggtatactcgccagttgcagaatggaaatgcggaaggaaatccgtccgtgacgatgcatatgcccacttgaagagttcagagatgctgggtgatgccatctgaggttggttatggttatacagatatcacacggcccacgaggatcattttgcagcgatactcgacggccaacctactgatcgcagcaattttgttttcttctccgcttgacatgtaatcctgacagtaaaactagaaaatcttagtgtgctttatctgatgcgatgacgcggtgctcgttgaggtgctgcgactgtttggctattgagctgtctacggcacaaccgcatttcttttgtactattttgtttttttttcaaagaaagctcacgcttggatatctgaagttgataagctttgttactgggatccctgaatattgtatgttaggctgactcgagcagttcaccagaatgtagtttgaatatggatattagtatgggtaagctgctggagatagtcttagatacaaactaagcagtccagcaataagttcttcgtgagttgcactctgttgggcctagagatggcaatgggtacccgctacccgaaacccggtgggtttttgctctattagggtatgggtttgggtcaatttatgtacccacgggtttgttaatgggttcaaatggaaacccaacgggtacgtgggcataggtttgttcttccactacccatactcgcaaacccatgggtttttaaaatccgccttaaaatcaacatttcttataaatatgtatcataatattattaattgaatatgttctaattgaaataaacttcatgtaacaaattttaagctaaaatt

SEQ ID NO: 3000 - DNA, 3638 bp, Zea Mays
ccaaaaccctactactctgtcgagccagcgccgtctccctcccccactccattcccactcggacttggaccccaaaaccctagcggctagcgcctcctcgccgtcaccgccatgatcaccggcggccagagctacgtctcggcgccgccggccttctcggccgacgggcgcctcctcctcgtctgctccggtcgcgccgtctccgtcttcagcaccgccaccgccatgctagtgtcggagctggaggggcacgagggggacgtcaccgccgtggtggtggtggcgccgccagcgcaggcgaccgcggcggccaagcttgcgagctactgctggacggcggggctcgacggggtgctcatctactgggacttcttggccgcggaggtgatgcggaaggtccaggttgggctccccgtccactccatggtggttcctgacatatataggacctcaaaaggagttgaggtgtcgagcccctttgcattcatctctgtggaggatacgagtaagctggcaagtgaaccaaaagcgctgtgtgggcagatgagagtttatgacctgacaaaggggcgccaagtgggtggcctcctggccgaggtgagaagctttataataaatctttgtcactcaatatctgtcaatttccacataataaatcttggtctttaatgtactttatattgacggttatgcttgctgatgctcttggtatttgaatcgaatataataagttttcaaatttcaattataaagtacagaattatgttgaatatgtgtcacttctgttttttaatgttacaaccttgcttccatgaactatttgctctgatctaaacagacacgtaaaccagaaaagatcgttgcaagtagttctggagaattcttgggcattacaaataaaagaaagctccatatatggcgcataccaacaaaagatttcaagcctgacaagataaggaagataaagctccggcacaccaaacacttgaccactctggcattccatccaactgagagaactgtggctggtggtgatgtaacagggcggatcctgatttggagatgttttggaaactcaaagttctctgaaagtagtgtacagtcgaaagaggatgacggaagggatggtgttaggggggatgatgatgcagacacttgcacaacatggcattggcactcaagcagtgtgaggtttctcaagttttcttctgatggagcatacttgttttcaggtggtttggagggagttattgttgtgtggcaactagatactggaaagagaaggtataaaccacgtctggggtctcctcttttgttctttgtagattctccagattcttccatttcctgcgtgtcatgtacaaataaccaagtctatcttctaaaaatgcctaatatggaggtcatgagatctattgctggaatcaagctgccaattgcttcaccaaacttgggcggatctaatcgggctgtgtatggatttgattatactaatagacttgttgctataccaactgaagattactgcatacagttctacaatttgtttgagaacgctgaggtttcagaggtgcaagtgtgtgagaggaatttccagcctattgatgatatcactatgtacatttccatggtttcattgtcaatcgatggcgatttgatgtgcaccgtggatgtcaaacttcctgaagaaggtttaggtggtcttgttacattgaagttttggaatcatgggtcaagagctggacattattttttgtccaccgtcatttatgagcctcacagtgatgatggggtttcttctgttgcattccgcccaggaagaaatatggccgttagctcttcttttggtggtaactttaaggtttgggtccagagtttgtcttcacaatcaaatgatgaaagaaattgttctggttggagatgccaatcagttggctcatacaagaagaaacctatgacatcagcagccttctcagccgatggatctgttcttgcagttgcagctgagagtaccatcacattgtgggatcctgataataatgcgcttgttggtgtcattgcagaaacactatcgccagtgacaaatctttctttcgttgggacatcagtgtttttgatgtctctatgtcagagttcaagaccacagattgctctatggaatgtttcaaatctttccatgcagtggtcttacagcatttatgcagaagctgcatgctgttcgccagatgggagtgaatttgcagttcttgctcttcttagttgtcctgatggagaagcatcaacacaacaagatggagtaattcttctttttgatgcagaaagctcaaaccccattgcctcctggtcggtaaagaaggcatcgggtggcagcatttcttttgtaaaaggtgacgtccctttggatgcaaatgctgatagttcgagagacaaagagccaatgttgcttgtttatgtaaatggttctcatgaatacgccatctttgatccccgggagagtgaggaggtggtcattagcaagaacaagcacaagaagattcaagctgaggaacctgcaccaatcggctacgcttctatttacggagagcttacaaaactggagccaaagaaagaagtttcagatgttccattcgtcccttcggacaggccttgggaaaccatattcagcgggtcgtctcatgttctcccgcctctcacaaaactatgctctgcattcttgtcatcgctgctggagaaacggcctgttgcaaacgagtgagccgccctagaacattgtcctctcatacaacggtaggtatactcgccagttgcagaatggaaatgcggaaggaaatccgtccgtgacgatgcatatgcccacttgaagagttcagagatgctgggtgatgccatctgaggttggttatggttatacagatatcacacggcccacgaggatcattttgcagcgatactcgacggccaacctactgatcgcagcaattttgttttcttctccgcttgacatgtaatcctgacagtaaaactagaaaatcttagtgtgctttatctgatgcgatgacgcggtgctcgttgaggtgctgcgactgtttggctattgagctgtctacggcacaaccgcatttcttttgtactattttgtttttttttcaaagaaagctcacgcttggatatctgaagttgataagctttgttactgggatccctgaatattgtatgttaggctgactcgagcagttcaccagaatgtagtttgaatatggatattagtatgggtaagctgctggagatagtcttagatacaaactaagcagtccagcaataagttcttcgtgagttgcactctgttgggcctagagatggcaatgggtacccgctacccgaaacccggtgggtttttgctctattagggtatgggtttgggtcaatttatgtacccacgggtttgttaatgggttcaaatggaaacccaacgggtacgtgggcataggtttgttcttccactacccatactcgcaaacccatgggtttttaaaatccgccttaaaatcaacatttcttataaatatgtatcataatattattaattgaatatgttctaattgaaataaacttcatgtaacaaattttaagctaaaatt

SEQ ID NO: 3001 - DNA, 3321 bp, Zea Mays
ccaaaaccctactactctgtcgagccagcgccgtctccctcccccactccattcccactcggacttggaccccaaaaccctagcggctagcgcctcctcgccgtcaccgccatgatcaccggcggccagagctacgtctcggcgccgccggccttctcggccgacgggcgcctcctcctcgtctgctccggtcgcgccgtctccgtcttcagcaccgccaccgccatgctagtgtcggagctggaggggcacgagggggacgtcaccgccgtggtggtggtggcgccgccagcgcaggcgaccgcggcggccaagcttgcgagctactgctggacggcggggctcgacggggtgctcatctactgggacttcttggccgcggaggtgatgcggaaggtccaggttgggctccccgtccactccatggtggttcctgacatatataggacctcaaaaggagttgaggtgtcgagcccctttgcattcatctctgtggaggatacgagtaagctggcaagtgaaccaaaagcgctgtgtgggcagatgagagtttatgacctgacaaaggggcgccaagtgggtggcctcctggccgagacacgtaaaccagaaaagatcgttgcaagtagttctggagaattcttgggcattacaaataaaagaaagctccatatatggcgcataccaacaaaagatttcaagcctgacaagataaggaagataaagctccggcacaccaaacacttgaccactctggcattccatccaactgagagaactgtggctggtggtgatgtaacagggcggatcctgatttggagatgttttggaaactcaaagttctctgaaagtagtgtacagtcgaaagaggatgacggaagggatggtgttaggggggatgatgatgcagacacttgcacaacatggcattggcactcaagcagtgtgaggtttctcaagttttcttctgatggagcatacttgttttcaggtggtttggagggagttattgttgtgtggcaactagatactggaaagagaaggtataaaccacgtctggggtctcctcttttgttctttgtagattctccagattcttccatttcctgcgtgtcatgtacaaataaccaagtctatcttctaaaaatgcctaatatggaggtcatgagatctattgctggaatcaagctgccaattgcttcaccaaacttgggcggatctaatcgggctgtgtatggatttgattatactaatagacttgttgctataccaactgaagattactgcatacagttctacaatttgtttgagaacgctgaggtttcagaggtgcaagtgtgtgagaggaatttccagcctattgatgatatcactgtttaggtggtcttgttacattgaagttttggaatcatgggtcaagagctggacattattttttgtccaccgtcatttatgagcctcacagtgatgatggggtttcttctgttgcattccgcccaggaagaaatatggccgttagctcttcttttggtggtaactttaaggtttgggtccagagtttgtcttcacaatcaaatgatgaaagaaattgttctggttggagatgccaatcagttggctcatacaagaagaaacctatgacatcagcagccttctcagccgatggatctgttcttgcagttgcagctgagagtaccatcacattgtgggatcctgataataatgcgcttgttggtgtcattgcagaaacactatcgccagtgacaaatctttctttcgttgggacatcagtgtttttgatgtctctatgtcagagttcaagaccacagattgctctatggaatgtttcaaatctttccatgcagtggtcttacagcatttatgcagaagctgcatgctgttcgccagatgggagtgaatttgcagttcttgctcttcttagttgtcctgatggagaagcatcaacacaacaagatggagtaattcttctttttgatgcagaaagctcaaaccccattgcctcctggtcggtaaagaaggcatcgggtggcagcatttcttttgtaaaaggtgacgtccctttggatgcaaatgctgatagttcgagagacaaagagccaatgttgcttgtttatgtaaatggttctcatgaatacgccatctttgatccccgggagagtgaggaggtggtcattagcaagaacaagcacaagaagattcaagctgaggaacctgcaccaatcggctacgcttctatttacggagagcttacaaaactggagccaaagaaagaagtttcagatgttccattcgtcccttcggacaggccttgggaaaccatattcagcgggtcgtctcatgttctcccgcctctcacaaaactatgctctgcattcttgtcatcgctgctggagaaacggcctgttgcaaacgagtgagccgccctagaacattgtcctctcatacaacggtaggtatactcgccagttgcagaatggaaatgcggaaggaaatccgtccgtgacgatgcatatgcccacttgaagagttcagagatgctgggtgatgccatctgaggttggttatggttatacagatatcacacggcccacgaggatcattttgcagcgatactcgacggccaacctactgatcgcagcaattttgttttcttctccgcttgacatgtaatcctgacagtaaaactagaaaatcttagtgtgctttatctgatgcgatgacgcggtgctcgttgaggtgctgcgactgtttggctattgagctgtctacggcacaaccgcatttcttttgtactattttgtttttttttcaaagaaagctcacgcttggatatctgaagttgataagctttgttactgggatccctgaatattgtatgttaggctgactcgagcagttcaccagaatgtagtttgaatatggatattagtatgggtaagctgctggagatagtcttagatacaaactaagcagtccagcaataagttcttcgtgagttgcactctgttgggcctagagatggcaatgggtacccgctacccgaaacccggtgggtttttgctctattagggtatgggtttgggtcaatttatgtacccacgggtttgttaatgggttcaaatggaaacccaacgggtacgtgggcataggtttgttcttccactacccatactcgcaaacccatgggtttttaaaatccgccttaaaatcaacatttcttataaatatgtatcataatattattaattgaatatgttctaattgaaataaacttcatgtaacaaattttaagctaaaatt

SEQ ID NO: 3002 - DNA, 3296 bp, Zea Mays
ccaaaaccctactactctgtcgagccagcgccgtctccctcccccactccattcccactcggacttggaccccaaaaccctagcggctagcgcctcctcgccgtcaccgccatgatcaccggcggccagagctacgtctcggcgccgccggccttctcggccgacgggcgcctcctcctcgtctgctccggtcgcgccgtctccgtcttcagcaccgccaccgccatgctagtgtcggagctggaggggcacgagggggacgtcaccgccgtggtggtggtggcgccgccagcgcaggcgaccgcggcggccaagcttgcgagctactgctggacggcggggctcgacggggtgctcatctactgggacttcttggccgcggaggtgatgcggaaggtccaggttgggctccccgtccactccatggtggttcctgacatatataggacctcaaaaggagttgaggtgtcgagcccctttgcattcatctctgtggaggatacgagtaagctggcaagtgaaccaaaagcgctgtgtgggcagatgagagtttatgacctgacaaaggggcgccaagtgggtggcctcctggccgagacacgtaaaccagaaaagatcgttgcaagtagttctggagaattcttgggcattacaaataaaagaaagctccatatatggcgcataccaacaaaagatttcaagcctgacaagataaggaagataaagctccggcacaccaaacacttgaccactctggcattccatccaactgagagaactgtggctggtggtgatgtaacagggcggatcctgatttggagatgttttggaaactcaaagttctctgaaagtagtgtacagtcgaaagaggatgacggaagggatggtgttaggggggatgatgatgcagacacttgcacaacatggcattggcactcaagcagtgtgaggtttctcaagttttcttctgatggagcatacttgttttcaggtggtttggagggagttattgttgtgtggcaactagatactggaaagagaaggtgtcatgtacaaataaccaagtctatcttctaaaaatgcctaatatggaggtcatgagatctattgctggaatcaagctgccaattgcttcaccaaacttgggcggatctaatcgggctgtgtatggatttgattatactaatagacttgttgctataccaactgaagattactgcatacagttctacaatttgtttgagaacgctgaggtttcagaggtgcaagtgtgtgagaggaatttccagcctattgatgatatcactatgtacatttccatggtttcattgtcaatcgatggcgatttgatgtgcaccgtggatgtcaaacttcctgaagaaggtttaggtggtcttgttacattgaagttttggaatcatgggtcaagagctggacattattttttgtccaccgtcatttatgagcctcacagtgatgatggggtttcttctgttgcattccgcccaggaagaaatatggccgttagctcttcttttggtggtaactttaaggtttgggtccagagtttgtcttcacaatcaaatgatgaaagaaattgttctggttggagatgccaatcagttggctcatacaagaagaaacctatgacatcagcagccttctcagccgatggatctgttcttgcagttgcagctgagagtaccatcacattgtgggatcctgataataatgcgcttgttggtgtcattgcagaaacactatcgtgtttttgatgtctctatgtcagagttcaagaccacagattgctctatggaatgtttcaaatctttccatgcagtggtcttacagcatttatgcagaagctgcatgctgttcgccagatgggagtgaatttgcagttcttgctcttcttagttgtcctgatggagaagcatcaacacaacaagatggagtaattcttctttttgatgcagaaagctcaaaccccattgcctcctggtcggtaaagaaggcatcgggtggcagcatttcttttgtaaaaggtgacgtccctttggatgcaaatgctgatagttcgagagacaaagagccaatgttgcttgtttatgtaaatggttctcatgaatacgccatctttgatccccgggagagtgaggaggtggtcattagcaagaacaagcacaagaagattcaagctgaggaacctgcaccaatcggctacgcttctatttacggagagcttacaaaactggagccaaagaaagaagtttcagatgttccattcgtcccttcggacaggccttgggaaaccatattcagcgggtcgtctcatgttctcccgcctctcacaaaactatgctctgcattcttgtcatcgctgctggagaaacggcctgttgcaaacgagtgagccgccctagaacattgtcctctcatacaacggtaggtatactcgccagttgcagaatggaaatgcggaaggaaatccgtccgtgacgatgcatatgcccacttgaagagttcagagatgctgggtgatgccatctgaggttggttatggttatacagatatcacacggcccacgaggatcattttgcagcgatactcgacggccaacctactgatcgcagcaattttgttttcttctccgcttgacatgtaatcctgacagtaaaactagaaaatcttagtgtgctttatctgatgcgatgacgcggtgctcgttgaggtgctgcgactgtttggctattgagctgtctacggcacaaccgcatttcttttgtactattttgtttttttttcaaagaaagctcacgcttggatatctgaagttgataagctttgttactgggatccctgaatattgtatgttaggctgactcgagcagttcaccagaatgtagtttgaatatggatattagtatgggtaagctgctggagatagtcttagatacaaactaagcagtccagcaataagttcttcgtgagttgcactctgttgggcctagagatggcaatgggtacccgctacccgaaacccggtgggtttttgctctattagggtatgggtttgggtcaatttatgtacccacgggtttgttaatgggttcaaatggaaacccaacgggtacgtgggcataggtttgttcttccactacccatactcgcaaacccatgggtttttaaaatccgccttaaaatcaacatttcttataaatatgtatcataatattattaattgaatatgttctaattgaaataaacttcatgtaacaaattttaagctaaaatt

SEQ ID NO: 3003 - DNA, 3363 bp, Zea Mays
ccaaaaccctactactctgtcgagccagcgccgtctccctcccccactccattcccactcggacttggaccccaaaaccctagcggctagcgcctcctcgccgtcaccgccatgatcaccggcggccagagctacgtctcggcgccgccggccttctcggccgacgggcgcctcctcctcgtctgctccggtcgcgccgtctccgtcttcagcaccgccaccgccatgctagtgtcggagctggaggggcacgagggggacgtcaccgccgtggtggtggtggcgccgccagcgcaggcgaccgcggcggccaagcttgcgagctactgctggacggcggggctcgacggggtgctcatctactgggacttcttggccgcggaggtgatgcggaaggtccaggttgggctccccgtccactccatggtggttcctgacatatataggacctcaaaaggagttgaggtgtcgagcccctttgcattcatctctgtggaggatacgagtaagctggcaagtgaaccaaaagcgctgtgtgggcagatgagagtttatgacctgacaaaggggcgccaagtgggtggcctcctggccgagacacgtaaaccagaaaagatcgttgcaagtagttctggagaattcttgggcattacaaataaaagaaagctccatatatggcgcataccaacaaaagatttcaagcctgacaagataaggaagataaagctccggcacaccaaacacttgaccactctggcattccatccaactgagagaactgtggctggtggtgatgtaacagggcggatcctgatttggagatgttttggaaactcaaagttctctgaaagtagtgtacagtcgaaagaggatgacggaagggatggtgttaggggggatgatgatgcagacacttgcacaacatggcattggcactcaagcagtgtgaggtttctcaagttttcttctgatggagcatacttgttttcaggtggtttggagggagttattgttgtgtggcaactagatactggaaagagaaggtataaaccacgtctggggtctcctcttttgttctttgtagattctccagattcttccatttcctgcgtgtcatgtacaaataaccaagtctatcttctaaaaatgcctaatatggaggtcatgagatctattgctggaatcaagctgccaattgcttcaccaaacttgggcggatctaatcgggctgtgtatggatttgattatactaatagacttgttgctataccaactgaagattactgcatacagttctacaatttgtttgagaacgctgaggtttcagaggtgcaagtgtgtgagaggaatttccagcctattgatgatatcactatgtacatttccatggtttcattgtcaatcgatggcgatttgatgtgcaccgtggatgtcaaacttcctgaagaaggtttaggtggtcttgttacattgaagttttggaatcatgggtcaagagctggacattattttttgtccaccgtcatttatgagcctcacagtgatgatggggtttcttctgttgcattccgcccaggaagaaatatggccgttagctcttcttttggtggtaactttaaggtttgggtccagagtttgtcttcacaatcaaatgatgaaagaaattgttctggttggagatgccaatcagttggctcatacaagaagaaacctatgacatcagcagccttctcagccgatggatctgttcttgcagttgcagctgagagtaccatcacattgtgggatcctgataataatgcgcttgttggtgtcattgcagaaacactatcgtgtttttgatgtctctatgtcagagttcaagaccacagattgctctatggaatgtttcaaatctttccatgcagtggtcttacagcatttatgcagaagctgcatgctgttcgccagatgggagtgaatttgcagttcttgctcttcttagttgtcctgatggagaagcatcaacacaacaagatggagtaattcttctttttgatgcagaaagctcaaaccccattgcctcctggtcggtaaagaaggcatcgggtggcagcatttcttttgtaaaaggtgacgtccctttggatgcaaatgctgatagttcgagagacaaagagccaatgttgcttgtttatgtaaatggttctcatgaatacgccatctttgatccccgggagagtgaggaggtggtcattagcaagaacaagcacaagaagattcaagctgaggaacctgcaccaatcggctacgcttctatttacggagagcttacaaaactggagccaaagaaagaagtttcagatgttccattcgtcccttcggacaggccttgggaaaccatattcagcgggtcgtctcatgttctcccgcctctcacaaaactatgctctgcattcttgtcatcgctgctggagaaacggcctgttgcaaacgagtgagccgccctagaacattgtcctctcatacaacggtaggtatactcgccagttgcagaatggaaatgcggaaggaaatccgtccgtgacgatgcatatgcccacttgaagagttcagagatgctgggtgatgccatctgaggttggttatggttatacagatatcacacggcccacgaggatcattttgcagcgatactcgacggccaacctactgatcgcagcaattttgttttcttctccgcttgacatgtaatcctgacagtaaaactagaaaatcttagtgtgctttatctgatgcgatgacgcggtgctcgttgaggtgctgcgactgtttggctattgagctgtctacggcacaaccgcatttcttttgtactattttgtttttttttcaaagaaagctcacgcttggatatctgaagttgataagctttgttactgggatccctgaatattgtatgttaggctgactcgagcagttcaccagaatgtagtttgaatatggatattagtatgggtaagctgctggagatagtcttagatacaaactaagcagtccagcaataagttcttcgtgagttgcactctgttgggcctagagatggcaatgggtacccgctacccgaaacccggtgggtttttgctctattagggtatgggtttgggtcaatttatgtacccacgggtttgttaatgggttcaaatggaaacccaacgggtacgtgggcataggtttgttcttccactacccatactcgcaaacccatgggtttttaaaatccgccttaaaatcaacatttcttataaatatgtatcataatattattaattgaatatgttctaattgaaataaacttcatgtaacaaattttaagctaaaatt

SEQ ID NO: 3004 - DNA, 3277 bp, Zea Mays
ccaaaaccctactactctgtcgagccagcgccgtctccctcccccactccattcccactcggacttggaccccaaaaccctagcggctagcgcctcctcgccgtcaccgccatgatcaccggcggccagagctacgtctcggcgccgccggccttctcggccgacgggcgcctcctcctcgtctgctccggtcgcgccgtctccgtcttcagcaccgccaccgccatgctagtgtcggagctggaggggcacgagggggacgtcaccgccgtggtggtggtggcgccgccagcgcaggcgaccgcggcggccaagcttgcgagctactgctggacggcggggctcgacggggtgctcatctactgggacttcttggccgcggaggtgatgcggaaggtccaggttgggctccccgtccactccatggtggttcctgacatatataggacctcaaaaggagttgaggtgtcgagcccctttgcattcatctctgtggaggatacgagtaagctggcaagtgaaccaaaagcgctgtgtgggcagatgagagtttatgacctgacaaaggggcgccaagtgggtggcctcctggccgagacacgtaaaccagaaaagatcgttgcaagtagttctggagaattcttgggcattacaaataaaagaaagctccatatatggcgcataccaacaaaagatttcaagcctgacaagataaggaagataaagctccggcacaccaaacacttgaccactctggcattccatccaactgagagaactgtggctggtggtgatgtaacagggcggatcctgatttggagatgttttggaaactcaaagttctctgaaagtagtgtacagtcgaaagaggatgacggaagggatggtgttaggggggatgatgatgcagacacttgcacaacatggcattggcactcaagcagtgtgaggtttctcaagttttcttctgatggagcatacttgttttcaggtggtttggagggagttattgttgtgtggcaactagatactggaaagagaaggtgtcatgtacaaataaccaagtctatcttctaaaaatgcctaatatggaggtcatgagatctattgctggaatcaagctgccaattgcttcaccaaacttgggcggatctaatcgggctgtgtatggatttgattatactaatagacttgttgctataccaactgaagattactgcatacagttctacaatttgtttgagaacgctgaggtttcagaggtgcaagtgtgtgagaggaatttccagcctattgatgatatcactatgtacatttccatggtttcattgtcaatcgatggcgatttgatgtgcaccgtggatgtcaaacttcctgaagaaggtttaggtggtcttgttacattgaagttttggaatcatgggtcaagagctggacattattttttgtccaccgtcatttatgagcctcacagtgatgatggggtttcttctgttgcattccgcccaggaagaaatatggccgttagctcttcttttggtggtaactttaaggtttgggtccagagtttgtcttcacaatcaaatgatgaaagaaattgttctggttggagatgccaatcagttggctcatacaattgcagctgagagtaccatcacattgtgggatcctgataataatgcgcttgttggtgtcattgcagaaacactatcgccagtgacaaatctttctttcgttgggacatcagtgtttttgatgtctctatgtcagagttcaagaccacagattgctctatggaatgtttcaaatctttccatgcagtggtcttacagcatttatgcagaagctgcatgctgttcgccagatgggagtgaatttgcagttcttgctcttcttagttgtcctgatggagaagcatcaacacaacaagatggagtaattcttctttttgatgcagaaagctcaaaccccattgcctcctggtcggtaaagaaggcatcgggtggcagcatttcttttgtaaaaggtgacgtccctttggatgcaaatgctgatagttcgagagacaaagagccaatgttgcttgtttatgtaaatggttctcatgaatacgccatctttgatccccgggagagtgaggaggtggtcattagcaagaacaagcacaagaagattcaagctgaggaacctgcaccaatcggctacgcttctatttacggagagcttacaaaactggagccaaagaaagaagtttcagatgttccattcgtcccttcggacaggccttgggaaaccatattcagcgggtcgtctcatgttctcccgcctctcacaaaactatgctctgcattcttgtcatcgctgctggagaaacggcctgttgcaaacgagtgagccgccctagaacattgtcctctcatacaacggtaggtatactcgccagttgcagaatggaaatgcggaaggaaatccgtccgtgacgatgcatatgcccacttgaagagttcagagatgctgggtgatgccatctgaggttggttatggttatacagatatcacacggcccacgaggatcattttgcagcgatactcgacggccaacctactgatcgcagcaattttgttttcttctccgcttgacatgtaatcctgacagtaaaactagaaaatcttagtgtgctttatctgatgcgatgacgcggtgctcgttgaggtgctgcgactgtttggctattgagctgtctacggcacaaccgcatttcttttgtactattttgtttttttttcaaagaaagctcacgcttggatatctgaagttgataagctttgttactgggatccctgaatattgtatgttaggctgactcgagcagttcaccagaatgtagtttgaatatggatattagtatgggtaagctgctggagatagtcttagatacaaactaagcagtccagcaataagttcttcgtgagttgcactctgttgggcctagagatggcaatgggtacccgctacccgaaacccggtgggtttttgctctattagggtatgggtttgggtcaatttatgtacccacgggtttgttaatgggttcaaatggaaacccaacgggtacgtgggcataggtttgttcttccactacccatactcgcaaacccatgggtttttaaaatccgccttaaaatcaacatttcttataaatatgtatcataatattattaattgaatatgttctaattgaaataaacttcatgtaacaaattttaagctaaaatt

SEQ ID NO: 3005 - DNA, 4234 bp, Zea Mays
ccaaaaccctactactctgtcgagccagcgccgtctccctcccccactccattcccactcggacttggaccccaaaaccctagcggctagcgcctcctcgccgtcaccgccatgatcaccggcggccagagctacgtctcggcgccgccggccttctcggccgacgggcgcctcctcctcgtctgctccggtcgcgccgtctccgtcttcagcaccgccaccgccatgctagtgtcggagctggaggggcacgagggggacgtcaccgccgtggtggtggtggcgccgccagcgcaggcgaccgcggcggccaagcttgcgagctactgctggacggcggggctcgacggggtgctcatctactgggacttcttggccgcggaggtgatgcggaaggtccaggttgggctccccgtccactccatggtggttcctgacatatataggacctcaaaaggagttgaggtgtcgagcccctttgcattcatctctgtggaggatacgagtaagctggcaagtgaaccaaaagcgctgtgtgggcagatgagagtttatgacctgacaaaggggcgccaagtgggtggcctcctggccgagacacgtaaaccagaaaagatcgttgcaagtagttctggagaattcttgggcattacaaataaaagaaagctccatatatggcgcataccaacaaaagatttcaagcctgacaagataaggaagataaagctccggcacaccaaacacttgaccactctggcattccatccaactgagagaactgtggctggtggtgatgtaacagggcggatcctgatttggagatgttttggaaactcaaagttctctgaaagtagtgtacagtcgaaagaggatgacggaagggatggtgttaggggggatgatgatgcagacacttgcacaacatggcattggcactcaagcagtgtgaggtttctcaagttttcttctgatggagcatacttgttttcaggtggtttggagggagttattgttgtgtggcaactagatactggaaagagaaggtataaaccacgtctggggtctcctcttttgttctttgtagattctccagattcttccatttcctgcgtaagtgtccttttctctctaaactattctttgttatgctttacaagaacccaatgccttttgctctgcagagcaaattatattattgatttatgaagtttttgataactgtattcccgcattccatatgagttactgcttagttaatgttccagtcttgcccagatgttaagtcactaatccattagaatcaaaacagtagttcaaaactcaggccactagatgtccaagtctagagcattgtatatggtaatgcatggatcttatgctgttatcattccttgctttcttatgcattgtagtttagataattaaattcaagttccctccatagtcccggccataatttgcttgaaataatattctagcaaaacatgtatttatgcttttatcacttgacaactttctatattgaagattaatactgaaatggccatttattaacccatgttttcctttgctatacgaatatgtgcgtaatcactgatttaagtctatctgttgcttggttcgtcacacaagaaaatatagctaacaaaagaagttgtttgtgtgagtattctatgcaagtatattgagggtttccagattgttgagttaatgcctgcttatgctgctatgccttagtataaagaattgggtaatagtttttattagagctggcagagaagtaaaatatggccctgctttccatatgtaattgtcctagcatgattcataaatgttgtccgatataggactggctaaatcactcatgactgtgttgccagctgcatctttgatctggtctgattttcttgcccatagtgtgcatgataacttttgttcgtatttcaggtgtcatgtacaaataaccaagtctatcttctaaaaatgcctaatatggaggtcatgagatctattgctggaatcaagctgccaattgcttcaccaaacttgggcggatctaatcgggctgtgtatggatttgattatactaatagacttgttgctataccaactgaagattactgcatacagttctacaatttgtttgagaacgctgaggtttcagaggtgcaagtgtgtgagaggaatttccagcctattgatgatatcactatgtacatttccatggtttcattgtcaatcgatggcgatttgatgtgcaccgtggatgtcaaacttcctgaagaaggtttaggtggtcttgttacattgaagttttggaatcatgggtcaagagctggacattattttttgtccaccgtcatttatgagcctcacagtgatgatggggtttcttctgttgcattccgcccaggaagaaatatggccgttagctcttcttttggtggtaactttaaggtttgggtccagagtttgtcttcacaatcaaatgatgaaagaaattgttctggttggagatgccaatcagttggctcatacaagaagaaacctatgacatcagcagccttctcagccgatggatctgttcttgcagttgcagctgagagtaccatcacattgtgggatcctgataataatgcgcttgttggtgtcattgcagaaacactatcgccagtgacaaatctttctttcgttgggacatcagtgtttttgatgtctctatgtcagagttcaagaccacagattgctctatggaatgtttcaaatctttccatgcagtggtcttacagcatttatgcagaagctgcatgctgttcgccagatgggagtgaatttgcagttcttgctcttcttagttgtcctgatggagaagcatcaacacaacaagatggagtaattcttctttttgatgcagaaagctcaaaccccattgcctcctggtcggtaaagaaggcatcgggtggcagcatttcttttgtaaaaggtgacgtccctttggatgcaaatgctgatagttcgagagacaaagagccaatgttgcttgtttatgtaaatggttctcatgaatacgccatctttgatccccgggagagtgaggaggtggtcattagcaagaacaagcacaagaagattcaagctgaggaacctgcaccaatcggctacgcttctatttacggagagcttacaaaactggagccaaagaaagaagtttcagatgttccattcgtcccttcggacaggccttgggaaaccatattcagcgggtcgtctcatgttctcccgcctctcacaaaactatgctctgcattcttgtcatcgctgctggagaaacggcctgttgcaaacgagtgagccgccctagaacattgtcctctcatacaacggtaggtatactcgccagttgcagaatggaaatgcggaaggaaatccgtccgtgacgatgcatatgcccacttgaagagttcagagatgctgggtgatgccatctgaggttggttatggttatacagatatcacacggcccacgaggatcattttgcagcgatactcgacggccaacctactgatcgcagcaattttgttttcttctccgcttgacatgtaatcctgacagtaaaactagaaaatcttagtgtgctttatctgatgcgatgacgcggtgctcgttgaggtgctgcgactgtttggctattgagctgtctacggcacaaccgcatttcttttgtactattttgtttttttttcaaagaaagctcacgcttggatatctgaagttgataagctttgttactgggatccctgaatattgtatgttaggctgactcgagcagttcaccagaatgtagtttgaatatggatattagtatgggtaagctgctggagatagtcttagatacaaactaagcagtccagcaataagttcttcgtgagttgcactctgttgggcctagagatggcaatgggtacccgctacccgaaacccggtgggtttttgctctattagggtatgggtttgggtcaatttatgtacccacgggtttgttaatgggttcaaatggaaacccaacgggtacgtgggcataggtttgttcttccactacccatactcgcaaacccatgggtttttaaaatccgccttaaaatcaacatttcttataaatatgtatcataatattattaattgaatatgttctaattgaaataaacttcatgtaacaaattttaagctaaaatt

SEQ ID NO: 3006 - DNA, 3379 bp, Zea Mays
ccaaaaccctactactctgtcgagccagcgccgtctccctcccccactccattcccactcggacttggaccccaaaaccctagcggctagcgcctcctcgccgtcaccgccatgatcaccggcggccagagctacgtctcggcgccgccggccttctcggccgacgggcgcctcctcctcgtctgctccggtcgcgccgtctccgtcttcagcaccgccaccgccatgctagtgtcggagctggaggggcacgagggggacgtcaccgccgtggtggtggtggcgccgccagcgcaggcgaccgcggcggccaagcttgcgagctactgctggacggcggggctcgacggggtgctcatctactgggacttcttggccgcggaggtgatgcggaaggtccaggttgggctccccgtccactccatggtggttcctgacatatataggacctcaaaaggagttgaggtgtcgagcccctttgcattcatctctgtggaggatacgagtaagctggcaagtgaaccaaaagcgctgtgtgggcagatgagagtttatgacctgacaaaggggcgccaagtgggtggcctcctggccgagatcgttgcaagtagttctggagaattcttgggcattacaaataaaagaaagctccatatatggcgcataccaacaaaagatttcaagcctgacaagataaggaagataaagctccggcacaccaaacacttgaccactctggcattccatccaactgagagaactgtggctggtggtgatgtaacagggcggatcctgatttggagatgttttggaaactcaaagttctctgaaagtagtgtacagtcgaaagaggatgacggaagggatggtgttaggggggatgatgatgcagacacttgcacaacatggcattggcactcaagcagtgtgaggtttctcaagttttcttctgatggagcatacttgttttcaggtggtttggagggagttattgttgtgtggcaactagatactggaaagagaaggtataaaccacgtctggggtctcctcttttgttctttgtagattctccagattcttccatttcctgcgtgtcatgtacaaataaccaagtctatcttctaaaaatgcctaatatggaggtcatgagatctattgctggaatcaagctgccaattgcttcaccaaacttgggcggatctaatcgggctgtgtatggatttgattatactaatagacttgttgctataccaactgaagattactgcatacagttctacaatttgtttgagaacgctgaggtttcagaggtgcaagtgtgtgagaggaatttccagcctattgatgatatcactatgtacatttccatggtttcattgtcaatcgatggcgatttgatgtgcaccgtggatgtcaaacttcctgaagaaggtttaggtggtcttgttacattgaagttttggaatcatgggtcaagagctggacattattttttgtccaccgtcatttatgagcctcacagtgatgatggggtttcttctgttgcattccgcccaggaagaaatatggccgttagctcttcttttggtggtaactttaaggtttgggtccagagtttgtcttcacaatcaaatgatgaaagaaattgttctggttggagatgccaatcagttggctcatacaagaagaaacctatgacatcagcagccttctcagccgatggatctgttcttgcagttgcagctgagagtaccatcacattgtgggatcctgataataatgcgcttgttggtgtcattgcagaaacactatcgccagtgacaaatctttctttcgttgggacatcagtgtttttgatgtctctatgtcagagttcaagaccacagattgctctatggaatgtttcaaatctttccatgcagtggtcttacagcatttatgcagaagctgcatgctgttcgccagatgggagtgaatttgcagttcttgctcttcttagttgtcctgatggagaagcatcaacacaacaagatggagtaattcttctttttgatgcagaaagctcaaaccccattgcctcctggtcggtaaagaaggcatcgggtggcagcatttcttttgtaaaaggtgacgtccctttggatgcaaatgctgatagttcgagagacaaagagccaatgttgcttgtttatgtaaatggttctcatgaatacgccatctttgatccccgggagagtgaggaggtggtcattagcaagaacaagcacaagaagattcaagctgaggaacctgcaccaatcggctacgcttctatttacggagagcttacaaaactggagccaaagaaagaagtttcagatgttccattcgtcccttcggacaggccttgggaaaccatattcagcgggtcgtctcatgttctcccgcctctcacaaaactatgctctgcattcttgtcatcgctgctggagaaacggcctgttgcaaacgagtgagccgccctagaacattgtcctctcatacaacggtaggtatactcgccagttgcagaatggaaatgcggaaggaaatccgtccgtgacgatgcatatgcccacttgaagagttcagagatgctgggtgatgccatctgaggttggttatggttatacagatatcacacggcccacgaggatcattttgcagcgatactcgacggccaacctactgatcgcagcaattttgttttcttctccgcttgacatgtaatcctgacagtaaaactagaaaatcttagtgtgctttatctgatgcgatgacgcggtgctcgttgaggtgctgcgactgtttggctattgagctgtctacggcacaaccgcatttcttttgtactattttgtttttttttcaaagaaagctcacgcttggatatctgaagttgataagctttgttactgggatccctgaatattgtatgttaggctgactcgagcagttcaccagaatgtagtttgaatatggatattagtatgggtaagctgctggagatagtcttagatacaaactaagcagtccagcaataagttcttcgtgagttgcactctgttgggcctagagatggcaatgggtacccgctacccgaaacccggtgggtttttgctctattagggtatgggtttgggtcaatttatgtacccacgggtttgttaatgggttcaaatggaaacccaacgggtacgtgggcataggtttgttcttccactacccatactcgcaaacccatgggtttttaaaatccgccttaaaatcaacatttcttataaatatgtatcataatattattaattgaatatgttctaattgaaataaacttcatgtaacaaattttaagctaaaatt

SEQ ID NO: 3007 - DNA, 2919 bp, Zea Mays
atgattggtcaaaagaccaatttgccctccctactctatccaatttgccctcccgagtcctgactctatccgtgtctagtgtcttccgtctcgatcccgcgggtgggactcgccggcgacaaaaacgaaaagcgacttgccctccgcggcctccggccttcccactccactcgccctcctctcctagcgtcggtgagccggtgcgctgcagtccccgctccccttccgcgtcgccgcgatggaggtcttccgggagcacggggacgacggagtgccctaggattccatcacgccgccaagcatcagtcccgcagccagggatttcttctccgaccccgaccttcatgtgagtcgcggccttcctcctcgaagcggatccggcggattggaggggccaaccatagcaggtacttcttgcgggtgtaagcatttcgctgcacttggagacgcttatttggagtatttgaaggctttggagactgcccagatgaagagtagatttcttgttctctgtgccattgtctgcgtcatggctcagatgggagatgccaatgtcgtgctattggggaataatctgaccttgtcctttgctgatattgaggcaagcttttctccaggagtgaaaggatcaggagtcaatggcatagtttatgcttctgaacctttgaatgcctgcagcccgttaacaatcaaggcagtcaagggcccgccatctccctttgcattaattgtaagaggcggatgcacgtttgatgagaaagtgaaaaatgcacaggatgctggattcaaagctgcaattgtgtatgacaatgaaaatagtggggtcctggtttcaatggctggaagctcaagtggcatacacatatacgctgttttcgtttcgaaggcctcaggagaggtgttgaagaaatcttcaggacatactgatgtagagctacgtgtttctttgtgagaaggcatcgaataaggagagaccaccctagaatcccagaagctagagagttccatggaatgagcagtcagttagttaaggctatgccaagtcttattttcacgaaagtgcaagaagataactgcacatcatcgatgtgtgccatttgtttggaagactacagtgtcggagaaaagctcagagtgctgccttgtcgtcacaagttccatgcagcttgtgtggacttgtggctaacttcttggagaacattctgccctgtatgcaagcgagacgcgacgagtggagtatcagaacttcccgccacagaggctacccccttgctttcttctgctgtccggttaccttctcagccatcttcattcaggtcgagcgtggcagcctccccacccaggccgataagccggcatccttcatcgcactcggtttctcgtgcttactctgtctctagtaccccccactcccccaaccccttcagatctcacacaaacttacctggggtcatccatgcaagcagaagcaccacagaccttgcaaacatgtcgtctccccaccctcgcatctcacacttgtcgtcgtcgacacactccctcgtcggcagccacctatctccaccaatcagcataaggtatccattgccccattctcggcatgaatcgcccagtccacacgtcagttcgccctacatctcaaattctggctacggttcttcaagctactactaccttggcggctcgagccagcacgggtcgtacctgcggcggtgtggagagtcagggccaagcctgtctaccatggtccctcggtcatcgcagcagcagttccagtcagaggcaaacgtggccgcaggcgcgtcgtctgcccagtcctcacggcagtcctacctgcgacgctgtggcgattcagacgccagcttgtctgacatggcgtcagcccagtcgttgccggggtgctgaggcagatgtgcactacaagatgcggcttgacctgtgcatacaatgaggcttgcagcgtcacataggtggggaacatgtatagcatagactttatgatcctgttcttgtctgtgagtggtatatggttctttttttgtgccttttattgtgtgcatctgacgtgacaggagcctgttgaagttgattctgttaacattttagtccgcaccatgcgtccatgccagtttctccctagatttgctactctactaccatgcacacatttgaacgaggcagtgctcagctgcatgcatctgatgttaatgttgtgctgctcgctcagtgagcatgaagagatggtcgtctgagcaaattcagaaaacagcactttgtctgaaaaactatggttttggaattgaaaatcctatgttcaattgggggaaaatcagtggaatgcaactgttacaagttttcccctacccactacaagcatacagtactccatgtgactgcaagaatctatgctctttgaaataattgttgtcaccaaagcatcatcagttcataaccacacaacctaaacctacaaccattacgtacatacgcatttatactaccccaacacatctatgtaaagctactatcattgaaccaaccttttgaatttctagtctgagctcaactacagctgcacactaataatacagatgaagctatcaagtctgaaaagcggtaactctacgaattaaacagccatggctacacatccttttaactggagtcatgtctactgcacaaaatactccaagctagcaagcttcttttgctgtaagcacgtgtaaccattctcccacagcatgttgttctaactcttgttacgatgttgcgcaactgtttgtatggacatcaggacatgaaatctgtcaagattttcccgtagtggctcggtgttagatggtttctccttccaacaccttctgcacaagcatcaaaatctctgtgacctggaagcgtagcagaaaaagttatgtccag

SEQ ID NO: 3008 - DNA, 2848 bp, Zea Mays
aaaagaccaatttgccctccctactctatccaatttgccctcccgagtcctgactctatccgtgtctagtgtcttccgtctcgatcccgcgggtgggactcgccggcgacaaaaacgaaaagcgacttgccctccgcggcctccggccttcccactccactcgccctcctctcctagcgtcggtgagccggtgcgctgcagtccccgctccccttccgcgtcgccgcgatggaggtcttccgggagcacggggacgacggagtgccctaggattccatcacgccgccaagcatcagtcccgcagccagggatttcttctccgaccccgaccttcatgtgagtcgcggccttcctcctcgaagcggatccggcggattggaggggccaaccatagcagggctttggagactgcccagatgaagagtagatttcttgttctctgtgccattgtctgcgtcatggctcagatgggagatgccaatgtcgtgctattggggaataatctgaccttgtcctttgctgatattgaggcaagcttttctccaggagtgaaaggatcaggagtcaatggcatagtttatgcttctgaacctttgaatgcctgcagcccgttaacaatcaaggcagtcaagggcccgccatctccctttgcattaattgtaagaggcggatgcacgtttgatgagaaagtgaaaaatgcacaggatgctggattcaaagctgcaattgtgtatgacaatgaaaatagtggggtcctggtttcaatggctggaagctcaagtggcatacacatatacgctgttttcgtttcgaaggcctcaggagaggtgttgaagaaatcttcaggacatactgatgtagagctacgtgtttctttgtgagaaggcatcgaataaggagagaccaccctagaatcccagaagctagagagttccatggaatgagcagtcagttagttaaggctatgccaagtcttattttcacgaaagtgcaagaagataactgcacatcatcgatgtgtgccatttgtttggaagactacagtgtcggagaaaagctcagagtgctgccttgtcgtcacaagttccatgcagcttgtgtggacttgtggctaacttcttggagaacattctgccctgtatgcaagcgagacgcgacgagtggagtatcagaacttcccgccacagaggctacccccttgctttcttctgctgtccggttaccttctcagccatcttcattcaggtcgagcgtggcagcctccccacccaggccgataagccggcatccttcatcgcactcggtttctcgtgcttactctgtctctagtaccccccactcccccaaccccttcagatctcacacaaacttacctggggtcatccatgcaagcagaagcaccacagaccttgcaaacatgtcgtctccccaccctcgcatctcacacttgtcgtcgtcgacacactccctcgtcggcagccacctatctccaccaatcagcataaggtatccattgccccattctcggcatgaatcgcccagtccacacgtcagttcgccctacatctcaaattctggctacggttcttcaagctactactaccttggcggctcgagccagcacgggtcgtacctgcggcggtgtggagagtcagggccaagcctgtctaccatggtccctcggtcatcgcagcagcagttccagtcagaggcaaacgtggccgcaggcgcgtcgtctgcccagtcctcacggcagtcctacctgcgacgctgtggcgattcagacgccagcttgtctgacatggcgtcagcccagtcgttgccggggtgctgaggcagatgtgcactacaagatgcggcttgacctgtgcatacaatgaggcttgcagcgtcacataggtggggaacatgtatagcatagactttatgatcctgttcttgtctgtgagtggtatatggttctttttttgtgccttttattgtgtgcatctgacgtgacaggagcctgttgaagttgattctgttaacattttagtccgcaccatgcgtccatgccagtttctccctagatttgctactctactaccatgcacacatttgaacgaggcagtgctcagctgcatgcatctgatgttaatgttgtgctgctcgctcagtgagcatgaagagatggtcgtctgagcaaattcagaaaacagcactttgtctgaaaaactatggttttggaattgaaaatcctatgttcaattgggggaaaatcagtggaatgcaactgttacaagttttcccctacccactacaagcatacagtactccatgtgactgcaagaatctatgctctttgaaataattgttgtcaccaaagcatcatcagttcataaccacacaacctaaacctacaaccattacgtacatacgcatttatactaccccaacacatctatgtaaagctactatcattgaaccaaccttttgaatttctagtctgagctcaactacagctgcacactaataatacagatgaagctatcaagtctgaaaagcggtaactctacgaattaaacagccatggctacacatccttttaactggagtcatgtctactgcacaaaatactccaagctagcaagcttcttttgctgtaagcacgtgtaaccattctcccacagcatgttgttctaactcttgttacgatgttgcgcaactgtttgtatggacatcaggacatgaaatctgtcaagattttcccgtagtggctcggtgttagatggtttctccttccaacaccttctgcacaagcatcaaaatctctgtgacctggaagcgtagcagaaaaagttatgtccag

SEQ ID NO: 3009 - DNA, 3254 bp, Zea Mays
tttgccctcccgagtcctgactctatccgtgtctagtgtcttccgtctcgatcccgcgggtgggactcgccggcgacaaaaacgaaaagcgacttgccctccgcggcctccggccttcccactccactcgccctcctctcctagcgtcggtgagccggtgcgctgcagtccccgctccccttccgcgtcgccgcgatggaggtcttccgggagcacggggacgacggagtgccctaggattccatcacgccgccaagcatcagtcccgcagccagggatttcttctccgaccccgaccttcatgtgagtcgcggccttcctcctcgaagcggatccggcggattggaggggccaaccatagcaggtacttcttgcgggtgtaagcatttcgctgcacttggagacgcttatttggagtatttgaagtatgagttggctctctgtcctgtcagttatgtgcctgtgcttcataaaaaagagctacattttcttctactagggctttggagactgcccagatgaagagtagatttcttgttctctgtgccattgtctgcgtcatggctcagatgggagatgccaatgtcgtgctattggggaataatctgaccttgtcctttgctgatattgaggcaagcttttgtgagtcctgcactccttacaatcatttaattttgtctgatcaattgctagcattggtgcccacttaatctaaaactttttgtttgcatggtttgcttatatgctcaatttaggtgttatgtttgaccttcttctttcttacactgtagattagctgattcatggtgtgccttggcttttttataccttttctgacttgcttgtgtacacttcatttttttcttactctcttattccttttcacattcatcaagtattttattttccttaacgattcaaacatgccatttcaattggattacagctccaggagtgaaaggatcaggagtcaatggcatagtttatgcttctgaacctttgaatgcctgcagcccgttaacaatcaaggcagtcaagggcccgccatctccctttgcattaattgtaagaggcggatgcacgtttgatgagaaagtgaaaaatgcacaggatgctggattcaaagctgcaattgtgtatgacaatgaaaatagtggggtcctggtttcaatggctggaagctcaagtggcatacacatatacgctgttttcgtttcgaaggcctcaggagaggtgttgaagaaatcttcaggacatactgatgtagagctacgtgtttctttgtgagaaggcatcgaataaggagagaccaccctagaatcccagaagctagagagttccatggaatgagcagtcagttagttaaggctatgccaagtcttattttcacgaaagtgcaagaagataactgcacatcatcgatgtgtgccatttgtttggaagactacagtgtcggagaaaagctcagagtgctgccttgtcgtcacaagttccatgcagcttgtgtggacttgtggctaacttcttggagaacattctgccctgtatgcaagcgagacgcgacgagtggagtatcagaacttcccgccacagaggctacccccttgctttcttctgctgtccggttaccttctcagccatcttcattcaggtcgagcgtggcagcctccccacccaggccgataagccggcatccttcatcgcactcggtttctcgtgcttactctgtctctagtaccccccactcccccaaccccttcagatctcacacaaacttacctggggtcatccatgcaagcagaagcaccacagaccttgcaaacatgtcgtctccccaccctcgcatctcacacttgtcgtcgtcgacacactccctcgtcggcagccacctatctccaccaatcagcataaggtatccattgccccattctcggcatgaatcgcccagtccacacgtcagttcgccctacatctcaaattctggctacggttcttcaagctactactaccttggcggctcgagccagcacgggtcgtacctgcggcggtgtggagagtcagggccaagcctgtctaccatggtccctcggtcatcgcagcagcagttccagtcagaggcaaacgtggccgcaggcgcgtcgtctgcccagtcctcacggcagtcctacctgcgacgctgtggcgattcagacgccagcttgtctgacatggcgtcagcccagtcgttgccggggtgctgaggcagatgtgcactacaagatgcggcttgacctgtgcatacaatgaggcttgcagcgtcacataggtggggaacatgtatagcatagactttatgatcctgttcttgtctgtgagtggtatatggttctttttttgtgccttttattgtgtgcatctgacgtgacaggagcctgttgaagttgattctgttaacattttagtccgcaccatgcgtccatgccagtttctccctagatttgctactctactaccatgcacacatttgaacgaggcagtgctcagctgcatgcatctgatgttaatgttgtgctgctcgctcagtgagcatgaagagatggtcgtctgagcaaattcagaaaacagcactttgtctgaaaaactatggttttggaattgaaaatcctatgttcaattgggggaaaatcagtggaatgcaactgttacaagttttcccctacccactacaagcatacagtactccatgtgactgcaagaatctatgctctttgaaataattgttgtcaccaaagcatcatcagttcataaccacacaacctaaacctacaaccattacgtacatacgcatttatactaccccaacacatctatgtaaagctactatcattgaaccaaccttttgaatttctagtctgagctcaactacagctgcacactaataatacagatgaagctatcaagtctgaaaagcggtaactctacgaattaaacagccatggctacacatccttttaactggagtcatgtctactgcacaaaatactccaagctagcaagcttcttttgctgtaagcacgtgtaaccattctcccacagcatgttgttctaactcttgttacgatgttgcgcaactgtttgtatggacatcaggacatgaaatctgtcaagattttcccgtagtggctcggtgttagatggtttctccttccaacaccttctgcacaagcatcaaaatctctgtgacctggaagcgtagcagaaaaagttatgtccag

SEQ ID NO: 3010 - DNA, 3646 bp, Zea Mays
tttgccctcccgagtcctgactctatccgtgtctagtgtcttccgtctcgatcccgcgggtgggactcgccggcgacaaaaacgaaaagcgacttgccctccgcggcctccggccttcccactccactcgccctcctctcctagcgtcggtgagccggtgcgctgcagtccccgctccccttccgcgtcgccgcgatggaggtcttccgggagcacggggacgacggagtgccctaggattccatcacgccgccaagcatcagtcccgcagccagggatttcttctccgaccccgaccttcatgtgagtcgcggccttcctcctcgaagcggatccggcggattggaggggccaaccatagcaggtacttcttgcgggtgtaagcatttcgctgcacttggagacgcttatttggagtatttgaagtatgagttggctctctgtcctgtcagttatgtgcctgtgcttcataaaaaagagctacattttcttctactagggctttggagactgcccagatgaagagtagatttcttgttctctgtgccattgtctgcgtcatggctcagatgggagatgccaatgtcgtgctattggggaataatctgaccttgtcctttgctgatattgaggcaagcttttgtgagtcctgcactccttacaatcatttaattttgtctgatcaattgctagcattggtgcccacttaatctaaaactttttgtttgcatggtttgcttatatgctcaatttaggtgttatgtttgaccttcttctttcttacactgtagattagctgattcatggtgtgccttggcttttttataccttttctgacttgcttgtgtacacttcatttttttcttactctcttattccttttcacattcatcaagtattttattttccttaacgattcaaacatgccatttcaattggattacagctccaggagtgaaaggatcaggagtcaatggcatagtttatgcttctgaacctttgaatgcctgcagcccgttaacaatcaaggcagtcaagggcccgccatctccctttgcattaattgtaagaggcggatgcacgtttgatgagaaagtgaaaaatgcacaggatgctggattcaaagctgcaattgtgtatgacaatgaaaatagtggggtcctggtttcaagtaattttccttgtcacttgaacttgttcctttccattttcttaatgcagtttgtgtagatgcatgattcactttatctatagcattgtgaagttgaatagatagccatgcactaagtagagacaagactggtgcacaagcaaatgctctcatctctgctctctacaaacaagccaaaacaattatttgtgctgatcatgcttaaatatacaacaaaaattaactgcatagctggatggaattttattccactgatttatattggcaattgattttgtaccttctctaattagaattgttgcagtggctggaagctcaagtggcatacacatatacgctgttttcgtttcgaaggcctcaggagaggtgttgaagaaatcttcaggacatactgatgtagaggtgtggatactacctacattcgacaactcagcctggtcgatcatggcaatctcattcatatcgctgcttgccatgtctgctgtattagctacgtgtttctttgtgagaaggcatcgaataaggagagaccaccctagaatcccagaagctagagagttccatggaatgagcagtcagttagttaaggctatgccaagtcttattttcacgaaagtgcaagaagataactgcacatcatcgatgtgtgccatttgtttggaagactacagtgtcggagaaaagctcagagtgctgccttgtcgtcacaagttccatgcagcttgtgtggacttgtggctaacttcttggagaacattctgccctgtatgcaagcgagacgcgacgagtggagtatcagaacttcccgccacagaggctacccccttgctttcttctgctgtccggttaccttctcagccatcttcattcaggtcgagcgtggcagcctccccacccaggccgataagccggcatccttcatcgcactcggtttctcgtgcttactctgtctctagtaccccccactcccccaaccccttcagatctcacacaaacttacctggggtcatccatgcaagcagaagcaccacagaccttgcaaacatgtcgtctccccaccctcgcatctcacacttgtcgtcgtcgacacactccctcgtcggcagccacctatctccaccaatcagcataaggtatccattgccccattctcggcatgaatcgcccagtccacacgtcagttcgccctacatctcaaattctggctacggttcttcaagctactactaccttggcggctcgagccagcacgggtcgtacctgcggcggtgtggagagtcagggccaagcctgtctaccatggtccctcggtcatcgcagcagcagttccagtcagaggcaaacgtggccgcaggcgcgtcgtctgcccagtcctcacggcagtcctacctgcgacgctgtggcgattcagacgccagcttgtctgacatggcgtcagcccagtcgttgccggggtgctgaggcagatgtgcactacaagatgcggcttgacctgtgcatacaatgaggcttgcagcgtcacataggtggggaacatgtatagcatagactttatgatcctgttcttgtctgtgagtggtatatggttctttttttgtgccttttattgtgtgcatctgacgtgacaggagcctgttgaagttgattctgttaacattttagtccgcaccatgcgtccatgccagtttctccctagatttgctactctactaccatgcacacatttgaacgaggcagtgctcagctgcatgcatctgatgttaatgttgtgctgctcgctcagtgagcatgaagagatggtcgtctgagcaaattcagaaaacagcactttgtctgaaaaactatggttttggaattgaaaatcctatgttcaattgggggaaaatcagtggaatgcaactgttacaagttttcccctacccactacaagcatacagtactccatgtgactgcaagaatctatgctctttgaaataattgttgtcaccaaagcatcatcagttcataaccacacaacctaaacctacaaccattacgtacatacgcatttatactaccccaacacatctatgtaaagctactatcattgaaccaaccttttgaatttctagtctgagctcaactacagctgcacactaataatacagatgaagctatcaagtctgaaaagcggtaactctacgaattaaacagccatggctacacatccttttaactggagtcatgtctactgcacaaaatactccaagctagcaagcttcttttgctgtaagcacgtgtaaccattctcccacagcatgttgttctaactcttgttacgatgttgcgcaactgtttgtatggacatcaggacatgaaatctgtcaagattttcccgtagtggctcggtgttagatggtttctccttccaacaccttctgcacaagcatcaaaatctctgtgacctggaagcgtagcagaaaaagttatgtccag

SEQ ID NO: 3011 - DNA, 3169 bp, Zea Mays
tttgccctcccgagtcctgactctatccgtgtctagtgtcttccgtctcgatcccgcgggtgggactcgccggcgacaaaaacgaaaagcgacttgccctccgcggcctccggccttcccactccactcgccctcctctcctagcgtcggtgagccggtgcgctgcagtccccgctccccttccgcgtcgccgcgatggaggtcttccgggagcacggggacgacggagtgccctaggattccatcacgccgccaagcatcagtcccgcagccagggatttcttctccgaccccgaccttcatgtgagtcgcggccttcctcctcgaagcggatccggcggattggaggggccaaccatagcaggtacttcttgcgggtgtaagcatttcgctgcacttggagacgcttatttggagtatttgaaggctttggagactgcccagatgaagagtagatttcttgttctctgtgccattgtctgcgtcatggctcagatgggagatgccaatgtcgtgctattggggaataatctgaccttgtcctttgctgatattgaggcaagcttttgtgagtcctgcactccttacaatcatttaattttgtctgatcaattgctagcattggtgcccacttaatctaaaactttttgtttgcatggtttgcttatatgctcaatttaggtgttatgtttgaccttcttctttcttacactgtagattagctgattcatggtgtgccttggcttttttataccttttctgacttgcttgtgtacacttcatttttttcttactctcttattccttttcacattcatcaagtattttattttccttaacgattcaaacatgccatttcaattggattacagctccaggagtgaaaggatcaggagtcaatggcatagtttatgcttctgaacctttgaatgcctgcagcccgttaacaatcaaggcagtcaagggcccgccatctccctttgcattaattgtaagaggcggatgcacgtttgatgagaaagtgaaaaatgcacaggatgctggattcaaagctgcaattgtgtatgacaatgaaaatagtggggtcctggtttcaaaattgttgcagtggctggaagctcaagtggcatacacatatacgctgttttcgtttcgaaggcctcaggagaggtgttgaagaaatcttcaggacatactgatgtagaggcatcgaataaggagagaccaccctagaatcccagaagctagagagttccatggaatgagcagtcagttagttaaggctatgccaagtcttattttcacgaaagtgcaagaagataactgcacatcatcgatgtgtgccatttgtttggaagactacagtgtcggagaaaagctcagagtgctgccttgtcgtcacaagttccatgcagcttgtgtggacttgtggctaacttcttggagaacattctgccctgtatgcaagcgagacgcgacgagtggagtatcagaacttcccgccacagaggctacccccttgctttcttctgctgtccggttaccttctcagccatcttcattcaggtcgagcgtggcagcctccccacccaggccgataagccggcatccttcatcgcactcggtttctcgtgcttactctgtctctagtaccccccactcccccaaccccttcagatctcacacaaacttacctggggtcatccatgcaagcagaagcaccacagaccttgcaaacatgtcgtctccccaccctcgcatctcacacttgtcgtcgtcgacacactccctcgtcggcagccacctatctccaccaatcagcataaggtatccattgccccattctcggcatgaatcgcccagtccacacgtcagttcgccctacatctcaaattctggctacggttcttcaagctactactaccttggcggctcgagccagcacgggtcgtacctgcggcggtgtggagagtcagggccaagcctgtctaccatggtccctcggtcatcgcagcagcagttccagtcagaggcaaacgtggccgcaggcgcgtcgtctgcccagtcctcacggcagtcctacctgcgacgctgtggcgattcagacgccagcttgtctgacatggcgtcagcccagtcgttgccggggtgctgaggcagatgtgcactacaagatgcggcttgacctgtgcatacaatgaggcttgcagcgtcacataggtggggaacatgtatagcatagactttatgatcctgttcttgtctgtgagtggtatatggttctttttttgtgccttttattgtgtgcatctgacgtgacaggagcctgttgaagttgattctgttaacattttagtccgcaccatgcgtccatgccagtttctccctagatttgctactctactaccatgcacacatttgaacgaggcagtgctcagctgcatgcatctgatgttaatgttgtgctgctcgctcagtgagcatgaagagatggtcgtctgagcaaattcagaaaacagcactttgtctgaaaaactatggttttggaattgaaaatcctatgttcaattgggggaaaatcagtggaatgcaactgttacaagttttcccctacccactacaagcatacagtactccatgtgactgcaagaatctatgctctttgaaataattgttgtcaccaaagcatcatcagttcataaccacacaacctaaacctacaaccattacgtacatacgcatttatactaccccaacacatctatgtaaagctactatcattgaaccaaccttttgaatttctagtctgagctcaactacagctgcacactaataatacagatgaagctatcaagtctgaaaagcggtaactctacgaattaaacagccatggctacacatccttttaactggagtcatgtctactgcacaaaatactccaagctagcaagcttcttttgctgtaagcacgtgtaaccattctcccacagcatgttgttctaactcttgttacgatgttgcgcaactgtttgtatggacatcaggacatgaaatctgtcaagattttcccgtagtggctcggtgttagatggtttctccttccaacaccttctgcacaagcatcaaaatctctgtgacctggaagcgtagcagaaaaagttatgtccag

SEQ ID NO: 3012 - DNA, 3268 bp, Zea Mays
tttgccctcccgagtcctgactctatccgtgtctagtgtcttccgtctcgatcccgcgggtgggactcgccggcgacaaaaacgaaaagcgacttgccctccgcggcctccggccttcccactccactcgccctcctctcctagcgtcggtgagccggtgcgctgcagtccccgctccccttccgcgtcgccgcgatggaggtcttccgggagcacggggacgacggagtgccctaggattccatcacgccgccaagcatcagtcccgcagccagggatttcttctccgaccccgaccttcatgtgagtcgcggccttcctcctcgaagcggatccggcggattggaggggccaaccatagcaggtacttcttgcgggtgtaagcatttcgctgcacttggagacgcttatttggagtatttgaaggctttggagactgcccagatgaagagtagatttcttgttctctgtgccattgtctgcgtcatggctcagatgggagatgccaatgtcgtgctattggggaataatctgaccttgtcctttgctgatattgaggcaagcttttctccaggagtgaaaggatcaggagtcaatggcatagtttatgcttctgaacctttgaatgcctgcagcccgttaacaatcaaggcagtcaagggcccgccatctccctttgcattaattgtaagaggcggatgcacgtttgatgagaaagtgaaaaatgcacaggatgctggattcaaagctgcaattgtgtatgacaatgaaaatagtggggtcctggtttcaagtaattttccttgtcacttgaacttgttcctttccattttcttaatgcagtttgtgtagatgcatgattcactttatctatagcattgtgaagttgaatagatagccatgcactaagtagagacaagactggtgcacaagcaaatgctctcatctctgctctctacaaacaagccaaaacaattatttgtgctgatcatgcttaaatatacaacaaaaattaactgcatagctggatggaattttattccactgatttatattggcaattgattttgtaccttctctaattagaattgttgcagtggctggaagctcaagtggcatacacatatacgctgttttcgtttcgaaggcctcaggagaggtgttgaagaaatcttcaggacatactgatgtagaggtgtggatactacctacattcgacaactcagcctggtcgatcatggcaatctcattcatatcgctgcttgccatgtctgctgtattagctacgtgtttctttgtgagaaggcatcgaataaggagagaccaccctagaatcccagaagctagagagttccatggaatgagcagtcagttagttaaggctatgccaagtcttattttcacgaaagtgcaagaagataactgcacatcatcgatgtgtgccatttgtttggaagactacagtgtcggagaaaagctcagagtgctgccttgtcgtcacaagttccatgcagcttgtgtggacttgtggctaacttcttggagaacattctgccctgtatgcaagcgagacgcgacgagtggagtatcagaacttcccgccacagaggctacccccttgctttcttctgctgtccggttaccttctcagccatcttcattcaggtcgagcgtggcagcctccccacccaggccgataagccggcatccttcatcgcactcggtttctcgtgcttactctgtctctagtaccccccactcccccaaccccttcagatctcacacaaacttacctggggtcatccatgcaagcagaagcaccacagaccttgcaaacatgtcgtctccccaccctcgcatctcacacttgtcgtcgtcgacacactccctcgtcggcagccacctatctccaccaatcagcataaggtatccattgccccattctcggcatgaatcgcccagtccacacgtcagttcgccctacatctcaaattctggctacggttcttcaagctactactaccttggcggctcgagccagcacgggtcgtacctgcggcggtgtggagagtcagggccaagcctgtctaccatggtccctcggtcatcgcagcagcagttccagtcagaggcaaacgtggccgcaggcgcgtcgtctgcccagtcctcacggcagtcctacctgcgacgctgtggcgattcagacgccagcttgtctgacatggcgtcagcccagtcgttgccggggtgctgaggcagatgtgcactacaagatgcggcttgacctgtgcatacaatgaggcttgcagcgtcacataggtggggaacatgtatagcatagactttatgatcctgttcttgtctgtgagtggtatatggttctttttttgtgccttttattgtgtgcatctgacgtgacaggagcctgttgaagttgattctgttaacattttagtccgcaccatgcgtccatgccagtttctccctagatttgctactctactaccatgcacacatttgaacgaggcagtgctcagctgcatgcatctgatgttaatgttgtgctgctcgctcagtgagcatgaagagatggtcgtctgagcaaattcagaaaacagcactttgtctgaaaaactatggttttggaattgaaaatcctatgttcaattgggggaaaatcagtggaatgcaactgttacaagttttcccctacccactacaagcatacagtactccatgtgactgcaagaatctatgctctttgaaataattgttgtcaccaaagcatcatcagttcataaccacacaacctaaacctacaaccattacgtacatacgcatttatactaccccaacacatctatgtaaagctactatcattgaaccaaccttttgaatttctagtctgagctcaactacagctgcacactaataatacagatgaagctatcaagtctgaaaagcggtaactctacgaattaaacagccatggctacacatccttttaactggagtcatgtctactgcacaaaatactccaagctagcaagcttcttttgctgtaagcacgtgtaaccattctcccacagcatgttgttctaactcttgttacgatgttgcgcaactgtttgtatggacatcaggacatgaaatctgtcaagattttcccgtagtggctcggtgttagatggtttctccttccaacaccttctgcacaagcatcaaaatctctgtgacctggaagcgtagcagaaaaagttatgtccag

SEQ ID NO: 3013 - DNA, 177 bp, Zea Mays
cttgacctggcctggtgcttgcagttgcagttactcacacaaccagcaccctgcaaggctgcaactgcaaacgtcaccatcggtcagtcacattccctgcatgttttctgacccttgtgcacatcgtatacaatgctcgactttttcccattcttttcaccgagaaaatgataatcc

SEQ ID NO: 3014 - DNA, 311 bp, Zea Mays
aaccacacacactcggcaaagacgcagatgcacaagacgagacggcttctcgtggccccgacactcctttccagcgagaccctgtgctgcaatccttacacatcacgtctcatgattcccagatttttccaccccaaataaacagtaatagctctggagatggcttcagcataagtaagcaagaaagaaagacagaaagaaataaaaacagaaaactggaccacgccatcaataatgaaacacgcaaggtggcgtgtggacggcggaataattttggaaggcaggcacaaaagcttccactttaattaaat

SEQ ID NO: 3015 - DNA, 1226 bp, Zea Mays
attttttcagcctgagcgtggtgacgcaggcaggaatgggtcccgactcccgacggatcagggaaatccccggcgagcagaacagcaatggagcgtcatcgaccggtcagtcggtcacgggcggagtttaaacgccacggagcagcggcggagagacgacgacagcacagtacgcggtgagcccgagtagtccatctccatccgtcgctgcagttgccgctgttcctctgcggcgctggccgccggccagcgccattgatcagtgtaattattactagctcgccagcgttgacttgacaggcctgaaatccgtccacctcgtcagatcggagttgcaggtccaggtgtcactcacgctaacggatgattgtgaccaggatttggtggtgggatctctggggagaaacctcttcctattcaaaccctagggatctcatctaaatccgctggtcactaaatcagtcctaaatgatgctaaaatgttaaattttccgtggttaggattaacctttgcaggtcacacaatgacacaaaagatcacaaagattcaatgataacagcagtagtaatagggttaagtctcacacataaacagacagcaggggcattgttctccaactcccgatccaccacagtagacttaggccataaacagacagcaggggcattgtctcgagcagttgtagcacacaggtgcaacggaaagcaactagtaatacgtagtcggataggataggataaaggcggcaaccgatctagcgctgccgagcgaggcacgaggctgtgaacgtcaagagcggaggagcatcagatgaaggtccagttgacgaacatgagcgccaggcactgcggcgcgccgtcgtcgcccaccaccttccacgccaccgcctgctcgtacgacgcctgccgccccatgctcgacctgcacacgccgccggggaggtacgccaggccctgctcacaaagggtcaaaggcaaggcttttacctacttagccacacccacaccgtcaaggctacgtacgagcaggcagagttagtagcggtacctgcagcatgatcttggggagctgtgcgaccagggccttctgtcccccgtcatcaaggaccgcctccagctgcaggtcctggacgttcgcgaccgtcgtctccagtatgtcgaagccggcgctgttggcgaacttgagtgtgaaagccggctgcgagcagtagacaatgcccggtctc

SEQ ID NO: 3016 - DNA, 209 bp, Zea Mays
caaagcccaacaacagctgcttagcaacaatgaaattgagcagtgatacataccgcagcagtcatcttttgtgccagtatcttaggagattcatagagcggtcgaagaacctcagggacactacaagcctgtataaaaacaagataatttaggcacatctgctaaaaaagtcaaaaaaaaaactacatgcatatcttaatgaattagtc

SEQ ID NO: 3017 - DNA, 964 bp, Zea Mays
gtaccaccgttttttccttctctatgaaagtctgaaaatagctagtgcggagcgtgcctctgcggtccgataggcgggttcgcatccggccatccgatactgtgccagtgcggccgcgcggcggcggagcaaccacgcgcgcagaccgccgtcgccacctcctccctccctccgctccccggcgtgcgtccgatccaccaggaatcgaaggctcccacacgccccaacgcgatgctgcgcaacttcccgcaggcccggaggctcctcaggcggatggggttcgagaaggaggacgcctacttctggaagcagatgggcaaggccatgctctgcacgtacacgctcttcggcgtcgtctggctctggaacgagacgtcgccgctcgggtggtggacgctgaagccgcgccccaagaaagagagatggcacacctctatgagcgcaggaagttcccgtaccctggcgatgatgaggcggtcgaggagtttgtaaagagcggaggtgctcttggaaccacaattggacccaggggattcgctgacgccaatatggattctgaaaacatgcagaagcagctgcagtctaagaagttcgagcaggaagcacagaaactgtggattcggatgaggaatgaggtcgtacaggagctccaggagaaggggtttgatatcgagtgaatttgaaaacctgcagtatggtcggcgctgaggatgttaaaacttaaaaccacttgccatctaaattggagaactgtataacttaggaataaaagagtttgtagctatctttttaactaactatctggtgcattcttggtgctgctagattgtaccgaaaataatttttgctgtcttgtggagaacagaggatctcatttgaatatttgatcctcttttaatgtttcttattgcctgatcatcacaaaattgtgcttctggaaattactcatgttttgatgttggtg

SEQ ID NO: 3018 - DNA, 1915 bp, Zea Mays
cccgatccttcctttcccacttccccttttttgcccgcccgctacccaaccgccgccgcggttctcgctgccagcgacggacgggccacaccgcgcaggggctcagccccgccacccaccttaaccccgccgtcgggaggcgtcgtccccggcccggcccggcccggccctcgccctctactgcaactggactggcgcgtagacctgtccccgccacgagatcgttccgccctatgtcggtgaagatgctctttgcatagctcaagctgcaatctgatggaccctgatgacaagaagtttggaaatggaccaagggagctcactggtgctgttgatttgatcagccactacaaactgctgccacaccatgatttcttttgcaagaaacctttgccgctggcaatatcagatacacattatcttcacaatgttgtgggagacactgaaattcgcaaaggagaaggaatggagttagatcaacttgttcataatgcatatctgagggataaacctgcttatattcagccctttgatatggaaactctggggcaagcgttccaacttcgagaaacagctcttgtggatttgccttctactgaaaaaggtataccgactatttcgggtaaaccaaaaagtgagtccaaggacaaagagaagaagcataaaaggcacaaagacaaagacaaggaacacaagaagcacaaacatcggcataaggatcggagtaaggacaaagataaagacaaagacaaggataagaaaaaagataaaagtggccatcatgaaaagaagaggaagcatgagggaacagaagattcagtagatgtgcataagcacaagaagagtaagcacaagagctccaaaaccgatgagatggggaatggagttagttaacacttcctagctctacctccaatccttgtaatttgctgttaaaacttaaaaggagacagacggtctctgctatcaaaaccctgtgcagaatagtgggtatcatgaatgggagctcttatttttgcagagtccattgtgaagagaattgaatttgttaatataggtctaatccttccaactgtgcaaatcaactgtgttcctccctgaagcattggttgtagggtgcgcttgaaaggatgtgcaatgagattgtttcgatgtagcgtgcatgagtaccctgagtagctgtggatggttatacagtttgtggtctagggatgtgcagtgagggcagggaattgggaataatttcgtgcccccatcgaccttgatttgtagggtaggatgatttactgtttaaccactagcaaatgttagtagccagttccatgttcatttactccacggcaactgtgctttcgtgtgccaataaccggagttgatccacatgtaatgaattggtgtcaaattgacgatcctgtgtttcaaagtatggttattggatcgtgttgccagcttttgcgtgatttgtcacacgtataatcactatagctgacttgctggtacaaatagcaatgggtaaaaatagggtgggtatatgcctggtaactaagaccatgttcggtagttgagtgttggagatagtctaacattaacctgaaaaataatttgtcctgtaaatgagtcaatatattaataaggaaggagaaaagaaataagtgatatttgactttaacttaagctttattacaagtactattaataatgttaggagacgcaagttatgttgattttaagctgaatttaaaactcatggatttgtaggtataggtagtgcaagaataaatttatgtacatacacattggttttttttgaagctattaataaacatatggataaagaaaatagttgaaacctatgcagcaaaatctcatcaggtctagagtggttacccatcgcaaatctctacttgctggtaag

SEQ ID NO: 3019 - DNA, 1037 bp, Zea Mays
ctttcccacttccccttttttgcccgcccgctacccaaccgccgccgcggttctcgctgccagcgacggacgggccacaccgcgcaggggctcagccccgccacccaccttaaccccgccgtcgggaggcgtcgtccccggcccggcccggcccggccctcgccctctactgcaactggactggcgcgtagacctgtccccgccacgagatcgttccgccctatgtcggaccaagggagctcactggtgctgttgatttgatcagccactacaaactgctgccacaccatgatttcttttgcaagaaacctttgccgctggcaatatcagatacacattatcttcacaatgttgtgggagacactgaaattcgcaaaggagaaggaatggagttagatcaacttgttcataatgcatatctgagggataaacctgcttatattcagccctttgatatggaaactctggggcaagcgttccaacttcgagaaacagctcttgtggatttgccttctactgaaaaaggtataccgactatttcgggtaaaccaaaaagtgagtccaaggacaaagagaagaagcataaaaggcacaaagacaaagacaaggaacacaagaagcacaaacatcggcataaggatcggagtaaggacaaagataaagacaaagacaaggataagaaaaaagataaaagtggccatcatgaaaagaagaggaagcatgagggaacagaagattcagtagatgtgcataagcacaagaagagtaagcacaagagctccaaaaccgatgagatggggaatggagttagttaacacttcctagctctacctccaatccttgtaatttgctgttaaaacttaaaaggagacagacggtctctgctatcaaaaccctgtgcagaatagtggtccttccaggtggaggttaggggtggggcaattagaggagggcggtgggtggaggcgctgtcctccggctctcgctgaaagtaatagagaaaaacaaatgaaatggtacacaacataaccagtagc

SEQ ID NO: 3020 - DNA, 2942 bp, Zea Mays
ctttcccacttccccttttttgcccgcccgctacccaaccgccgccgcggttctcgctgccagcgacggacgggccacaccgcgcaggggctcagccccgccacccaccttaaccccgccgtcgggaggcgtcgtccccggcccggcccggcccggccctcgccctctactgcaactggactggcgcgtagacctgtccccgccacgagatcgttccgccctatgtcggtgaagatgctctttgcatagctcaagctgcaatctgatggaccctgatgacaagaagtttggaaatggaccaagggagctcactggtgctgttgatttgatcagccactacaaactgctgccacaccatgatttcttttgcaagaaacctttgccgctggcaatatcagatacacattatcttcacaatgttgtgggagacactgaaattcgcaaaggagaaggaatggagttagatcaacttgttcataatgcatatctgagggataaacctgcttatattcagccctttgatatggaaactctggggcaagcgttccaacttcgagaaacagctcttgtggatttgccttctactgaaaaaggtataccgactatttcgggtaaaccaaaaagtgagtccaaggacaaagagaagaagcataaaaggcacaaagacaaagacaaggaacacaagaagcacaaacatcggcataaggatcggagtaaggacaaagataaagacaaagacaaggataagaaaaaagataaaagtggccatcatgaaaagaagaggaagcatgagggaacagaagattcagtagatgtgcataagcacaagaagagtaagcacaagagctccaaaaccgatgagatggggaatggagttagttaacacttcctagctctacctccaatccttgtaatttgctgttaaaacttaaaaggagacagacggtctctgctatcaaaaccctgtgcagaatagtgattctcagaatacaccaaaaagagacaaccgggaaccaggataggctcaacacatgcaccagcagtcggcgcgcctccgacgcctcacacggatctaaacacgcggcgatacggttctgaggtcgtatcacacggattgggctgcgtcttgtggtgcacctaggatttcaccctagagatatcgtgcaacagtgtggcgaggaaagaggcggagacaacgagcagcgaggtatgtggtgtggggtgagacaagatgaagttttttctcttatttttttccacgctcgcgagattagggatggtgatggtggagttgttggactatagatggtcaaatgggtcgtgcttgacgggctagctcgagacacgagtcatttaatagtgttgaggcccgacacgtgaaccgtgtcatgcctaggcctccttgtcgaccccgcaacaattttaatagtgcattgagagaccccactgttaatagtgtgttgagttgtcactggtatgccgcgatctcaactaaaaccgagccatcatgatttctttctgtaatagagccagagaaacaataatattaaggtccaaagtgcattgaataaacacaacaatgttgatatctggttttaagccatcaacaaacctattcacaatagctgacacactaaacaaaggattgtgagcaagtatttggtgcataagtgtgtcaaattcatcttgtacttagagacactgttcgactgcctaacatgagaaactgtcggatacggtggttatgttggtctctctcaaatctagcataaacaatgcatagaatttaggacaatgagtctgtctataagaccaggatccacagactgaagccaaaaggctgtcgagcccacaaaatatatgacaacaattttcacccataactgatgggccacagaaaaaacttaaaagtacgactcacattttgtcttccacatttttggatggtggccatcaaatcgagggaaactcaattgaggcaagacaacaaccacatgtggaggataaactagtagaagtgaattagactgacgcggtataaaagttaaagcaaaaccctgaggtaggaacgagtgagtacctgtgatcggacctgtggagttagagtggtgaccacttcaaaaccagaacttcggtgaaacttggaagcgtccagatcactaatcccatagctgttcgttgccccgcatttgcgctgagtgaggaatgcggcactaatgttttgagggttgcgatcgaaaatcttgagggcatcccgaaaaggcaccaattcttccactttgtcggccaactgtgccacctcaacgagcagatggtccactgccacattcacttggggcttccatgctaccaatttccgcgcgaccgcgatattttcttcaagagtttgtttgatcaatttgttctgactctgcgtattttgtaacaaagtggtgagatctgcgatattacgctccatagcctccgattgtttttgaccgcgagtcttgaattgagggcgacgacggtagtcaggaaggtctgtcgggattggcctgaataatctgcttttgtatctttgggctagtcaaagtgcaattacctggagcgttgttaagaacatacttgttgacctcttcactatttacagcaagaaatttcaagatttcaataaggcctcgtttgtttcctttcatttcgaggaattggaatcttactaatggaatagattatttttttagaatgtgacattccaccactttccaaagttatcatataagcctacctcaaattcatggggtgagagatggaaatggattctatagatttacatgctatttttccgatgtacaacttatagcacattcttctacttgcgcctctattacataaatgtagtatataactatctccctcatataatttaagataatatacaaatatattacatatataaatatata

SEQ ID NO: 3021 - DNA, 1342 bp, Zea Mays
ctttcccacttccccttttttgcccgcccgctacccaaccgccgccgcggttctcgctgccagcgacggacgggccacaccgcgcaggggctcagccccgccacccaccttaaccccgccgtcgggaggcgtcgtccccggcccggcccggcccggccctcgccctctactgcaactggactggcgcgtagacctgtccccgccacgagatcgttccgccctatgtcggtgaagatgctctttgcatagctcaagctgcaatctgatggaccctgatgacaagaagtttggaaatggaccaagggagctcactggtgctgttgatttgatcagccactacaaactgctgccacaccatgatttcttttgcaagaaacctttgccgctggcaatatcagatacacattatcttcacaatgttgtgggagacactgaaattcgcaaaggagaaggaatggagttagatcaacttgttcataatgcatatctgagggataaacctgcttatattcagccctttgatatggaaactctggggcaagcgttccaacttcgagaaacagctcttgtggatttgccttctactgaaaaaggtataccgactatttcgggtaaaccaaaaagtgagtccaaggacaaagagaagaagcataaaaggcacaaagacaaagacaaggaacacaagaagcacaaacatcggcataaggatcggagtaaggacaaagataaagacaaagacaaggataagaaaaaagataaaagtggccatcatgaaaagaagaggaagcatgagggaacagaagattcagtagatgtgcataagcacaagaagagtaagcacaagagctccaaaaccgatgagatggggaatggagttagttaacacttcctagctctacctccaatccttgtaatttgctgttaaaacttaaaaggagacagacggtctctgctatcaaaaccctgtgcagaatagtgactcttcattttcatcatgtccatggaatgacaatccttgatgcaaaagaaacttgaaacatcaaagtgaatatgtcaaccttatcttataaagattgcgatcatcatcactccacttctcaattttattatcaattgctgcattaggatttataaagccaagatatttctcttcggctatcttatgtgacatagaacccacatgttttagaagtgcttcagaccctttattccaattattccaaccatctgaagtaaatgcagaagtccctttgcccttatttgctttacttttgaataagtagcacatatagaaaaatgcagcatctttcttgacactatattcaatccaagaaattttttg

SEQ ID NO: 3022 - DNA, 1255 bp, Zea Mays
ctttcccacttccccttttttgcccgcccgctacccaaccgccgccgcggttctcgctgccagcgacggacgggccacaccgcgcaggggctcagccccgccacccaccttaaccccgccgtcgggaggcgtcgtccccggcccggcccggcccggccctcgccctctactgcaactggactggcgcgtagacctgtccccgccacgagatcgttccgccctatgtcggtgaagatgctctttgcatagctcaagctgcaatctgatggaccctgatgacaagaagtttggaaatggaccaagggagctcactggtgctgttgatttgatcagccactacaaactgctgccacaccatgatttcttttgcaagaaacctttgccgctggcaatatcagatacacattatcttcacaatgttgtgggagacactgaaattcgcaaaggagaaggaatggagttagatcaacttgttcataatgcatatctgagggataaacctgcttatattcagccctttgatatggaaactctggggcaagcgttccaacttcgagaaacagctcttgtggatttgccttctactgaaaaaggtataccgactatttcgggtaaaccaaaaagtgagtccaaggacaaagagaagaagcataaaaggcacaaagacaaagacaaggaacacaagaagcacaaacatcggcataaggatcggagtaaggacaaagataaagacaaagacaaggataagaaaaaagataaaagtggccatcatgaaaagaagaggaagcatgagggaacagaagattcagtagatgtgcataagcacaagaagagtaagcacaagagctccaaaaccgatgagatggggaatggagttagttaacacttcctagctctacctccaatccttgtaatttgctgttaaaacttaaaaggagacagacggtctctgctatcaaaaccctgtgcagaatagtggtcctgtgagaagaaacatcttcgaaaggccaaaaacacaatgccgaagctaccaatcagggagcttcgtagcgtatctccagatgcaccgacttaaagatgaaatgaccaatcggcccatgacaacttgtgttatgattgtaaccatttgtaaagggcatgaatgtaatttctcacaggctgcgtcctgtgcctataaatagatgaacagtaccctcgtacttttcacgctttttcacatcttacttttgcccttgccttctgtcgcgctcaaggt

SEQ ID NO: 3023 - DNA, 1340 bp, Zea Mays
ctttcccacttccccttttttgcccgcccgctacccaaccgccgccgcggttctcgctgccagcgacggacgggccacaccgcgcaggggctcagccccgccacccaccttaaccccgccgtcgggaggcgtcgtccccggcccggcccggcccggccctcgccctctactgcaactggactggcgcgtagacctgtccccgccacgagatcgttccgccctatgtcggtgaagatgctctttgcatagctcaagctgcaatctgatggaccctgatgacaagaagtttggaaatggaccaagggagctcactggtgctgttgatttgatcagccactacaaactgctgccacaccatgatttcttttgcaagaaacctttgccgctggcaatatcagatacacattatcttcacaatgttgtgggagacactgaaattcgcaaaggagaaggaatggagttagatcaacttgttcataatgcatatctgagggataaacctgcttatattcagccctttgatatggaaactctggggcaagcgttccaacttcgagaaacagctcttgtggatttgccttctactgaaaaaggtataccgactatttcgggtaaaccaaaaagtgagtccaaggacaaagagaagaagcataaaaggcacaaagacaaagacaaggaacacaagaagcacaaacatcggcataaggatcggagtaaggacaaagataaagacaaagacaaggataagaaaaaagataaaagtggccatcatgaaaagaagaggaagcatgagggaacagaagattcagtagatgtgcataagcacaagaagagtaagcacaagagctccaaaaccgatgagatggggaatggagttagttaacacttcctagctctacctccaatccttgtaatttgctgttaaaacttaaaaggagacagacggtctctgctatcaaaaccctgtgcagaatagtggttgtctttcacctggatcatgtgggagacaactgacattataaagtgttggcggtggtgttgggggtatgcttcgtcgccgaaggtcctgtgagaagaaacatcttcgaaaggccaaaaacacaatgccgaagctaccaatcagggagcttcgtagcgtatctccagatgcaccgacttaaagatgaaatgaccaatcggcccatgacaacttgtgttatgattgtaaccatttgtaaagggcatgaatgtaatttctcacaggctgcgtcctgtgcctataaatagatgaacagtaccctcgtacttttcacgctttttcacatcttacttttgcccttgccttctgtcgcgctcaaggt

SEQ ID NO: 3024 - DNA, 1764 bp, Zea Mays
ctttcccacttccccttttttgcccgcccgctacccaaccgccgccgcggttctcgctgccagcgacggacgggccacaccgcgcaggggctcagccccgccacccaccttaaccccgccgtcgggaggcgtcgtccccggcccggcccggcccggccctcgccctctactgcaactggactggcgcgtagacctgtccccgccacgagatcgttccgccctatgtcggtgaagatgctctttgcatagctcaagctgcaatctgatggaccctgatgacaagaagtttggaaatggaccaagggagctcactggtgctgttgatttgatcagccactacaaactgctgccacaccatgatttcttttgcaagaaacctttgccgctggcaatatcagatacacattatcttcacaatgttgtgggagacactgaaattcgcaaaggagaaggaatggagttagatcaacttgttcataatgcatatctgagggataaacctgcttatattcagccctttgatatggaaactctggggcaagcgttccaacttcgagaaacagctcttgtggatttgccttctactgaaaaaggtataccgactatttcgggtaaaccaaaaagtgagtccaaggacaaagagaagaagcataaaaggcacaaagacaaagacaaggaacacaagaagcacaaacatcggcataaggatcggagtaaggacaaagataaagacaaagacaaggataagaaaaaagataaaagtggccatcatgaaaagaagaggaagcatgagggaacagaagattcagtagatgtgcataagcacaagaagagtaagggtatcatgaatgggagctcttatttttgcagagtccattgtgaagagaattgaatttgttaatataggtctaatccttccaactgtgcaaatcaactgtgttcctccctgaagcattggttgtagggtgcgcttgaaaggatgtgcaatgagattgtttcgatgtagcgtgcatgagtaccctgagtagctgtggatggttatacagtttgtggtctagggatgtgcagtgagggcagggaattgggaataatttcgtgcccccatcgaccttgatttgtagggtaggatgatttactgtttaaccactagcaaatgttagtagccagttccatgttcatttactccacggcaactgtgctttcgtgtgccaataaccggagttgatccacatgtaatgaattggtgtcaaattgacgatcctgtgtttcaaagtatggttattggatcgtgttgccagcttttgcgtgatttgtcacacgtataatcactatagctgacttgctggtacaaatagcaatgggtaaaaatagggtgggtatatgcctggtaactaagaccatgttcggtagttgagtgttggagatagtctaacattaacctgaaaaataatttgtcctgtaaatgagtcaatatattaataaggaaggagaaaagaaataagtgatatttgactttaacttaagctttattacaagtactattaataatgttaggagacgcaagttatgttgattttaagctgaatttaaaactcatggatttgtaggtataggtagtgcaagaataaatttatgtacatacacattggttttttttgaagctattaataaacatatggataaagaaaatagttgaaacctatgcagcaaaatctcatcaggtctagagtggttacccatcgcaaatctctacttgctggtaag

SEQ ID NO: 3025 - DNA, 2079 bp, Zea Mays
ctttcccacttccccttttttgcccgcccgctacccaaccgccgccgcggttctcgctgccagcgacggacgggccacaccgcgcaggggctcagccccgccacccaccttaaccccgccgtcgggaggcgtcgtccccggcccggcccggcccggccctcgccctctactgcaactggactggcgcgtagacctgtccccgccacgagatcgttccgccctatgtcggtgaagatgctctttgcatagctcaagctgcaatctgatggaccctgatgacaagaagtttggaaatggtgcatatacaacatggtatatcatagtttgcctccaagttaccattatcagtattatgccaatcaagtagcactatctgaaattttgattgtgtggctggtattatcaaccagaatggttggttaatggttagtgctggaaaggaacaaaaatgaatctgtttgatggaagcaggaccaagggagctcactggtgctgttgatttgatcagccactacaaactgctgccacaccatgatttcttttgcaagaaacctttgccgctggcaatatcagatacacattatcttcacaatgttgtgggagacactgaaattcgcaaaggagaaggaatggagttagatcaacttgttcataatgcatatctgagggataaacctgcttatattcagccctttgatatggaaactctggggcaagcgttccaacttcgagaaacagctcttgtggatttgccttctactgaaaaaggtataccgactatttcgggtaaaccaaaaagtgagtccaaggacaaagagaagaagcataaaaggcacaaagacaaagacaaggaacacaagaagcacaaacatcggcataaggatcggagtaaggacaaagataaagacaaagacaaggataagaaaaaagataaaagtggccatcatgaaaagaagaggaagcatgagggaacagaagattcagtagatgtgcataagcacaagaagagtaagcacaagagctccaaaaccgatgagatggggaatggagttagttaacacttcctagctctacctccaatccttgtaatttgctgttaaaacttaaaaggagacagacggtctctgctatcaaaaccctgtgcagaatagtgggtatcatgaatgggagctcttatttttgcagagtccattgtgaagagaattgaatttgttaatataggtctaatccttccaactgtgcaaatcaactgtgttcctccctgaagcattggttgtagggtgcgcttgaaaggatgtgcaatgagattgtttcgatgtagcgtgcatgagtaccctgagtagctgtggatggttatacagtttgtggtctagggatgtgcagtgagggcagggaattgggaataatttcgtgcccccatcgaccttgatttgtagggtaggatgatttactgtttaaccactagcaaatgttagtagccagttccatgttcatttactccacggcaactgtgctttcgtgtgccaataaccggagttgatccacatgtaatgaattggtgtcaaattgacgatcctgtgtttcaaagtatggttattggatcgtgttgccagcttttgcgtgatttgtcacacgtataatcactatagctgacttgctggtacaaatagcaatgggtaaaaatagggtgggtatatgcctggtaactaagaccatgttcggtagttgagtgttggagatagtctaacattaacctgaaaaataatttgtcctgtaaatgagtcaatatattaataaggaaggagaaaagaaataagtgatatttgactttaacttaagctttattacaagtactattaataatgttaggagacgcaagttatgttgattttaagctgaatttaaaactcatggatttgtaggtataggtagtgcaagaataaatttatgtacatacacattggttttttttgaagctattaataaacatatggataaagaaaatagttgaaacctatgcagcaaaatctcatcaggtctagagtggttacccatcgcaaatctctacttgctggtaag

SEQ ID NO: 3026 - DNA, 1118 bp, Zea Mays
gtatatcatagtttgcctccaagttaccattatcagtattatgccaatcaagtagcactatctgaaattttgattgtgtggctggtattatcaaccagaatggttggttaatggttagtgctggaaaggaacaaaaatgaatctgtttgatggaagcaggaccaagggagctcactggtgctgttgatttgatcagccactacaaactgctgccacaccatgatttcttttgcaagaaacctttgccgctggcaatatcagatacacattatcttcacaatgttgtgggagacactgaaattcgcaaaggagaaggaatggagttagatcaacttgttcataatgcatatctgagggataaacctgcttatattcagccctttgatatggaaactctggggcaagcgttccaacttcgagaaacagctcttgtggatttgccttctactgaaaaaggtataccgactatttcgggtaaaccaaaaagtgagtccaaggacaaagagaagaagcataaaaggcacaaagacaaagacaaggaacacaagaagcacaaacatcggcataaggatcggagtaaggacaaagataaagacaaagacaaggataagaaaaaagataaaagtggccatcatgaaaagaagaggaagcatgagggaacagaagattcagtagatgtgcataagcacaagaagagtaagcacaagagctccaaaaccgatgagatggggaatggagttagttaacacttcctagctctacctccaatccttgtaatttgctgttaaaacttaaaaggagacagacggtctctgctatcaaaaccctgtgcagaatagtggtcctgtgagaagaaacatcttcgaaaggccaaaaacacaatgccgaagctaccaatcagggagcttcgtagcgtatctccagatgcaccgacttaaagatgaaatgaccaatcggcccatgacaacttgtgttatgattgtaaccatttgtaaagggcatgaatgtaatttctcacaggctgcgtcctgtgcctataaatagatgaacagtaccctcgtacttttcacgctttttcacatcttacttttgcccttgccttctgtcgcgctcaaggt

SEQ ID NO: 3027 - DNA, 2432 bp, Zea Mays
cgagatcatcggaggaatcctgctaggcccgtcggcgctggggcggagccacaggttcctgcacgccgtgttcccggcccagagcatgacggtgctggacacgctggccaacatcggcctgctcttcttcctcttcctcgtgggcctcgagctggacatctccgccatccgccgcaccggcaagaaggccctggccatcgcgctggccggcatcagcgcgccgttcgcgctcggcatcggcacgtcgttcgcgttccgcgccaccatcgtcaagggcacgccgcaggggcccttcctcgtcttcatgggcgtggcgctctccatcaccgcgttcccggtgctggcccgcatcctcgccgagctcaagctgctgaccacggacctcggccgcatggccatgtccgccgcagcggtcaacgacgtcgccgcctggatcctcctggcgctcgccatcgccctctcgggctccggctcgcccatcgtctcgctgtgggtgctgctcaccgccgctggatttgtcgttgctgtctcgctcttccttcgcccggtgctggcctggatggcgcgccgctcccccgagggcgagccggtcaaggaggtctacatctgcgccaccctcgccatcgtgctcgccgccggcttcgtcaccgacaccatcggcatccatgccctgttcggcgccttcatggtggggatcgtggtccccaaggacgggcctttcgccggcgtcctcatcgagaaggtggaggacctcatctcggggctcctcctcccgctctacttcgtctccagcgggctcaagaccgacgtggccaccatcaagggcgccaagtcctggggcctgctcgtgctcgtcatcgctaacgcgtgcctcggcaagatcggcggcacggtgatcacgtccctgctcgtcaagatccccgtccgcgaggccgtcacgctcggcttcctcatgaacaccaaggggctcgtggagctcatcgtcctcaacatcggccgcgaccgcaaggtgctgaacgacgaggcgttcgccatcctggtgctcatggcgctcttcaccaccttcatcacgacgcccatcgtgatggccatctacaagccggcgcggcgggcggtgccctacaagcgccgcacggtggagtgcgcggcgggcgacgcggacggcgagctgcgcgtgttggcctgcttccacaccaaccgccacatccccacgctgctgaacctggtggaggcgtccaggggcaccgcgcgccgccgcctcaccatgtacgcaatgcacctggtggagctctcggagcggtcgtcggccatcagcctggtacagcgcgcgcgccgcgacggcatgccctttttcagcggcggcaaggagcagcgggcggagcaggtggtggtggcgttcgaggcgttccagcagctgagctccgtgcgggtgcgcgccatgacggccatctcggacctggacaccatccaccgcgacgtcatcgacagcgccgccgacaagcgcgccgccatcgtggtgatgccgtaccaccgggcgctcggccacgacggctccttcgcgtcgctggggtcggcgtaccacgccgtcaacaagcgcgtgctccgcgaggcgccctgctcggtcgccatcctcgtggaccgcggcctcggcgggcacgcccaggtgtcggccaagaacgtgtccttctccgtcgccgtgctcttcttcggcgggccggacgaccgcgaggcgctggcctacgcgacgcgcatggccgagcacccgggcgtcgccgtgacgctggccaggttgcagccgagccgaccgccgctgctggacgaggccgagagcgcggccgacgaggccgcggtggaggcgttcaaggccagggtcggggccgtgaaggacgggtcggtgcggttcgaggagccggaggcgtgcaccagggagcaggtgctggagaccatcgagtcgctgtccgggttcaacgtgttcgtggtggggcggatgccgccggtggcgccgctggtggagaggcccgacgagctgggccccgtcgggagctacctggtgtcgcccgagttcaggacgtcggcgtccgtgctggtgatcaagaggtacgacccggccacgaaccccaagagcaagaggttcgaccccaaggcggggccgccggtggcgacggaggaggacgtgctggacgaggagatggggatggggcgcgccaccgtggtgcccgtgtgatgcaaaatttcgccgatgagcgacatggcgtgcatgagtaggtgcacgtacagtacatacgacgagctgcatgcgctcgctggcacgcgctgaggtgtgacgcgtatcgccaccgacggacgacgtgcgaccttattgaatgaagtgtatataatatatattattgggacatacgtacatgcatgccgcgccctttgttggctagcta

SEQ ID NO: 3028 - DNA, 2832 bp, Zea Mays
caaccaactgcttgtatcgcggatatcgatctctgtttcgtttatttgctgctaccaagtcaattcgatccagtcgtctcaatcgtccagcgtacccacgcgcgcggcggcggcggatcgctggtggtagtagctaggtagtaactctcttagctaaggcggcagcagcaccggcccacgcggcggcggaccgatcggtcgtcgtcgtcggagatatacagatggcggcggccgccatgtgcccggggccgatgaaggcgacgtcgcagggggcgttccagggcgagaacccgctggactacgcgctgccgctggccatcctgcagatctgcctggtcgtcgtcgtcacccgcggcctcgcctacctgctccgcccgctgcgccagccccgcgtcatcgccgagatcatcggaggaatcctgctaggcccgtcggcgctggggcggagccacaggttcctgcacgccgtgttcccggcccagagcatgacggtgctggacacgctggccaacatcggcctgctcttcttcctcttcctcgtgggcctcgagctggacatctccgccatccgccgcaccggcaagaaggccctggccatcgcgctggccggcatcagcgcgccgttcgcgctcggcatcggcacgtcgttcgcgttccgcgccaccatcgtcaagggcacgccgcaggggcccttcctcgtcttcatgggcgtggcgctctccatcaccgcgttcccggtgctggcccgcatcctcgccgagctcaagctgctgaccacggacctcggccgcatggccatgtccgccgcagcggtcaacgacgtcgccgcctggatcctcctggcgctcgccatcgccctctcgggctccggctcgcccatcgtctcgctgtgggtgctgctcaccgccgctggatttgtcgttgctgtctcgctcttccttcgcccggtgctggcctggatggcgcgccgctcccccgagggcgagccggtcaaggaggtctacatctgcgccaccctcgccatcgtgctcgccgccggcttcgtcaccgacaccatcggcatccatgccctgttcggcgccttcatggtggggatcgtggtccccaaggacgggcctttcgccggcgtcctcatcgagaaggtggaggacctcatctcggggctcctcctcccgctctacttcgtctccagcgggctcaagaccgacgtggccaccatcaagggcgccaagtcctggggcctgctcgtgctcgtcatcgctaacgcgtgcctcggcaagatcggcggcacggtgatcacgtccctgctcgtcaagatccccgtccgcgaggccgtcacgctcggcttcctcatgaacaccaaggggctcgtggagctcatcgtcctcaacatcggccgcgaccgcaaggtgctgaacgacgaggcgttcgccatcctggtgctcatggcgctcttcaccaccttcatcacgacgcccatcgtgatggccatctacaagccggcgcggcgggcggtgccctacaagcgccgcacggtggagtgcgcggcgggcgacgcggacggcgagctgcgcgtgttggcctgcttccacaccaaccgccacatccccacgctgctgaacctggtggaggcgtccaggggcaccgcgcgccgccgcctcaccatgtacgcaatgcacctggtggagctctcggagcggtcgtcggccatcagcctggtacagcgcgcgcgccgcgacggcatgccctttttcagcggcggcaaggagcagcgggcggagcaggtggtggtggcgttcgaggcgttccagcagctgagctccgtgcgggtgcgcgccatgacggccatctcggacctggacaccatccaccgcgacgtcatcgacagcgccgccgacaagcgcgccgccatcgtggtgatgccgtaccaccgggcgctcggccacgacggctccttcgcgtcgctggggtcggcgtaccacgccgtcaacaagcgcgtgctccgcgaggcgccctgctcggtcgccatcctcgtggaccgcggcctcggcgggcacgcccaggtgtcggccaagaacgtgtccttctccgtcgccgtgctcttcttcggcgggccggacgaccgcgaggcgctggcctacgcgacgcgcatggccgagcacccgggcgtcgccgtgacgctggccaggttgcagccgagccgaccgccgctgctggacgaggccgagagcgcggccgacgaggccgcggtggaggcgttcaaggccagggtcggggccgtgaaggacgggtcggtgcggttcgaggagccggaggcgtgcaccagggagcaggtgctggagaccatcgagtcgctgtccgggttcaacgtgttcgtggtggggcggatgccgccggtggcgccgctggtggagaggcccgacgagctgggccccgtcgggagctacctggtgtcgcccgagttcaggacgtcggcgtccgtgctggtgatcaagaggtacgacccggccacgaaccccaagagcaagaggttcgaccccaaggcggggccgccggtggcgacggaggaggacgtgctggacgaggagatggggatggggcgcgccaccgtggtgcccgtgtgatgcaaaatttcgccgatgagcgacatggcgtgcatgagtaggtgcacgtacagtacatacgacgagctgcatgcgctcgctggcacgcgctgaggtgtgacgcgtatcgccaccgacggacgacgtgcgaccttattgaatgaagtgtatataatatatattattgggacatacgtacatgcatgccgcgccctttgttggctagcta

SEQ ID NO: 3029 - DNA, 1598 bp, Zea Mays
atcagatagcgcgctcccagtcccagtccatcatcggacacacctgctctcggctcgtggttcgcggcttcgcgcacgcgcagcaatggcgctccggccgcagctgcttcgcctcctcctcccatcgcctccccaccggaaccctccgcctccgccctcctccccgtccgtcgcacccattggccgccgcaccgccgcagcagccgtcctcctgctcgccgcgggcgtctccgccccgcccccgcgcgccgcccgcgccgagcccgacggcgaggacgtcgacgaggcccgcatcgtccgcctattccaggaggcgtcgccgtcggtcgtgttcatcaaggacctcgtcgtcgcggggccgcaggggcggagagttggtgaggatgaggacggggacgaggagggcggcggtgctaaggtggagggcacaggctcgggattcgtgtgggactccacgggccacattgtcacgaattaccacgtggttgcgaagttagctggagacggatctgcatctcatcgctgcaaggtgtttttggagggttctggtggcaaaagttactcaaaggaagcgaggctaatagggtgtgatccagcatatgatcttgcggttctgaagatagatgctgacagggaccagctgaggcctgctctgattggcacatcacggagtttgcgagttgggcaaagctgctttgccattgggaacccttatggatatgaacacactctaactactggggttattagtggattggggagggaaataccatctcccaatgggagagcgatccgtggggctatacagacagatactgctataaatgctggtaactcaggaggcccacttattgactcttatggccatgtaattggtgtcaatactgctacattcacacgtaaaggatctgggatctcgtccggggtgaacttcgccatccccatcgacacggtggtgcagtcggtccccaacctgatagtgtacgggacctccgtgagcaacaggttttattaactgtgttgtacatcatcatgatccgttccaagacggtccaagaagaaaggaacggcacgaggaagaaacggagggcaaggggaacctcgactgccatcatggggagctccggcgctgacccggccgtgtccggtccgctgcattgtttgggtggggcgtgggggcgtcggtcgggtcggggcggggagttgtcgccgtcgccaggcgtgcctccgatccccctgcatgtgccgtgcgtgctcctcggcccggcgctcgtagcctttccaagattcatcacatgtcgcacgcaacctgcgcatgctctcctgggcgtacgtaagtacgtgtgttccactcaaaggctaacgtttcgatgcgccggtcggatcaccgtactgtaccggccggccggggtatgtacgtataaggccaacaaacctctggttccatacgtgcgtgcgcacggcacaggccatctcgtcacacgcaaacacacgagtggtccagctcgagcgggtgtctagcattgccctgctttttaaaatagtattcattttaggctttttatgtctatattcaaatagataatgataaatctaga

SEQ ID NO: 3030 - DNA, 1782 bp, Zea Mays
atcagatagcgcgctcccagtcccagtccatcatcggacacacctgctctcggctcgtggttcgcggcttcgcgcacgcgcagcaatggcgctccggccgcagctgcttcgcctcctcctcccatcgcctccccaccggaaccctccgcctccgccctcctccccgtccgtcgcacccattggccgccgcaccgccgcagcagccgtcctcctgctcgccgcgggcgtctccgccccgcccccgcgcgccgcccgcgccgagcccgacggcgaggacgtcgacgaggcccgcatcgtccgcctattccaggaggcgtcgccgtcggtcgtgttcatcaaggacctcgtcgtcgcggggccgcaggggcggagagttggtgaggatgaggacggggacgaggagggcggcggtgctaaggtggagggcacaggctcgggattcgtgtgggactccacgggccacattgtcacgaattaccacgtggttgcgaagttagctggagacggatctgcatctcatcgctgcaaggttgcccactggtgtttttggagggttctggtggcaaaagttactcaaaggaagcgaggctaatagggtgtgatccagcatatgatcttgcggttctgaagatagatgctgacagggaccagctgaggcctgctctgattggcacatcacggagtttgcgagttgggcaaagctgctttgccattgggaacccttatggatatgaacacactctaactactggggttattagtggattggggagggaaataccatctcccaatgggagagcgatccgtggggctatacagacagatactgctataaatgctggtaactcaggaggcccacttattgactcttatggccatgtaattggtgtcaatactgctacattcacacgtaaaggatctgggatctcgtccggggtgaacttcgccatccccatcgacacggtggtgcagtcggtccccaacctgatagtgtacgggacctccgtgagcaacaggttttattaactgtgttgtacatcatcatgatccgttccagtgcgtgtcctcactctgtctttgctacgctctcgttactccatatatgcgtacttgtgtgtgttaattactactactcatttggagctgggcaacttgaggtcgtcactactactgatttggagcctgatcttgagaaagatgagccaggtctccgctctctttcatcacagagacggtccaagaagaaaggaacggcacgaggaagaaacggagggcaaggggaacctcgactgccatcatggggagctccggcgctgacccggccgtgtccggtccgctgcattgtttgggtggggcgtgggggcgtcggtcgggtcggggcggggagttgtcgccgtcgccaggcgtgcctccgatccccctgcatgtgccgtgcgtgctcctcggcccggcgctcgtagcctttccaagattcatcacatgtcgcacgcaacctgcgcatgctctcctgggcgtacgtaagtacgtgtgttccactcaaaggctaacgtttcgatgcgccggtcggatcaccgtactgtaccggccggccggggtatgtacgtataaggccaacaaacctctggttccatacgtgcgtgcgcacggcacaggccatctcgtcacacgcaaacacacgagtggtccagctcgagcgggtgtctagcattgccctgctttttaaaatagtattcattttaggctttttatgtctatattcaaatagataatgataaatctaga

SEQ ID NO: 3031 - DNA, 1781 bp, Zea Mays
atcagatagcgcgctcccagtcccagtccatcatcggacacacctgctctcggctcgtggttcgcggcttcgcgcacgcgcagcaatggcgctccggccgcagctgcttcgcctcctcctcccatcgcctccccaccggaaccctccgcctccgccctcctccccgtccgtcgcacccattggccgccgcaccgccgcagcagccgtcctcctgctcgccgcgggcgtctccgccccgcccccgcgcgccgcccgcgccgagcccgacggcgaggacgtcgacgaggcccgcatcgtccgcctattccaggaggcgtcgccgtcggtcgtgttcatcaaggacctcgtcgtcgcggggccgcaggggcggagagttggtgaggatgaggacggggacgaggagggcggcggtgctaaggtggagggcacaggctcgggattcgtgtgggactccacgggccacattgtcacgaattaccacgtggttgcgaagttagctggagacggatctgcatctcatcgctgcaaggtgtttttggagggttctggtggcaaaagttactcaaaggaagcgaggctaatagggtgtgatccagcatatgatcttgcggttctgaagatagatgctgacagggaccagctgaggcctgctctgattggcacatcacggagtttgcgagttgggcaaagctgctttgccattgggaacccttatggatatgaacacactctaactactgggtttcttgtaggttattagtggattggggagggaaataccatctcccaatgggagagcgatccgtggggctatacagacagatactgctataaatgctggtaactcaggaggcccacttattgactcttatggccatgtaattggtgtcaatactgctacattcacacgtaaaggatctgggatctcgtccggggtgaacttcgccatccccatcgacacggtggtgcagtcggtccccaacctgatagtgtacgggacctccgtgagcaacaggttttattaactgtgttgtacatcatcatgatccgttccagtgcgtgtcctcactctgtctttgctacgctctcgttactccatatatgcgtacttgtgtgtgttaattactactactcatttggagctgggcaacttgaggtcgtcactactactgatttggagcctgatcttgagaaagatgagccaggtctccgctctctttcatcacagagacggtccaagaagaaaggaacggcacgaggaagaaacggagggcaaggggaacctcgactgccatcatggggagctccggcgctgacccggccgtgtccggtccgctgcattgtttgggtggggcgtgggggcgtcggtcgggtcggggcggggagttgtcgccgtcgccaggcgtgcctccgatccccctgcatgtgccgtgcgtgctcctcggcccggcgctcgtagcctttccaagattcatcacatgtcgcacgcaacctgcgcatgctctcctgggcgtacgtaagtacgtgtgttccactcaaaggctaacgtttcgatgcgccggtcggatcaccgtactgtaccggccggccggggtatgtacgtataaggccaacaaacctctggttccatacgtgcgtgcgcacggcacaggccatctcgtcacacgcaaacacacgagtggtccagctcgagcgggtgtctagcattgccctgctttttaaaatagtattcattttaggctttttatgtctatattcaaatagataatgataaatctaga

SEQ ID NO: 3032 - DNA, 1907 bp, Zea Mays
atcagatagcgcgctcccagtcccagtccatcatcggacacacctgctctcggctcgtggttcgcggcttcgcgcacgcgcagcaatggcgctccggccgcagctgcttcgcctcctcctcccatcgcctccccaccggaaccctccgcctccgccctcctccccgtccgtcgcacccattggccgccgcaccgccgcagcagccgtcctcctgctcgccgcgggcgtctccgccccgcccccgcgcgccgcccgcgccgagcccgacggcgaggacgtcgacgaggcccgcatcgtccgcctattccaggaggcgtcgccgtcggtcgtgttcatcaaggacctcgtcgtcgcggggccgcaggggcggagagttggtgaggatgaggacggggacgaggagggcggcggtgctaaggtggagggcacaggctcgggattcgtgtgggactccacgggccacattgtgagcgtcttcctatctcccgtttacgctagttgttgatacattcagtcacgaattaccacgtggttgcgaagttagctggagacggatctgcatctcatcgctgcaaggtgtttttggagggttctggtggcaaaagttactcaaaggaagcgaggctaatagggtgtgatccagcatatgatcttgcggttctgaaggtttggaatttcattatctgtggctcaagttctggtgatgtcaaattggttcggagctgtggtctttgagttcaagattagtgctgcagatagatgctgacagggaccagctgaggcctgctctgattggcacatcacggagtttgcgagttgggcaaagctgctttgccattgggaacccttatggatatgaacacactctaactactggggttattagtggattggggagggaaataccatctcccaatgggagagcgatccgtggggctatacagacagatactgctataaatgctggtaactcaggaggcccacttattgactcttatggccatgtaattggtgtcaatactgctacattcacacgtaaaggatctgggatctcgtccggggtgaacttcgccatccccatcgacacggtggtgcagtcggtccccaacctgatagtgtacgggacctccgtgagcaacaggttttattaactgtgttgtacatcatcatgatccgttccagtgcgtgtcctcactctgtctttgctacgctctcgttactccatatatgcgtacttgtgtgtgttaattactactactcatttggagctgggcaacttgaggtcgtcactactactgatttggagcctgatcttgagaaagatgagccaggtctccgctctctttcatcacagagacggtccaagaagaaaggaacggcacgaggaagaaacggagggcaaggggaacctcgactgccatcatggggagctccggcgctgacccggccgtgtccggtccgctgcattgtttgggtggggcgtgggggcgtcggtcgggtcggggcggggagttgtcgccgtcgccaggcgtgcctccgatccccctgcatgtgccgtgcgtgctcctcggcccggcgctcgtagcctttccaagattcatcacatgtcgcacgcaacctgcgcatgctctcctgggcgtacgtaagtacgtgtgttccactcaaaggctaacgtttcgatgcgccggtcggatcaccgtactgtaccggccggccggggtatgtacgtataaggccaacaaacctctggttccatacgtgcgtgcgcacggcacaggccatctcgtcacacgcaaacacacgagtggtccagctcgagcgggtgtctagcattgccctgctttttaaaatagtattcattttaggctttttatgtctatattcaaatagataatgataaatctaga

SEQ ID NO: 3033 - DNA, 2489 bp, Zea Mays
attttcttcgaaccagttctgagcagtgtagccctcctgtccgctgttcggtgcccgctgcccacctccctctcctccttccgacctcgccgcctccctccctaaactctaaaccctccaccagccgaagctactgccgcggccgcagcagaggtcgcgacgacgaacgctgaagaagcgccggcgagggagagtcctttactttttcctatgctgtagcaaaacaagcctataccatcttccaaatatactcgttccgtgccggcggcctcccctcctacgcccctgtcgattcttcaatcttcaccaacgtctgcgcgtagcaggctagcagtcggcacggcttcctcagatctgccggacgacttgttgttcgtcaccgactcaccagcaaccaatgtcggccatcagccggcagcaggggaagctgggcggagggtcattgcggcacggcgtccaggcgtacagcaggcaccagcaacagcccatggcaaacgccgcagatgaccctatggtagatgaagccggagtagaagatgccttcacacatgagatcaccgattatttgtacgtccctagataccatgtgttgagttggatggaaactgtggaggggatggtggccggtgtggcggcgcttccgccggtgtatttgatactgaacagagatcttcttgagacgggatggggatggaagaggctggtgccctacagacctggttatgttgagtggcatgtgttcaagaaataccttggggactatttcgaccataatcgtgaagcttttctttgtgccgagcagaagcctgatccatttggatggattattgctgaaaagagtgccctgattgctgcagccaaattgtgcctcaagatggagaaggcacttctcaggtactgtgctagctttctcactcctgacgacaaaaggctgatcctcgggatcaaggaccaggcaaagcaaatgatccaatcagaggtgcttcaagcaatggttcaaatgggtgtccttgttcctactggagatatgactgttgtcagaagaaccgctcaatttttccttaatagctttcaagagtgcctaacagcacaaaggaaggagagagaaatggcaaccgcagaactgggtttcaaaaagcaattaactaaggaggagaagtttgaaaagaggaagcagagacttgctacaatcggagaggatcttttggcgattgctgctgatcaaccatttcgcttccctgccacatttacatttgtggtcagagcattctcagttctagatggtactgggaaaggccttcatcctagaaatgccaaggaattgctaagatttaatgacgctggtgttgaaatagttgtgaaggtgtgtggagagacatgtgtattcctcctatgacgaattcctcaggctccatgaaggtaagcctgtcttaatgggcttgattgttgaacctgacttagtacttttatccatgtcacgacattgaaccagacagtcactcatgtccttaggatattaacggtatacatcaacaattcattctattttaattgcttgcaaaacttttttggcccttcaaatgagttccacgcatcaagaagtcaagattccaggaggcctaaaataggagaggagggcgcagcttgattcaatccatgtcaagtcaaaggctgctgcgaagtttgcacatgcaagtagaatttagatggtttattcaatttcggttctaatgcttctgacagcagttgtatcagtcctcttgttcagcttacattgtacctacactcagttggaaaacttcaaccacactgcaacaaggtttataaaaggtttgctatcaggaaaaacaaatttatgggctcaaacaaagtgtgatagtgaaagtcattttgcttccagcttaagaaccaagccaagaaaacagatatcaactgtgacgccacactcaaaagcttgtttggtgggagggacaaggttgggatgctggagatctccaagcttttgagtcgtggcttcccgaaaatctccaagcttttgtggtccatggagccagggatggctctttggtaaaagacttcgttgtggatggcctcttttatggtccatgttaagtcccaagtcccactaggtggttaagcagaaaaatcttgtgatggcattaagactttcagactttgtttttgggtctgatgcatgtaaaaaggattcccagtgtttctgttgctcttgcgatcctgtgaggacacatatgagagaaatatttagtttgttgatggcaaatcttgtcttatgttcatgtctgtgcctatctgatcaagcgttatgatatgatcccatgcgtggtactgtgttctttagagatgtacttaattatgtttctcttgcatttcatattgctttgtctaattgttaccgcaaattaagattttattataattccaatttgatatgcctcatcataaccatggttactgtagggcgcacgaag

SEQ ID NO: 3034 - DNA, 2526 bp, Zea Mays
attttcttcgaaccagttctgagcagtgtagccctcctgtccgctgttcggtgcccgctgcccacctccctctcctccttccgacctcgccgcctccctccctaaactctaaaccctccaccagccgaagctactgccgcggccgcagcagaggtcgcgacgacgaacgctgaagaagcgccggcgagggagagtcctttactttttcctatgctgtagcaaaacaagcctataccatcttccaaatatactcgttccgtgccggcggcctcccctcctacgcccctgtcgattcttcaatcttcaccaacgtctgcgcgtagcaggctagcagtcggcacggcttcctcagatctgccggacgacttgttgttcgtcaccgactcaccagcaaccaatgtcggccatcagccggcagcaggggaagctgggcggagggtcattgcggcacggcgtccaggcgtacagcaggcaccagcaacagcccatggcaaacgccgcagatgaccctatggtagatgaagccggagtagaagatgccttcacacatgagatcaccgattatttgtacgtccctagataccatgtgttgagttggatggaaactgtggaggggatggtggccggtgtggcggcgcttccgccggtgtatttgatactgaacagagatcttcttgagacgggatggggatggaagaggctggtgccctacagacctggttatgttgagtggcatgtgttcaagaaataccttggggactatttcgaccataatcgtgaagcttttctttgtgccgagcagaagcctgatccatttggatggattattgctgaaaagagtgccctgattgctgcagccaaattgtgcctcaagatggagaaggcacttctcaggtactgtgctagctttctcactcctgacgacaaaaggctgatcctcgggatcaaggaccaggcaaagcaaatgatccaatcagaggtgcttcaagcaatggttcaaatgggtgtccttgttcctactggagatatgactgttgtcagaagaaccgctcaatttttccttaatagctttcaagagtgcctaacagcacaaaggaaggagagagaaatggcaaccgcagaactgggtttcaaaaagcaattaactaaggaggagaagtttgaaaagaggaagcagagacttgctacaatcggagaggatcttttggcgattgctgctgatcaaccatttcgcttccctgccacatttacatttgtggtcagagcattctcagttctagatggtactgggaaaggccttcatcctagaaatgccaaggaattgctaagatttaatgacgctggtgttgaaatagttgtgaaggtgtgtggagagacatgtgtattcctcctatgacgaattcctcaggctccatgaaggtaagcctgtcttaatgggcttgattgttgaacctgacttagtacttttatccatgtcacgacattgaaccagacagtcactcatgtccttaggatattaacggtatacatcaacaattcattctattttaattgcttgcaaaacttttttggcccttcaaatgagttccacgcatcaagaagtcaagattccaggaggcctaaaataggagaggagggcgcagcttgattcaatccatgtcaagtcaaaggctgctgcgaagtttgcacatgcaagtagaatttagatggtttattcaatttcggttctaatgcttctgacagcagttgtatcagtcctcttgttcagcttacataataatgtactaaacttcagtttggtgtctatctcagtgtacctacactcagttggaaaacttcaaccacactgcaacaaggtttataaaaggtttgctatcaggaaaaacaaatttatgggctcaaacaaagtgtgatagtgaaagtcattttgcttccagcttaagaaccaagccaagaaaacagatatcaactgtgacgccacactcaaaagcttgtttggtgggagggacaaggttgggatgctggagatctccaagcttttgagtcgtggcttcccgaaaatctccaagcttttgtggtccatggagccagggatggctctttggtaaaagacttcgttgtggatggcctcttttatggtccatgttaagtcccaagtcccactaggtggttaagcagaaaaatcttgtgatggcattaagactttcagactttgtttttgggtctgatgcatgtaaaaaggattcccagtgtttctgttgctcttgcgatcctgtgaggacacatatgagagaaatatttagtttgttgatggcaaatcttgtcttatgttcatgtctgtgcctatctgatcaagcgttatgatatgatcccatgcgtggtactgtgttctttagagatgtacttaattatgtttctcttgcatttcatattgctttgtctaattgttaccgcaaattaagattttattataattccaatttgatatgcctcatcataaccatggttactgtagggcgcacgaag

SEQ ID NO: 3035 - DNA, 2432 bp, Zea Mays
cttcgaaccagttctgagcagtgtagccctcctgtccgctgttcggtgcccgctgcccacctccctctcctccttccgacctcgccgcctccctccctaaactctaaaccctccaccagccgaagctactgccgcggccgcagcagaggtcgcgacgacgaacgctgaagaagcgccggcgagggagagtcctttactttttcctatgctgtagcaaaacaagcctataccatcttccaaatatactcgttccgtgccggcggcctcccctcctacgcccctgtcgattcttcaatcttcaccaacgtctgcgcgtagcaggctagcagtcggcacggcttcctcagatctgccggacgacttgttgttcgtcaccgactcaccagcaaccaatgtcggccatcagccggcagcaggggaagctgggcggagggtcattgcggcacggcgtccaggcgtacagcaggcaccagcaacagcccatggcaaacgccgcagatgaccctatggtagatgaagccggagtagaagatgccttcacacatgagatcaccgattatttgtacgtccctagataccatgtgttgagttggatggaaactgtggaggggatggtggccggtgtggcggcgcttccgccggtgtatttgatactgaacagagatcttcttgagacgggatggggatggaagaggctggtgccctacagacctggttatgttgagtggcatgtgttcaagaaataccttggggactatttcgaccataatcgtgaagcttttctttgtgccgagcagaagcctgatccatttggatggattattgctgaaaagagtgccctgattgctgcagccaaattgtgcctcaagatggagaaggcacttctcaggtactgtgctagctttctcactcctgacgacaaaaggctgatcctcgggatcaaggaccaggcaaagcaaatgatccaatcagaggtgcttcaagcaatggttcaaatgggtgtccttgttcctactggagatatgactgttgtcagaagaaccgctcaatttttccttaatagctttcaagagtgcctaacagcacaaaggaaggagagagaaatggcaaccgcagaactgggtttcaaaaagcaattaactaaggaggagaagtttgaaaagaggaagcagagacttgctacaatcggagaggatcttttggcgattgctgctgatcaaccatttcgcttccctgccacatttacatttgtggtcagagcattctcaggtgtgtggagagacatgtgtattcctcctatgacgaattcctcaggctccatgaaggtaagcctgtcttaatgggcttgattgttgaacctgacttagtacttttatccatgtcacgacattgaaccagacagtcactcatgtccttaggatattaacggtatacatcaacaattcattctattttaattgcttgcaaaacttttttggcccttcaaatgagttccacgcatcaagaagtcaagattccaggaggcctaaaataggagaggagggcgcagcttgattcaatccatgtcaagtcaaaggctgctgcgaagtttgcacatgcaagtagaatttagatggtttattcaatttcggttctaatgcttctgacagcagttgtatcagtcctcttgttcagcttacataataatgtactaaacttcagtttggtgtctatctcagtgtacctacactcagttggaaaacttcaaccacactgcaacaaggtttataaaaggtttgctatcaggaaaaacaaatttatgggctcaaacaaagtgtgatagtgaaagtcattttgcttccagcttaagaaccaagccaagaaaacagatatcaactgtgacgccacactcaaaagcttgtttggtgggagggacaaggttgggatgctggagatctccaagcttttgagtcgtggcttcccgaaaatctccaagcttttgtggtccatggagccagggatggctctttggtaaaagacttcgttgtggatggcctcttttatggtccatgttaagtcccaagtcccactaggtggttaagcagaaaaatcttgtgatggcattaagactttcagactttgtttttgggtctgatgcatgtaaaaaggattcccagtgtttctgttgctcttgcgatcctgtgaggacacatatgagagaaatatttagtttgttgatggcaaatcttgtcttatgttcatgtctgtgcctatctgatcaagcgttatgatatgatcccatgcgtggtactgtgttctttagagatgtacttaattatgtttctcttgcatttcatattgctttgtctaattgttaccgcaaattaagattttattataattccaatttgatatgcctcatcataaccatggttactgtagggcgcacgaag

SEQ ID NO: 3036 - DNA, 2857 bp, Zea Mays
cttcgaaccagttctgagcagtgtagccctcctgtccgctgttcggtgcccgctgcccacctccctctcctccttccgacctcgccgcctccctccctaaactctaaaccctccaccagccgaagctactgccgcggccgcagcagaggtcgcgacgacgaacgctgaagaagcgccggcgagggagagtcctttactttttcctatgctgtagcaaaacaagcctataccatcttccaaatatactcgttccgtgccggcggcctcccctcctacgcccctgtcgattcttcaatcttcaccaacgtctgcgcgtagcaggctagcagtcggcacggcttcctcagatctgccggacgacttgttgttcgtcaccgactcaccagcaaccaatgtcggccatcagccggcagcaggggaagctgggcggagggtcattgcggcacggcgtccaggcgtacagcaggcaccagcaacagcccatggcaaacgccgcagatgaccctatggtagatgaagccggagtagaagatgccttcacacatgagatcaccgattatttgtacgtccctagataccatgtgttgagttggatggaaactgtggaggggatggtggccggtgtggcggcgcttccgccggtgtatttgatactgaacagagatcttcttgagacgggatggggatggaagaggctggtgccctacagacctggttatgttgagtggcatgtgttcaagaaataccttggggactatttcgaccataatcgtgaagcttttctttgtgccgagcagaagcctgatccatttggatggattattgctgaaaagagtgccctgattgctgcagccaaattgtgcctcaagatggagaaggcacttctcaggtactgtgctagctttctcactcctgacgacaaaaggctgatcctcgggatcaaggaccaggcaaagcaaatgatccaatcagaggtgcttcaagcaatggttcaaatgggtgtccttgttcctactggagatatgactgttgtcagaagaaccgctcaatttttccttaatagctttcaagagtgcctaacagcacaaaggaaggagagagaaatggcaaccgcagaactgggtttcaaaaagcaattaactaaggaggagaagtttgaaaagaggaagcagagacttgctacaatcggagaggatcttttggcgattgctgctgatcaaccatttcgcttccctgccacatttacatttgtggtcagagcattctcagttctagatggtactgggaaaggccttcatcctagaaatgccaaggaattgctaagatttaatgacgctggtgttgaaatagttgtgaagggtgtgtggagagacatgtgtattcctcctatgacgaattcctcaggctccatgaaggtaagcctgtcttaatgggcttgattgttgaacctgacttagtacttttatccatgtcacgacattgaaccagacagtcactcatgtccttaggatattaacggtatacatcaacaattcattctattttaattgcttgcaaaacttttttggcccttcaaatgagttccacgcatcaagaagtcaagattccaggaggcctaaaataggagaggagggcgcagcttgattcaatccatgtcaagtcaaaggctgctgcgaagtttgcacatgcaagtagaatttagatggtgaggttttgtctctgttcccatttttataacgactaggtgtttgaattcctaagattaaagtttatgtagattcttatttgtaattagatctctgttaggcatctaactgaataaatgatctcctaaagaattgacagattccatcactgagcagcccttcgccccggtggctgcggtgtcgcactggctgacacctgctcgcagttgcattacaagttttactgactatgtattttcaggtttattcaatttcggttctaatgcttctgacagcagttgtatcagtcctcttgttcagcttacatgtatccctcgcatccttccttggatccacataagtgttaataataattttgttgcatctcctctgctgatcagagctttcaaactcatgacagaataatgtactaaacttcagtttggtgtctatctcagtgtacctacactcagttggaaaacttcaaccacactgcaacaaggtttataaaaggtttgctatcaggaaaaacaaatttatgggctcaaacaaagtgtgatagtgaaagtcattttgcttccagcttaagaaccaagccaagaaaacagatatcaactgtgacgccacactcaaaagcttgtttggtgggagggacaaggttgggatgctggagatctccaagcttttgagtcgtggcttcccgaaaatctccaagcttttgtggtccatggagccagggatggctctttggtaaaagacttcgttgtggatggcctcttttatggtccatgttaagtcccaagtcccactaggtggttaagcagaaaaatcttgtgatggcattaagactttcagactttgtttttgggtctgatgcatgtaaaaaggattcccagtgtttctgttgctcttgcgatcctgtgaggacacatatgagagaaatatttagtttgttgatggcaaatcttgtcttatgttcatgtctgtgcctatctgatcaagcgttatgatatgatcccatgcgtggtactgtgttctttagagatgtacttaattatgtttctcttgcatttcatattgctttgtctaattgttaccgcaaattaagattttattataattccaatttgatatgcctcatcataaccatggttactgtagggcgcacgaag

SEQ ID NO: 3037 - DNA, 2637 bp, Zea Mays
cttcgaaccagttctgagcagtgtagccctcctgtccgctgttcggtgcccgctgcccacctccctctcctccttccgacctcgccgcctccctccctaaactctaaaccctccaccagccgaagctactgccgcggccgcagcagaggtcgcgacgacgaacgctgaagaagcgccggcgagggagagtcctttactttttcctatgctgtagcaaaacaagcctataccatcttccaaatatactcgttccgtgccggcggcctcccctcctacgcccctgtcgattcttcaatcttcaccaacgtctgcgcgtagcaggctagcagtcggcacggcttcctcagatctgccggacgacttgttgttcgtcaccgactcaccagcaaccaatgtcggccatcagccggcagcaggggaagctgggcggagggtcattgcggcacggcgtccaggcgtacagcaggcaccagcaacagcccatggcaaacgccgcagatgaccctatggtagatgaagccggagtagaagatgccttcacacatgagatcaccgattatttgtacgtccctagataccatgtgttgagttggatggaaactgtggaggggatggtggccggtgtggcggcgcttccgccggtgtatttgatactgaacagagatcttcttgagacgggatggggatggaagaggctggtgccctacagacctggttatgttgagtggcatgtgttcaagaaataccttggggactatttcgaccataatcgtgaagcttttctttgtgccgagcagaagcctgatccatttggatggattattgctgaaaagagtgccctgattgctgcagccaaattgtgcctcaagatggagaaggcacttctcaggtactgtgctagctttctcactcctgacgacaaaaggctgatcctcgggatcaaggaccaggcaaagcaaatgatccaatcagaggtgcttcaagcaatggttcaaatgggtgtccttgttcctactggagatatgactgttgtcagaagaaccgctcaatttttccttaatagctttcaagagtgcctaacagcacaaaggaaggagagagaaatggcaaccgcagaactgggtttcaaaaagcaattaactaaggaggagaagtttgaaaagaggaagcagagacttgctacaatcggagaggatcttttggcgattgctgctgatcaaccatttcgcttccctgccacatttacatttgtggtcagagcattctcaggtgtgtggagagacatgtgtattcctcctatgacgaattcctcaggctccatgaaggtaagcctgtcttaatgggcttgattgttgaacctgacttagtacttttatccatgtcacgacattgaaccagacagtcactcatgtccttaggatattaacggtatacatcaacaattcattctattttaattgcttgcaaaacttttttggcccttcaaatgagttccacgcatcaagaagtcaagattccaggaggcctaaaataggagaggagggcgcagcttgattcaatccatgtcaagtcaaaggctgctgcgaagtttgcacatgcaagtagaatttagatggtgaggttttgtctctgttcccatttttataacgactaggtgtttgaattcctaagattaaagtttatgtagattcttatttgtaattagatctctgttaggcatctaactgaataaatgatctcctaaagaattgacagattccatcactgagcagcccttcgccccggtggctgcggtgtcgcactggctgacacctgctcgcagttgcattacaagttttactgactatgtattttcaggtttattcaatttcggttctaatgcttctgacagcagttgtatcagtcctcttgttcagcttacattgtacctacactcagttggaaaacttcaaccacactgcaacaaggtttataaaaggtttgctatcaggaaaaacaaatttatgggctcaaacaaagtgtgatagtgaaagtcattttgcttccagcttaagaaccaagccaagaaaacagatatcaactgtgacgccacactcaaaagcttgtttggtgggagggacaaggttgggatgctggagatctccaagcttttgagtcgtggcttcccgaaaatctccaagcttttgtggtccatggagccagggatggctctttggtaaaagacttcgttgtggatggcctcttttatggtccatgttaagtcccaagtcccactaggtggttaagcagaaaaatcttgtgatggcattaagactttcagactttgtttttgggtctgatgcatgtaaaaaggattcccagtgtttctgttgctcttgcgatcctgtgaggacacatatgagagaaatatttagtttgttgatggcaaatcttgtcttatgttcatgtctgtgcctatctgatcaagcgttatgatatgatcccatgcgtggtactgtgttctttagagatgtacttaattatgtttctcttgcatttcatattgctttgtctaattgttaccgcaaattaagattttattataattccaatttgatatgcctcatcataaccatggttactgtagggcgcacgaag

SEQ ID NO: 3038 - DNA, 2388 bp, Zea Mays
ccagttctgagcagtgtagccctcctgtccgctgttcggtgcccgctgcccacctccctctcctccttccgacctcgccgcctccctccctaaactctaaaccctccaccagccgaagctactgccgcggccgcagcagaggtcgcgacgacgaacgctgaagaagcgccggcgagggagagtcctttactttttcctatgctgtagcaaaacaagcctataccatcttccaaatatactcgttccgtgccggcggcctcccctcctacgcccctgtcgattcttcaatcttcaccaacgtctgcgcgtagcaggctagcagtcggcacggcttcctcagatctgccggacgacttgttgttcgtcaccgactcaccagcaaccaatgtcggccatcagccggcagcaggggaagctgggcggagggtcattgcggcacggcgtccaggcgtacagcaggcaccagcaacagcccatggcaaacgccgcagatgaccctatggtagatgaagccggagtagaagatgccttcacacatgagatcaccgattatttgtacgtccctagataccatgtgttgagttggatggaaactgtggaggggatggtggccggtgtggcggcgcttccgccggtgtatttgatactgaacagagatcttcttgagacgggatggggatggaagaggctggtgccctacagacctggttatgttgagtggcatgtgttcaagaaataccttggggactatttcgaccataatcgtgaagcttttctttgtgccgagcagaagcctgatccatttggatggattattgctgaaaagagtgccctgattgctgcagccaaattgtgcctcaagatggagaaggcacttctcaggtactgtgctagctttctcactcctgacgacaaaaggctgatcctcgggatcaaggaccaggcaaagcaaatgatccaatcagaggtgcttcaagcaatggttcaaatgggtgtccttgttcctactggagatatgactgttgtcagaagaaccgctcaatttttccttaatagctttcaagagtgcctaacagcacaaaggaaggagagagaaatggcaaccgcagaactgggtttcaaaaagcaattaactaaggaggagaagtttgaaaagaggaagcagagacttgctacaatcggagaggatcttttggcgattgctgctgatcaaccatttcgcttccctgccacatttacatttgtggtcagagcattctcaggtgtgtggagagacatgtgtattcctcctatgacgaattcctcaggctccatgaaggtaagcctgtcttaatgggcttgattgttgaacctgacttagtacttttatccatgtcacgacattgaaccagacagtcactcatgtccttaggatattaacggtatacatcaacaattcattctattttaattgcttgcaaaacttttttggcccttcaaatgagttccacgcatcaagaagtcaagattccaggaggcctaaaataggagaggagggcgcagcttgattcaatccatgtcaagtcaaaggctgctgcgaagtttgcacatgcaagtagaatttagatggtttattcaatttcggttctaatgcttctgacagcagttgtatcagtcctcttgttcagcttacattgtacctacactcagttggaaaacttcaaccacactgcaacaaggtttataaaaggtttgctatcaggaaaaacaaatttatgggctcaaacaaagtgtgatagtgaaagtcattttgcttccagcttaagaaccaagccaagaaaacagatatcaactgtgacgccacactcaaaagcttgtttggtgggagggacaaggttgggatgctggagatctccaagcttttgagtcgtggcttcccgaaaatctccaagcttttgtggtccatggagccagggatggctctttggtaaaagacttcgttgtggatggcctcttttatggtccatgttaagtcccaagtcccactaggtggttaagcagaaaaatcttgtgatggcattaagactttcagactttgtttttgggtctgatgcatgtaaaaaggattcccagtgtttctgttgctcttgcgatcctgtgaggacacatatgagagaaatatttagtttgttgatggcaaatcttgtcttatgttcatgtctgtgcctatctgatcaagcgttatgatatgatcccatgcgtggtactgtgttctttagagatgtacttaattatgtttctcttgcatttcatattgctttgtctaattgttaccgcaaattaagattttattataattccaatttgatatgcctcatcataaccatggttactgtagggcgcacgaag

SEQ ID NO: 3039 - DNA, 2505 bp, Zea Mays
gttctgagcagtgtagccctcctgtccgctgttcggtgcccgctgcccacctccctctcctccttccgacctcgccgcctccctccctaaactctaaaccctccaccagccgaagctactgccgcggccgcagcagaggtcgcgacgacgaacgctgaagaagcgccggcgagggagagtcctttactttttcctatgctgtagcaaaacaagcctataccatcttccaaatatactcgttccgtgccggcggcctcccctcctacgcccctgtcgattcttcaatcttcaccaacgtctgcgcgtagcaggctagcagtcggcacggcttcctcagatctgccggacgacttgttgttcgtcaccgactcaccagcaaccaatgtcggccatcagccggcagcaggggaagctgggcggagggtcattgcggcacggcgtccaggcgtacagcaggcaccagcaacagcccatggcaaacgccgcagatgaccctatggtagatgaagccggagtagaagatgccttcacacatgagatcaccgattatttgtacgtccctagataccatgtgttgagttggatggaaactgtggaggggatggtggccggtgtggcggcgcttccgccggtgtatttgatactgaacagagatcttcttgagacgggatggggatggaagaggctggtgccctacagacctggttatgttgagtggcatgtgttcaagaaataccttggggactatttcgaccataatcgtgaagcttttctttgtgccgagcagaagcctgatccatttggatggattattgctgaaaagagtgccctgattgctgcagccaaattgtgcctcaagatggagaaggcacttctcaggtactgtgctagctttctcactcctgacgacaaaaggctgatcctcgggatcaaggaccaggcaaagcaaatgatccaatcagaggtgcttcaagcaatggttcaaatgggtgtccttgttcctactggagatatgactgttgtcagaagaaccgctcaatttttccttaatagctttcaagagtgcctaacagcacaaaggaaggagagagaaatggcaaccgcagaactgggtttcaaaaagcaattaactaaggaggagaagtttgaaaagaggaagcagagacttgctacaatcggagaggatcttttggcgattgctgctgatcaaccatttcgcttccctgccacatttacatttgtggtcagagcattctcagttctagatggtactgggaaaggccttcatcctaggtttcatattacagagattgctaagccctgaaaatgccaaggaattgctaagatttaatgacgctggtgttgaaatagttgtgaaggtgtgtggagagacatgtgtattcctcctatgacgaattcctcaggctccatgaaggtaagcctgtcttaatgggcttgattgttgaacctgacttagtacttttatccatgtcacgacattgaaccagacagtcactcatgtccttaggatattaacggtatacatcaacaattcattctattttaattgcttgcaaaacttttttggcccttcaaatgagttccacgcatcaagaagtcaagattccaggaggcctaaaataggagaggagggcgcagcttgattcaatccatgtcaagtcaaaggctgctgcgaagtttgcacatgcaagtagaatttagatggtttattcaatttcggttctaatgcttctgacagcagttgtatcagtcctcttgttcagcttacattgtacctacactcagttggaaaacttcaaccacactgcaacaaggtttataaaaggtttgctatcaggaaaaacaaatttatgggctcaaacaaagtgtgatagtgaaagtcattttgcttccagcttaagaaccaagccaagaaaacagatatcaactgtgacgccacactcaaaagcttgtttggtgggagggacaaggttgggatgctggagatctccaagcttttgagtcgtggcttcccgaaaatctccaagcttttgtggtccatggagccagggatggctctttggtaaaagacttcgttgtggatggcctcttttatggtccatgttaagtcccaagtcccactaggtggttaagcagaaaaatcttgtgatggcattaagactttcagactttgtttttgggtctgatgcatgtaaaaaggattcccagtgtttctgttgctcttgcgatcctgtgaggacacatatgagagaaatatttagtttgttgatggcaaatcttgtcttatgttcatgtctgtgcctatctgatcaagcgttatgatatgatcccatgcgtggtactgtgttctttagagatgtacttaattatgtttctcttgcatttcatattgctttgtctaattgttaccgcaaattaagattttattataattccaatttgatatgcctcatcataaccatggttactgtagggcgcacgaag

SEQ ID NO: 3040 - DNA, 2647 bp, Zea Mays
gagcagtgtagccctcctgtccgctgttcggtgcccgctgcccacctccctctcctccttccgacctcgccgcctccctccctaaactctaaaccctccaccagccgaagctactgccgcggccgcagcagaggtcgcgacgacgaacgctgaagaagcgccggcgagggagagtcctttactttttcctatgctgtagcaaaacaagcctataccatcttccaaatatactcgttccgtgccggcggcctcccctcctacgcccctgtcgattcttcaatcttcaccaacgtctgcgcgtagcaggctagcagtcggcacggcttcctcagatctgccggacgacttgttgttcgtcaccgactcaccagcaaccaatgtcggccatcagccggcagcaggggaagctgggcggagggtcattgcggcacggcgtccaggcgtacagcaggcaccagcaacagcccatggcaaacgccgcagatgaccctatggtagatgaagccggagtagaagatgccttcacacatgagatcaccgattatttgtacgtccctagataccatgtgttgagttggatggaaactgtggaggggatggtggccggtgtggcggcgcttccgccggtgtatttgatactgaacagagatcttcttgagacgggatggggatggaagaggctggtgccctacagacctggttatgttgagtggcatgtgttcaagaaataccttggggactatttcgaccataatcgtgaagcttttctttgtgccgagcagaagcctgatccatttggatggattattgctgaaaagagtgccctgattgctgcagccaaattgtgcctcaagatggagaaggcacttctcaggtactgtgctagctttctcactcctgacgacaaaaggctgatcctcgggatcaaggaccaggcaaagcaaatgatccaatcagaggtgcttcaagcaatggttcaaatgggtgtccttgttcctactggagatatgactgttgtcagaagaaccgctcaatttttccttaatagctttcaagagtgcctaacagcacaaaggaaggagagagaaatggcaaccgcagaactgggtttcaaaaagcaattaactaaggaggagaagtttgaaaagaggaagcagagacttgctacaatcggagaggatcttttggcgattgctgctgatcaaccatttcgcttccctgccacatttacatttgtggtcagagcattctcaggtgtgtggagagacatgtgtattcctcctatgacgaattcctcaggctccatgaaggtaagcctgtcttaatgggcttgattgttgaacctgacttagtacttttatccatgtcacgacattgaaccagacagtcactcatgtccttaggatattaacggtatacatcaacaattcattctattttaattgcttgcaaaacttttttggcccttcaaatgagttccacgcatcaagaagtcaagattccaggaggcctaaaataggagaggagggcgcagcttgattcaatccatgtcaagtcaaaggctgctgcgaagtttgcacatgcaagtagaatttagatggtgaggttttgtctctgttcccatttttataacgactaggtgtttgaattcctaagattaaagtttatgtagattcttatttgtaattagatctctgttaggcatctaactgaataaatgatctcctaaagaattgacagattccatcactgagcagcccttcgccccggtggctgcggtgtcgcactggctgacacctgctcgcagttgcattacaagttttactgactatgtattttcaggtttattcaatttcggttctaatgcttctgacagcagttgtatcagtcctcttgttcagcttacataataatgtactaaacttcagtttggtgtctatctcagtgtacctacactcagttggaaaacttcaaccacactgcaacaaggtttataaaaggaaaaacaaatttatgggctcaaacaaagtgtgatagtgaaagtcattttgcttccagcttaagaaccaagccaagaaaacagatatcaactgtgacgccacactcaaaagcttgtttggtgggagggacaaggttgggatgctggagatctccaagcttttgagtcgtggcttcccgaaaatctccaagcttttgtggtccatggagccagggatggctctttggtaaaagacttcgttgtggatggcctcttttatggtccatgttaagtcccaagtcccactaggtggttaagcagaaaaatcttgtgatggcattaagactttcagactttgtttttgggtctgatgcatgtaaaaaggattcccagtgtttctgttgctcttgcgatcctgtgaggacacatatgagagaaatatttagtttgttgatggcaaatcttgtcttatgttcatgtctgtgcctatctgatcaagcgttatgatatgatcccatgcgtggtactgtgttctttagagatgtacttaattatgtttctcttgcatttcatattgctttgtctaattgttaccgcaaattaagattttattataattccaatttgatatgcctcatcataaccatggttactgtagggcgcacgaag

SEQ ID NO: 3041 - DNA, 2662 bp, Zea Mays
agcagtgtagccctcctgtccgctgttcggtgcccgctgcccacctccctctcctccttccgacctcgccgcctccctccctaaactctaaaccctccaccagccgaagctactgccgcggccgcagcagaggtcgcgacgacgaacgctgaagaagcgccggcgagggagagtcctttactttttcctatgctgtagcaaaacaagcctataccatcttccaaatatactcgttccgtgccggcggcctcccctcctacgcccctgtcgattcttcaatcttcaccaacgtctgcgcgtagcaggctagcagtcggcacggcttcctcagatctgccggacgacttgttgttcgtcaccgactcaccagcaaccaatgtcggccatcagccggcagcaggggaagctgggcggagggtcattgcggcacggcgtccaggcgtacagcaggcaccagcaacagcccatggcaaacgccgcagatgaccctatggtagatgaagccggagtagaagatgccttcacacatgagatcaccgattatttgtacgtccctagataccatgtgttgagttggatggaaactgtggaggggatggtggccggtgtggcggcgcttccgccggtgtatttgatactgaacagagatcttcttgagacgggatggggatggaagaggctggtgccctacagacctggttatgttgagtggcatgtgttcaagaaataccttggggactatttcgaccataatcgtgaagcttttctttgtgccgagcagaagcctgatccatttggatggattattgctgaaaagagtgccctgattgctgcagccaaattgtgcctcaagatggagaaggcacttctcaggtactgtgctagctttctcactcctgacgacaaaaggctgatcctcgggatcaaggaccaggcaaagcaaatgatccaatcagaggtgcttcaagcaatggttcaaatgggtgtccttgttcctactggagatatgactgttgtcagaagaaccgctcaatttttccttaatagctttcaagagtgcctaacagcacaaaggaaggagagagaaatggcaaccgcagaactgggtttcaaaaagcaattaactaaggaggagaagtttgaaaagaggaagcagagacttgctacaatcggagaggatcttttggcgattgctgctgatcaaccatttcgcttccctgccacatttacatttgtggtcagagcattctcagttctagatggtactgggaaaggccttcatcctaggtttcatattacagagattgctaagccctgagtactttttgcattactagcatctgaatacttattcaaaaacacacaaagcttgcacatcttcacttattatgtactgtctatattttcatcttgaacttttctggtactgacttgaaatgtctattaaatttgctagaaatgccaaggaattgctaagatttaatgacgctggtgttgaaatagttgtgaaggtgtgtggagagacatgtgtattcctcctatgacgaattcctcaggctccatgaaggtaagcctgtcttaatgggcttgattgttgaacctgacttagtacttttatccatgtcacgacattgaaccagacagtcactcatgtccttaggatattaacggtatacatcaacaattcattctattttaattgcttgcaaaacttttttggcccttcaaatgagttccacgcatcaagaagtcaagattccaggaggcctaaaataggagaggagggcgcagcttgattcaatccatgtcaagtcaaaggctgctgcgaagtttgcacatgcaagtagaatttagatggtttattcaatttcggttctaatgcttctgacagcagttgtatcagtcctcttgttcagcttacataataatgtactaaacttcagtttggtgtctatctcagtgtacctacactcagttggaaaacttcaaccacactgcaacaaggtttataaaaggaaaaacaaatttatgggctcaaacaaagtgtgatagtgaaagtcattttgcttccagcttaagaaccaagccaagaaaacagatatcaactgtgacgccacactcaaaagcttgtttggtgggagggacaaggttgggatgctggagatctccaagcttttgagtcgtggcttcccgaaaatctccaagcttttgtggtccatggagccagggatggctctttggtaaaagacttcgttgtggatggcctcttttatggtccatgttaagtcccaagtcccactaggtggttaagcagaaaaatcttgtgatggcattaagactttcagactttgtttttgggtctgatgcatgtaaaaaggattcccagtgtttctgttgctcttgcgatcctgtgaggacacatatgagagaaatatttagtttgttgatggcaaatcttgtcttatgttcatgtctgtgcctatctgatcaagcgttatgatatgatcccatgcgtggtactgtgttctttagagatgtacttaattatgtttctcttgcatttcatattgctttgtctaattgttaccgcaaattaagattttattataattccaatttgatatgcctcatcataaccatggttactgtagggcgcacgaag

SEQ ID NO: 3042 - DNA, 2774 bp, Zea Mays
agcagtgtagccctcctgtccgctgttcggtgcccgctgcccacctccctctcctccttccgacctcgccgcctccctccctaaactctaaaccctccaccagccgaagctactgccgcggccgcagcagaggtcgcgacgacgaacgctgaagaagcgccggcgagggagagtcctttactttttcctatgctgtagcaaaacaagcctataccatcttccaaatatactcgttccgtgccggcggcctcccctcctacgcccctgtcgattcttcaatcttcaccaacgtctgcgcgtagcaggctagcagtcggcacggcttcctcagatctgccggacgacttgttgttcgtcaccgactcaccagcaaccaatgtcggccatcagccggcagcaggggaagctgggcggagggtcattgcggcacggcgtccaggcgtacagcaggcaccagcaacagcccatggcaaacgccgcagatgaccctatggtagatgaagccggagtagaagatgccttcacacatgagatcaccgattatttgtacgtccctagataccatgtgttgagttggatggaaactgtggaggggatggtggccggtgtggcggcgcttccgccggtgtatttgatactgaacagagatcttcttgagacgggatggggatggaagaggctggtgccctacagacctggttatgttgagtggcatgtgttcaagaaataccttggggactatttcgaccataatcgtgaagcttttctttgtgccgagcagaagcctgatccatttggatggattattgctgaaaagagtgccctgattgctgcagccaaattgtgcctcaagatggagaaggcacttctcaggtactgtgctagctttctcactcctgacgacaaaaggctgatcctcgggatcaaggaccaggcaaagcaaatgatccaatcagaggtagtgcagagaaacctgtgaagcagcgtgcttcaagcaatggttcaaatgggtgtccttgttcctactggagatatgactgttgtcagaagaaccgctcaatttttccttaatagctttcaagagtgcctaacagcacaaaggaaggagagagaaatggcaaccgcagaactgggtttcaaaaagcaattaactaaggaggagaagtttgaaaagaggaagcagagacttgctacaatcggagaggatcttttggcgattgctgctgatcaaccatttcgcttccctgccacatttacatttgtggtcagagcattctcagttctagatggtactgggaaaggccttcatcctagaaatgccaaggaattgctaagatttaatgacgctggtgttgaaatagttgtgaaggtgtgtggagagacatgtgtattcctcctatgacgaattcctcaggctccatgaaggatattaacggtatacatcaacaattcattctattttaattgcttgcaaaacttttttggcccttcaaatgagttccacgcatcaagaagtcaagattccaggaggcctaaaataggagaggagggcgcagcttgattcaatccatgtcaagtcaaaggctgctgcgaagtttgcacatgcaagtagaatttagatggtgaggttttgtctctgttcccatttttataacgactaggtgtttgaattcctaagattaaagtttatgtagattcttatttgtaattagatctctgttaggcatctaactgaataaatgatctcctaaagaattgacagattccatcactgagcagcccttcgccccggtggctgcggtgtcgcactggctgacacctgctcgcagttgcattacaagttttactgactatgtattttcaggtttattcaatttcggttctaatgcttctgacagcagttgtatcagtcctcttgttcagcttacatgtatccctcgcatccttccttggatccacataagtgttaataataattttgttgcatctcctctgctgatcagagctttcaaactcatgacagaataatgtactaaacttcagtttggtgtctatctcagtgtacctacactcagttggaaaacttcaaccacactgcaacaaggtttataaaaggtttgctatcaggaaaaacaaatttatgggctcaaacaaagtgtgatagtgaaagtcattttgcttccagcttaagaaccaagccaagaaaacagatatcaactgtgacgccacactcaaaagcttgtttggtgggagggacaaggttgggatgctggagatctccaagcttttgagtcgtggcttcccgaaaatctccaagcttttgtggtccatggagccagggatggctctttggtaaaagacttcgttgtggatggcctcttttatggtccatgttaagtcccaagtcccactaggtggttaagcagaaaaatcttgtgatggcattaagactttcagactttgtttttgggtctgatgcatgtaaaaaggattcccagtgtttctgttgctcttgcgatcctgtgaggacacatatgagagaaatatttagtttgttgatggcaaatcttgtcttatgttcatgtctgtgcctatctgatcaagcgttatgatatgatcccatgcgtggtactgtgttctttagagatgtacttaattatgtttctcttgcatttcatattgctttgtctaattgttaccgcaaattaagattttattataattccaatttgatatgcctcatcataaccatggttactgtagggcgcacgaag

SEQ ID NO: 3043 - DNA, 2387 bp, Zea Mays
gtccgctgttcggtgcccgctgcccacctccctctcctccttccgacctcgccgcctccctccctaaactctaaaccctccaccagccgaagctactgccgcggccgcagcagaggtcgcgacgacgaacgctgaagaagcgccggcgagggagagtcctttactttttcctatgctgtagcaaaacaagcctataccatcttccaaatatactcgttccgtgccggcggcctcccctcctacgcccctgtcgattcttcaatcttcaccaacgtctgcgcgtagcaggctagcagtcggcacggcttcctcagatctgccggacgacttgttgttcgtcaccgactcaccagcaaccaatgtcggccatcagccggcagcaggggaagctgggcggagggtcattgcggcacggcgtccaggcgtacagcaggcaccagcaacagcccatggcaaacgccgcagatgaccctatggtagatgaagccggagtagaagatgccttcacacatgagatcaccgattatttgtacgtccctagataccatgtgttgagttggatggaaactgtggaggggatggtggccggtgtggcggcgcttccgccggtgtatttgatactgaacagagatcttcttgagacgggatggggatggaagaggctggtgccctacagacctggttatgttgagtggcatgtgttcaagaaataccttggggactatttcgaccataatcgtgaagcttttctttgtgccgagcagaagcctgatccatttggatggattattgctgaaaagagtgccctgattgctgcagccaaattgtgcctcaagatggagaaggcacttctcaggtactgtgctagctttctcactcctgacgacaaaaggctgatcctcgggatcaaggaccaggcaaagcaaatgatccaatcagaggtgcttcaagcaatggttcaaatgggtgtccttgttcctactggagatatgactgttgtcagaagaaccgctcaatttttccttaatagctttcaagagtgcctaacagcacaaaggaaggagagagaaatggcaaccgcagaactgggtttcaaaaagcaattaactaaggaggagaagtttgaaaagaggaagcagagacttgctacaatcggagaggatcttttggcgattgctgctgatcaaccatttcgcttccctgccacatttacatttgtggtcagagcattctcaggtgtgtggagagacatgtgtattcctcctatgacgaattcctcaggctccatgaaggtaagcctgtcttaatgggcttgattgttgaacctgacttagtacttttatccatgtcacgacattgaaccagacagtcactcatgtccttaggatattaacggtatacatcaacaattcattctattttaattgcttgcaaaacttttttggcccttcaaatgagttccacgcatcaagaagtcaagattccaggaggcctaaaataggagaggagggcgcagcttgattcaatccatgtcaagtcaaaggctgctgcgaagtttgcacatgcaagtagaatttagatggtttattcaatttcggttctaatgcttctgacagcagttgtatcagtcctcttgttcagcttacataataatgtactaaacttcagtttggtgtctatctcagtgtacctacactcagttggaaaacttcaaccacactgcaacaaggtttataaaaggaaaaacaaatttatgggctcaaacaaagtgtgatagtgaaagtcattttgcttccagcttaagaaccaagccaagaaaacagatatcaactgtgacgccacactcaaaagcttgtttggtgggagggacaaggttgggatgctggagatctccaagcttttgagtcgtggcttcccgaaaatctccaagcttttgtggtccatggagccagggatggctctttggtaaaagacttcgttgtggatggcctcttttatggtccatgttaagtcccaagtcccactaggtggttaagcagaaaaatcttgtgatggcattaagactttcagactttgtttttgggtctgatgcatgtaaaaaggattcccagtgtttctgttgctcttgcgatcctgtgaggacacatatgagagaaatatttagtttgttgatggcaaatcttgtcttatgttcatgtctgtgcctatctgatcaagcgttatgatatgatcccatgcgtggtactgtgttctttagagatgtacttaattatgtttctcttgcatttcatattgctttgtctaattgttaccgcaaattaagattttattataattccaatttgatatgcctcatcataaccatggttactgtagggcgcacgaag

SEQ ID NO: 3044 - DNA, 2513 bp, Zea Mays
ccgctgttcggtgcccgctgcccacctccctctcctccttccgacctcgccgcctccctccctaaactctaaaccctccaccagccgaagctactgccgcggccgcagcagaggtcgcgacgacgaacgctgaagaagcgccggcgagggagagtcctttactttttcctatgctgtagcaaaacaagcctataccatcttccaaatatactcgttccgtgccggcggcctcccctcctacgcccctgtcgattcttcaatcttcaccaacgtctgcgcgtagcaggctagcagtcggcacggcttcctcagatctgccggacgacttgttgttcgtcaccgactcaccagcaaccaatgtcggccatcagccggcagcaggggaagctgggcggagggtcattgcggcacggcgtccaggcgtacagcaggcaccagcaacagcccatggcaaacgccgcagatgaccctatggtagatgaagccggagtagaagatgccttcacacatgagatcaccgattatttgtacgtccctagataccatgtgttgagttggatggaaactgtggaggggatggtggccggtgtggcggcgcttccgccggtgtatttgatactgaacagagatcttcttgagacgggatggggatggaagaggctggtgccctacagacctggttatgttgagtggcatgtgttcaagaaataccttggggactatttcgaccataatcgtgaagcttttctttgtgccgagcagaagcctgatccatttggatggattattgctgaaaagagtgccctgattgctgcagccaaattgtgcctcaagatggagaaggcacttctcaggtactgtgctagctttctcactcctgacgacaaaaggctgatcctcgggatcaaggaccaggcaaagcaaatgatccaatcagaggtgcttcaagcaatggttcaaatgggtgtccttgttcctactggagatatgactgttgtcagaagaaccgctcaatttttccttaatagctttcaagagtgcctaacagcacaaaggaaggagagagaaatggcaaccgcagaactgggtttcaaaaagcaattaactaaggaggagaagtttgaaaagaggaagcagagacttgctacaatcggagaggatcttttggcgattgctgctgatcaaccatttcgcttccctgccacatttacatttgtggtcagagcattctcagttctagatggtactgggaaaggccttcatcctaggtttcatattacagagattgctaagccctgagtactttttgcattactagcatctgaatacttattcaaaaacacacaaagcttgcacatcttcacttattatgtactgtctatattttcatcttgaacttttctggtactgacttgaaatgtctattaaatttgctagaaatgccaaggaattgctaagatttaatgacgctggtgttgaaatagttgtgaaggtgtgtggagagacatgtgtattcctcctatgacgaattcctcaggctccatgaaggatattaacggtatacatcaacaattcattctattttaattgcttgcaaaacttttttggcccttcaaatgagttccacgcatcaagaagtcaagattccaggaggcctaaaataggagaggagggcgcagcttgattcaatccatgtcaagtcaaaggctgctgcgaagtttgcacatgcaagtagaatttagatggtttattcaatttcggttctaatgcttctgacagcagttgtatcagtcctcttgttcagcttacattgtacctacactcagttggaaaacttcaaccacactgcaacaaggtttataaaaggaaaaacaaatttatgggctcaaacaaagtgtgatagtgaaagtcattttgcttccagcttaagaaccaagccaagaaaacagatatcaactgtgacgccacactcaaaagcttgtttggtgggagggacaaggttgggatgctggagatctccaagcttttgagtcgtggcttcccgaaaatctccaagcttttgtggtccatggagccagggatggctctttggtaaaagacttcgttgtggatggcctcttttatggtccatgttaagtcccaagtcccactaggtggttaagcagaaaaatcttgtgatggcattaagactttcagactttgtttttgggtctgatgcatgtaaaaaggattcccagtgtttctgttgctcttgcgatcctgtgaggacacatatgagagaaatatttagtttgttgatggcaaatcttgtcttatgttcatgtctgtgcctatctgatcaagcgttatgatatgatcccatgcgtggtactgtgttctttagagatgtacttaattatgtttctcttgcatttcatattgctttgtctaattgttaccgcaaattaagattttattataattccaatttgatatgcctcatcataaccatggttactgtagggcgcacgaag

SEQ ID NO: 3045 - DNA, 2644 bp, Zea Mays
cgctgttcggtgcccgctgcccacctccctctcctccttccgacctcgccgcctccctccctaaactctaaaccctccaccagccgaagctactgccgcggccgcagcagaggtcgcgacgacgaacgctgaagaagcgccggcgagggagagtcctttactttttcctatgctgtagcaaaacaagcctataccatcttccaaatatactcgttccgtgccggcggcctcccctcctacgcccctgtcgattcttcaatcttcaccaacgtctgcgcgtagcaggctagcagtcggcacggcttcctcagatctgccggacgacttgttgttcgtcaccgactcaccagcaaccaatgtcggccatcagccggcagcaggggaagctgggcggagggtcattgcggcacggcgtccaggcgtacagcaggcaccagcaacagcccatggcaaacgccgcagatgaccctatggtagatgaagccggagtagaagatgccttcacacatgagatcaccgattatttgtacgtccctagataccatgtgttgagttggatggaaactgtggaggggatggtggccggtgtggcggcgcttccgccggtgtatttgatactgaacagagatcttcttgagacgggatggggatggaagaggctggtgccctacagacctggttatgttgagtggcatgtgttcaagaaataccttggggactatttcgaccataatcgtgaagcttttctttgtgccgagcagaagcctgatccatttggatggattattgctgaaaagagtgccctgattgctgcagccaaattgtgcctcaagatggagaaggcacttctcaggtactgtgctagctttctcactcctgacgacaaaaggctgatcctcgggatcaaggaccaggcaaagcaaatgatccaatcagaggtagtgcagagaaacctgtgaagcagcgtgcttcaagcaatggttcaaatgggtgtccttgttcctactggagatatgactgttgtcagaagaaccgctcaatttttccttaatagctttcaagagtgcctaacagcacaaaggaaggagagagaaatggcaaccgcagaactgggtttcaaaaagcaattaactaaggaggagaagtttgaaaagaggaagcagagacttgctacaatcggagaggatcttttggcgattgctgctgatcaaccatttcgcttccctgccacatttacatttgtggtcagagcattctcagttctagatggtactgggaaaggccttcatcctaggtttcatattacagagattgctaagccctgagtactttttgcattactagcatctgaatacttattcaaaaacacacaaagcttgcacatcttcacttattatgtactgtctatattttcatcttgaacttttctggtactgacttgaaatgtctattaaatttgctagaaatgccaaggaattgctaagatttaatgacgctggtgttgaaatagttgtgaaggtgtgtggagagacatgtgtattcctcctatgacgaattcctcaggctccatgaaggtaagcctgtcttaatgggcttgattgttgaacctgacttagtacttttatccatgtcacgacattgaaccagacagtcactcatgtccttaggatattaacggtatacatcaacaattcattctattttaattgcttgcaaaacttttttggcccttcaaatgagttccacgcatcaagaagtcaagattccaggaggcctaaaataggagaggagggcgcagcttgattcaatccatgtcaagtcaaaggctgctgcgaagtttgcacatgcaagtagaatttagatggtttattcaatttcggttctaatgcttctgacagcagttgtatcagtcctcttgttcagcttacattgtacctacactcagttggaaaacttcaaccacactgcaacaaggtttataaaaggtttgctatcaggaaaaacaaatttatgggctcaaacaaagtgtgatagtgaaagtcattttgcttccagcttaagaaccaagccaagaaaacagatatcaactgtgacgccacactcaaaagcttgtttggtgggagggacaaggttgggatgctggagatctccaagcttttgagtcgtggcttcccgaaaatctccaagcttttgtggtccatggagccagggatggctctttggtaaaagacttcgttgtggatggcctcttttatggtccatgttaagtcccaagtcccactaggtggttaagcagaaaaatcttgtgatggcattaagactttcagactttgtttttgggtctgatgcatgtaaaaaggattcccagtgtttctgttgctcttgcgatcctgtgaggacacatatgagagaaatatttagtttgttgatggcaaatcttgtcttatgttcatgtctgtgcctatctgatcaagcgttatgatatgatcccatgcgtggtactgtgttctttagagatgtacttaattatgtttctcttgcatttcatattgctttgtctaattgttaccgcaaattaagattttattataattccaatttgatatgcctcatcataaccatggttactgtagggcgcacgaag

SEQ ID NO: 3046 - DNA, 2669 bp, Zea Mays
cgctgttcggtgcccgctgcccacctccctctcctccttccgacctcgccgcctccctccctaaactctaaaccctccaccagccgaagctactgccgcggccgcagcagaggtcgcgacgacgaacgctgaagaagcgccggcgagggagagtcctttactttttcctatgctgtagcaaaacaagcctataccatcttccaaatatactcgttccgtgccggcggcctcccctcctacgcccctgtcgattcttcaatcttcaccaacgtctgcgcgtagcaggctagcagtcggcacggcttcctcagatctgccggacgacttgttgttcgtcaccgactcaccagcaaccaatgtcggccatcagccggcagcaggggaagctgggcggagggtcattgcggcacggcgtccaggcgtacagcaggcaccagcaacagcccatggcaaacgccgcagatgaccctatggtagatgaagccggagtagaagatgccttcacacatgagatcaccgattatttgtacgtccctagataccatgtgttgagttggatggaaactgtggaggggatggtggccggtgtggcggcgcttccgccggtgtatttgatactgaacagagatcttcttgagacgggatggggatggaagaggctggtgccctacagacctggttatgttgagtggcatgtgttcaagaaataccttggggactatttcgaccataatcgtgaagcttttctttgtgccgagcagaagcctgatccatttggatggattattgctgaaaagagtgccctgattgctgcagccaaattgtgcctcaagatggagaaggcacttctcaggtactgtgctagctttctcactcctgacgacaaaaggctgatcctcgggatcaaggaccaggcaaagcaaatgatccaatcagaggtagtgcagagaaacctgtgaagcagcgtgcttcaagcaatggttcaaatgggtgtccttgttcctactggagatatgactgttgtcagaagaaccgctcaatttttccttaatagctttcaagagtgcctaacagcacaaaggaaggagagagaaatggcaaccgcagaactgggtttcaaaaagcaattaactaaggaggagaagtttgaaaagaggaagcagagacttgctacaatcggagaggatcttttggcgattgctgctgatcaaccatttcgcttccctgccacatttacatttgtggtcagagcattctcagttctagatggtactgggaaaggccttcatcctaggtttcatattacagagattgctaagccctgagtactttttgcattactagcatctgaatacttattcaaaaacacacaaagcttgcacatcttcacttattatgtactgtctatattttcatcttgaacttttctggtactgacttgaaatgtctattaaatttgctagaaatgccaaggaattgctaagatttaatgacgctggtgttgaaatagttgtgaaggtgtgtggagagacatgtgtattcctcctatgacgaattcctcaggctccatgaaggtaagcctgtcttaatgggcttgattgttgaacctgacttagtacttttatccatgtcacgacattgaaccagacagtcactcatgtccttaggatattaacggtatacatcaacaattcattctattttaattgcttgcaaaacttttttggcccttcaaatgagttccacgcatcaagaagtcaagattccaggaggcctaaaataggagaggagggcgcagcttgattcaatccatgtcaagtcaaaggctgctgcgaagtttgcacatgcaagtagaatttagatggtttattcaatttcggttctaatgcttctgacagcagttgtatcagtcctcttgttcagcttacataataatgtactaaacttcagtttggtgtctatctcagtgtacctacactcagttggaaaacttcaaccacactgcaacaaggtttataaaaggaaaaacaaatttatgggctcaaacaaagtgtgatagtgaaagtcattttgcttccagcttaagaaccaagccaagaaaacagatatcaactgtgacgccacactcaaaagcttgtttggtgggagggacaaggttgggatgctggagatctccaagcttttgagtcgtggcttcccgaaaatctccaagcttttgtggtccatggagccagggatggctctttggtaaaagacttcgttgtggatggcctcttttatggtccatgttaagtcccaagtcccactaggtggttaagcagaaaaatcttgtgatggcattaagactttcagactttgtttttgggtctgatgcatgtaaaaaggattcccagtgtttctgttgctcttgcgatcctgtgaggacacatatgagagaaatatttagtttgttgatggcaaatcttgtcttatgttcatgtctgtgcctatctgatcaagcgttatgatatgatcccatgcgtggtactgtgttctttagagatgtacttaattatgtttctcttgcatttcatattgctttgtctaattgttaccgcaaattaagattttattataattccaatttgatatgcctcatcataaccatggttactgtagggcgcacgaag

SEQ ID NO: 3047 - DNA, 2516 bp, Zea Mays
cgctgttcggtgcccgctgcccacctccctctcctccttccgacctcgccgcctccctccctaaactctaaaccctccaccagccgaagctactgccgcggccgcagcagaggtcgcgacgacgaacgctgaagaagcgccggcgagggagagtcctttactttttcctatgctgtagcaaaacaagcctataccatcttccaaatatactcgttccgtgccggcggcctcccctcctacgcccctgtcgattcttcaatcttcaccaacgtctgcgcgtagcaggctagcagtcggcacggcttcctcagatctgccggacgacttgttgttcgtcaccgactcaccagcaaccaatgtcggccatcagccggcagcaggggaagctgggcggagggtcattgcggcacggcgtccaggcgtacagcaggcaccagcaacagcccatggcaaacgccgcagatgaccctatggtagatgaagccggagtagaagatgccttcacacatgagatcaccgattatttgtacgtccctagataccatgtgttgagttggatggaaactgtggaggggatggtggccggtgtggcggcgcttccgccggtgtatttgatactgaacagagatcttcttgagacgggatggggatggaagaggctggtgccctacagacctggttatgttgagtggcatgtgttcaagaaataccttggggactatttcgaccataatcgtgaagcttttctttgtgccgagcagaagcctgatccatttggatggattattgctgaaaagagtgccctgattgctgcagccaaattgtgcctcaagatggagaaggcacttctcaggtactgtgctagctttctcactcctgacgacaaaaggctgatcctcgggatcaaggaccaggcaaagcaaatgatccaatcagaggtgcttcaagcaatggttcaaatgggtgtccttgttcctactggagatatgactgttgtcagaagaaccgctcaatttttccttaatagctttcaagagtgcctaacagcacaaaggaaggagagagaaatggcaaccgcagaactgggtttcaaaaagcaattaactaaggaggagaagtttgaaaagaggaagcagagacttgctacaatcggagaggatcttttggcgattgctgctgatcaaccatttcgcttccctgccacatttacatttgtggtcagagcattctcagttctagatggtactgggaaaggccttcatcctaggtttcatattacagagattgctaagccctgaaaatgccaaggaattgctaagatttaatgacgctggtgttgaaatagttgtgaaggtgtgtggagagacatgtgtattcctcctatgacgaattcctcaggctccatgaaggtaagcctgtcttaatgggcttgattgttgaacctgacttagtacttttatccatgtcacgacattgaaccagacagtcactcatgtccttaggatattaacggtatacatcaacaattcattctattttaattgcttgcaaaacttttttggcccttcaaatgagttccacgcatcaagaagtcaagattccaggaggcctaaaataggagaggagggcgcagcttgattcaatccatgtcaagtcaaaggctgctgcgaagtttgcacatgcaagtagaatttagatggtttattcaatttcggttctaatgcttctgacagcagttgtatcagtcctcttgttcagcttacataataatgtactaaacttcagtttggtgtctatctcagtgtacctacactcagttggaaaacttcaaccacactgcaacaaggtttataaaaggtttgctatcaggaaaaacaaatttatgggctcaaacaaagtgtgatagtgaaagtcattttgcttccagcttaagaaccaagccaagaaaacagatatcaactgtgacgccacactcaaaagcttgtttggtgggagggacaaggttgggatgctggagatctccaagcttttgagtcgtggcttcccgaaaatctccaagcttttgtggtccatggagccagggatggctctttggtaaaagacttcgttgtggatggcctcttttatggtccatgttaagtcccaagtcccactaggtggttaagcagaaaaatcttgtgatggcattaagactttcagactttgtttttgggtctgatgcatgtaaaaaggattcccagtgtttctgttgctcttgcgatcctgtgaggacacatatgagagaaatatttagtttgttgatggcaaatcttgtcttatgttcatgtctgtgcctatctgatcaagcgttatgatatgatcccatgcgtggtactgtgttctttagagatgtacttaattatgtttctcttgcatttcatattgctttgtctaattgttaccgcaaattaagattttattataattccaatttgatatgcctcatcataaccatggttactgtagggcgcacgaag

SEQ ID NO: 3048 - DNA, 2859 bp, Zea Mays
ctccttccgacctcgccgcctccctccctaaactctaaaccctccaccagccgaagctactgccgcggccgcagcagaggtcgcgacgacgaacgctgaagaagcgccggcgagggagagtcctttactttttcctatgctgtagcaaaacaagcctataccatcttccaaatatactcgttccgtgccggcggcctcccctcctacgcccctgtcgattcttcaatcttcaccaacgtctgcgcgtagcaggctagcagtcggcacggcttcctcagatctgccggacgacttgttgttcgtcaccgactcaccagcaaccaatgtcggccatcagccggcagcaggggaagctgggcggagggtcattgcggcacggcgtccaggcgtacagcaggcaccagcaacagcccatggcaaacgccgcagatgaccctatggtagatgaagccggagtagaagatgccttcacacatgagatcaccgattatttgtacgtccctagataccatgtgttgagttggatggaaactgtggaggggatggtggccggtgtggcggcgcttccgccggtgtatttgatactgaacagagatcttcttgagacgggatggggatggaagaggctggtgccctacagacctggttatgttgagtggcatgtgttcaagaaataccttggggactatttcgaccataatcgtgaagcttttctttgtgccgagcagaagcctgatccatttggatggattattgctgaaaagagtgccctgattgctgcagccaaattgtgcctcaagatggagaaggcacttctcaggtactgtgctagctttctcactcctgacgacaaaaggctgatcctcgggatcaaggaccaggcaaagcaaatgatccaatcagaggtgcttcaagcaatggttcaaatgggtgtccttgttcctactggagatatgactgttgtcagaagaaccgctcaatttttccttaatagcacaaaggaaggagagagaaatggcaaccgcagaactgggtttcaaaaagcaattaactaaggaggagaagtttgaaaagaggaagcagagacttgctacaatcggagaggatcttttggcgattgctgctgatcaaccatttcgcttccctgccacatttacatttgtggtcagagcattctcagttctagatggtactgggaaaggccttcatcctaggtttcatattacagagattgctaagccctgagtactttttgcattactagcatctgaatacttattcaaaaacacacaaagcttgcacatcttcacttattatgtactgtctatattttcatcttgaacttttctggtactgacttgaaatgtctattaaatttgctagaaatgccaaggaattgctaagatttaatgacgctggtgttgaaatagttgtgaaggtgtgtggagagacatgtgtattcctcctatgacgaattcctcaggctccatgaagtcactcatgtccttaggatattaacggtatacatcaacaattcattctattttaattgcttgcaaaacttttttggcccttcaaatgagttccacgcatcaagaagtcaagattccaggaggcctaaaataggagaggagggcgcagcttgattcaatccatgtcaagtcaaaggctgctgcgaagtttgcacatgcaagtagaatttagatggtgaggttttgtctctgttcccatttttataacgactaggtgtttgaattcctaagattaaagtttatgtagattcttatttgtaattagatctctgttaggcatctaactgaataaatgatctcctaaagaattgacagattccatcactgagcagcccttcgccccggtggctgcggtgtcgcactggctgacacctgctcgcagttgcattacaagttttactgactatgtattttcaggtttattcaatttcggttctaatgcttctgacagcagttgtatcagtcctcttgttcagcttacatgtatccctcgcatccttccttggatccacataagtgttaataataattttgttgcatctcctctgctgatcagagctttcaaactcatgacagaataatgtactaaacttcagtttggtgtctatctcagtgtacctacactcagttggaaaacttcaaccacactgcaacaaggtttataaaaggtttgctatcaggaaaaacaaatttatgggctcaaacaaagtgtgatagtgaaagtcattttgcttccagcttaagaaccaagccaagaaaacagatatcaactgtgacgccacactcaaaagcttgtttggtgggagggacaaggttgggatgctggagatctccaagcttttgagtcgtggcttcccgaaaatctccaagcttttgtggtccatggagccagggatggctctttggtaaaagacttcgttgtggatggcctcttttatggtccatgttaagtcccaagtcccactaggtggttaagcagaaaaatcttgtgatggcattaagactttcagactttgtttttgggtctgatgcatgtaaaaaggattcccagtgtttctgttgctcttgcgatcctgtgaggacacatatgagagaaatatttagtttgttgatggcaaatcttgtcttatgttcatgtctgtgcctatctgatcaagcgttatgatatgatcccatgcgtggtactgtgttctttagagatgtacttaattatgtttctcttgcatttcatattgctttgtctaattgttaccgcaaattaagattttattataattccaatttgatatgcctcatcataaccatggttactgtagggcgcacgaag

SEQ ID NO: 3049 - DNA, 2925 bp, Zea Mays
ctccttccgacctcgccgcctccctccctaaactctaaaccctccaccagccgaagctactgccgcggccgcagcagaggtcgcgacgacgaacgctgaagaagcgccggcgagggagagtcctttactttttcctatgctgtagcaaaacaagcctataccatcttccaaatatactcgttccgtgccggcggcctcccctcctacgcccctgtcgattcttcaatcttcaccaacgtctgcgcgtagcaggctagcagtcggcacggcttcctcagatctgccggacgacttgttgttcgtcaccgactcaccagcaaccaatgtcggccatcagccggcagcaggggaagctgggcggagggtcattgcggcacggcgtccaggcgtacagcaggcaccagcaacagcccatggcaaacgatgaccctatggtagatgaagccggagtagaagatgccttcacacatgagatcaccgattatttgtacgtccctagataccatgtgttgagttggatggaaactgtggaggggatggtggccggtgtggcggcgcttccgccggtgtatttgatactgaacagagatcttcttgagacgggatggggatggaagaggctggtgccctacagacctggttatgttgagtggcatgtgttcaagaaataccttggggactatttcgaccataatcgtgaagcttttctttgtgccgagcagaagcctgatccatttggatggattattgctgaaaagagtgccctgattgctgcagccaaattgtgcctcaagatggagaaggcacttctcaggtactgtgctagctttctcactcctgacgacaaaaggctgatcctcgggatcaaggaccaggcaaagcaaatgatccaatcagaggtgcttcaagcaatggttcaaatgggtgtccttgttcctactggagatatgactgttgtcagaagaaccgctcaatttttccttaataggtaattacttttccttgaatttttattttcctcgagcctgcttgagagttgtgtgttatttcattaacgaaaaaagagtaaccaaatacaacactgcccatgagaagatgttaccttgtagttatagcagatggagtctgttgaactggatgagcatggtgttttttgaacaagatgagcatgatgtttggctttgttcttttttcatctattatttatagctttcaagagtgcctaacagcacaaaggaaggagagagaaatggcaaccgcagaactgggtttcaaaaagcaattaactaaggaggagaagtttgaaaagaggaagcagagacttgctacaatcggagaggatcttttggcgattgctgctgatcaaccatttcgcttccctgccacatttacatttgtggtcagagcattctcagttctagatggtactgggaaaggccttcatcctagaaatgccaaggaattgctaagatttaatgacgctggtgttgaaatagttgtgaaggtgtgtggagagacatgtgtattcctcctatgacgaattcctcaggctccatgaagtcactcatgtccttaggatattaacggtatacatcaacaattcattctattttaattgcttgcaaaacttttttggcccttcaaatgagttccacgcatcaagaagtcaagattccaggaggcctaaaataggagaggagggcgcagcttgattcaatccatgtcaagtcaaaggctgctgcgaagtttgcacatgcaagtagaatttagatggtgaggttttgtctctgttcccatttttataacgactaggtgtttgaattcctaagattaaagtttatgtagattcttatttgtaattagatctctgttaggcatctaactgaataaatgatctcctaaagaattgacagattccatcactgagcagcccttcgccccggtggctgcggtgtcgcactggctgacacctgctcgcagttgcattacaagttttactgactatgtattttcaggtttattcaatttcggttctaatgcttctgacagcagttgtatcagtcctcttgttcagcttacatgtatccctcgcatccttccttggatccacataagtgttaataataattttgttgcatctcctctgctgatcagagctttcaaactcatgacagaataatgtactaaacttcagtttggtgtctatctcagtgtacctacactcagttggaaaacttcaaccacactgcaacaaggtttataaaaggtttgctatcaggaaaaacaaatttatgggctcaaacaaagtgtgatagtgaaagtcattttgcttccagcttaagaaccaagccaagaaaacagatatcaactgtgacgccacactcaaaagcttgtttggtgggagggacaaggttgggatgctggagatctccaagcttttgagtcgtggcttcccgaaaatctccaagcttttgtggtccatggagccagggatggctctttggtaaaagacttcgttgtggatggcctcttttatggtccatgttaagtcccaagtcccactaggtggttaagcagaaaaatcttgtgatggcattaagactttcagactttgtttttgggtctgatgcatgtaaaaaggattcccagtgtttctgttgctcttgcgatcctgtgaggacacatatgagagaaatatttagtttgttgatggcaaatcttgtcttatgttcatgtctgtgcctatctgatcaagcgttatgatatgatcccatgcgtggtactgtgttctttagagatgtacttaattatgtttctcttgcatttcatattgctttgtctaattgttaccgcaaattaagattttattataattccaatttgatatgcctcatcataaccatggttactgtagggcgcacgaag

SEQ ID NO: 3050 - DNA, 2833 bp, Zea Mays
ctccttccgacctcgccgcctccctccctaaactctaaaccctccaccagccgaagctactgccgcggccgcagcagaggtcgcgacgacgaacgctgaagaagcgccggcgagggagagtcctttactttttcctatgctgtagcaaaacaagcctataccatcttccaaatatactcgttccgtgccggcggcctcccctcctacgcccctgtcgattcttcaatcttcaccaacgtctgcgcgtagcaggctagcagtcggcacggcttcctcagatctgccggacgacttgttgttcgtcaccgactcaccagcaaccaatgtcggccatcagccggcagcaggggaagctgggcggagggtcattgcggcacggcgtccaggcgtacagcaggcaccagcaacagcccatggcaaacgccgcagatgaccctatggtagatgaagccggagtagaagatgccttcacacatgagatcaccgattatttgtacgtccctagataccatgtgttgagttggatggaaactgtggaggggatggtggccggtgtggcggcgcttccgccggtgtatttgatactgaacagagatcttcttgagacgggatggggatggaagaggctggtgccctacagacctggttatgttgagtggcatgtgttcaagaaataccttggggactatttcgaccataatcgtgaagcttttctttgtgccgagcagaagcctgatccatttggatggattattgctgaaaagagtgccctgattgctgcagccaaattgtgcctcaagatggagaaggcacttctcaggtactgtgctagctttctcactcctgacgacaaaaggctgatcctcgggatcaaggaccaggcaaagcaaatgatccaatcagaggtagtgcagagaaacctgtgaagcagcgtgcttcaagcaatggttcaaatgggtgtccttgttcctactggagatatgactgttgtcagaagaaccgctcaatttttccttaatagctttcaagagtgcctaacagcacaaaggaaggagagagaaatggcaaccgcagaactgggtttcaaaaagcaattaactaaggaggagaagtttgaaaagaggaagcagagacttgctacaatcggagaggatcttttggcgattgctgctgatcaaccatttcgcttccctgccacatttacatttgtggtcagagcattctcagttctagatggtactgggaaaggccttcatcctaggtttcatattacagagattgctaagccctgaaaatgccaaggaattgctaagatttaatgacgctggtgttgaaatagttgtgaaggtgtgtggagagacatgtgtattcctcctatgacgaattcctcaggctccatgaaggtaagcctgtcttaatgggcttgattgttgaacctgacttagtacttttatccatgtcacgacattgaaccagacagtcactcatgtccttaggatattaacggtatacatcaacaattcattctattttaattgcttgcaaaacttttttggcccttcaaatgagttccacgcatcaagaagtcaagattccaggaggcctaaaataggagaggagggcgcagcttgattcaatccatgtcaagtcaaaggctgctgcgaagtttgcacatgcaagtagaatttagatggtgaggttttgtctctgttcccatttttataacgactaggtgtttgaattcctaagattaaagtttatgtagattcttatttgtaattagatctctgttaggcatctaactgaataaatgatctcctaaagaattgacagattccatcactgagcagcccttcgccccggtggctgcggtgtcgcactggctgacacctgctcgcagttgcattacaagttttactgactatgtattttcaggtttattcaatttcggttctaatgcttctgacagcagttgtatcagtcctcttgttcagcttacatgtatccctcgcatccttccttggatccacataagtgttaataataattttgttgcatctcctctgctgatcagagctttcaaactcatgacagaataatgtactaaacttcagtttggtgtctatctcagtgtacctacactcagttggaaaacttcaaccacactgcaacaaggtttataaaaggaaaaacaaatttatgggctcaaacaaagtgtgatagtgaaagtcattttgcttccagcttaagaaccaagccaagaaaacagatatcaactgtgacgccacactcaaaagcttgtttggtgggagggacaaggttgggatgctggagatctccaagcttttgagtcgtggcttcccgaaaatctccaagcttttgtggtccatggagccagggatggctctttggtaaaagacttcgttgtggatggcctcttttatggtccatgttaagtcccaagtcccactaggtggttaagcagaaaaatcttgtgatggcattaagactttcagactttgtttttgggtctgatgcatgtaaaaaggattcccagtgtttctgttgctcttgcgatcctgtgaggacacatatgagagaaatatttagtttgttgatggcaaatcttgtcttatgttcatgtctgtgcctatctgatcaagcgttatgatatgatcccatgcgtggtactgtgttctttagagatgtacttaattatgtttctcttgcatttcatattgctttgtctaattgttaccgcaaattaagattttattataattccaatttgatatgcctcatcataaccatggttactgtagggcgcacgaag

SEQ ID NO: 3051 - DNA, 2390 bp, Zea Mays
ctccttccgacctcgccgcctccctccctaaactctaaaccctccaccagccgaagctactgccgcggccgcagcagaggtcgcgacgacgaacgctgaagaagcgccggcgagggagagtcctttactttttcctatgctgtagcaaaacaagcctataccatcttccaaatatactcgttccgtgccggcggcctcccctcctacgcccctgtcgattcttcaatcttcaccaacgtctgcgcgtagcaggctagcagtcggcacggcttcctcagatctgccggacgacttgttgttcgtcaccgactcaccagcaaccaatgtcggccatcagccggcagcaggggaagctgggcggagggtcattgcggcacggcgtccaggcgtacagcaggcaccagcaacagcccatggcaaacgccgcagatgaccctatggtagatgaagccggagtagaagatgccttcacacatgagatcaccgattatttgtacgtccctagataccatgtgttgagttggatggaaactgtggaggggatggtggccggtgtggcggcgcttccgccggtgtatttgatactgaacagagatcttcttgagacgggatggggatggaagaggctggtgccctacagacctggttatgttgagtggcatgtgttcaagaaataccttggggactatttcgaccataatcgtgaagcttttctttgtgccgagcagaagcctgatccatttggatggattattgctgaaaagagtgccctgattgctgcagccaaattgtgcctcaagatggagaaggcacttctcaggtactgtgctagctttctcactcctgacgacaaaaggctgatcctcgggatcaaggaccaggcaaagcaaatgatccaatcagaggtagtgcagagaaacctgtgaagcagcgtgcttcaagcaatggttcaaatgggtgtccttgttcctactggagatatgactgttgtcagaagaaccgctcaatttttccttaatagctttcaagagtgcctaacagcacaaaggaaggagagagaaatggcaaccgcagaactgggtttcaaaaagcaattaactaaggaggagaagtttgaaaagaggaagcagagacttgctacaatcggagaggatcttttggcgattgctgctgatcaaccatttcgcttccctgccacatttacatttgtggtcagagcattctcaggtgtgtggagagacatgtgtattcctcctatgacgaattcctcaggctccatgaaggtaagcctgtcttaatgggcttgattgttgaacctgacttagtacttttatccatgtcacgacattgaaccagacagtcactcatgtccttaggatattaacggtatacatcaacaattcattctattttaattgcttgcaaaacttttttggcccttcaaatgagttccacgcatcaagaagtcaagattccaggaggcctaaaataggagaggagggcgcagcttgattcaatccatgtcaagtcaaaggctgctgcgaagtttgcacatgcaagtagaatttagatggtttattcaatttcggttctaatgcttctgacagcagttgtatcagtcctcttgttcagcttacataataatgtactaaacttcagtttggtgtctatctcagtgtacctacactcagttggaaaacttcaaccacactgcaacaaggtttataaaaggtttgctatcaggaaaaacaaatttatgggctcaaacaaagtgtgatagtgaaagtcattttgcttccagcttaagaaccaagccaagaaaacagatatcaactgtgacgccacactcaaaagcttgtttggtgggagggacaaggttgggatgctggagatctccaagcttttgagtcgtggcttcccgaaaatctccaagcttttgtggtccatggagccagggatggctctttggtaaaagacttcgttgtggatggcctcttttatggtccatgttaagtcccaagtcccactaggtggttaagcagaaaaatcttgtgatggcattaagactttcagactttgtttttgggtctgatgcatgtaaaaaggattcccagtgtttctgttgctcttgcgatcctgtgaggacacatatgagagaaatatttagtttgttgatggcaaatcttgtcttatgttcatgtctgtgcctatctgatcaagcgttatgatatgatcccatgcgtggtactgtgttctttagagatgtacttaattatgtttctcttgcatttcatattgctttgtctaattgttaccgcaaattaagattttattataattccaatttgatatgcctcatcataaccatggttactgtagggcgcacgaag

SEQ ID NO: 3052 - DNA, 2605 bp, Zea Mays
ctccttccgacctcgccgcctccctccctaaactctaaaccctccaccagccgaagctactgccgcggccgcagcagaggtcgcgacgacgaacgctgaagaagcgccggcgagggagagtcctttactttttcctatgctgtagcaaaacaagcctataccatcttccaaatatactcgttccgtgccggcggcctcccctcctacgcccctgtcgattcttcaatcttcaccaacgtctgcgcgtagcaggctagcagtcggcacggcttcctcagatctgccggacgacttgttgttcgtcaccgactcaccagcaaccaatgtcggccatcagccggcagcaggggaagctgggcggagggtcattgcggcacggcgtccaggcgtacagcaggcaccagcaacagcccatggcaaacgccgcagatgaccctatggtagatgaagccggagtagaagatgccttcacacatgagatcaccgattatttgtacgtccctagataccatgtgttgagttggatggaaactgtggaggggatggtggccggtgtggcggcgcttccgccggtgtatttgatactgaacagagatcttcttgagacgggatggggatggaagaggctggtgccctacagacctggttatgttgagtggcatgtgttcaagaaataccttggggactatttcgaccataatcgtgaagcttttctttgtgccgagcagaagcctgatccatttggatggattattgctgaaaagagtgccctgattgctgcagccaaattgtgcctcaagatggagaaggcacttctcaggtactgtgctagctttctcactcctgacgacaaaaggctgatcctcgggatcaaggaccaggcaaagcaaatgatccaatcagaggtgcttcaagcaatggttcaaatgggtgtccttgttcctactggagatatgactgttgtcagaagaaccgctcaatttttccttaatagctttcaagagtgcctaacagcacaaaggaaggagagagaaatggcaaccgcagaactgggtttcaaaaagcaattaactaaggaggagaagtttgaaaagaggaagcagagacttgctacaatcggagaggatcttttggcgattgctgctgatcaaccatttcgcttccctgccacatttacatttgtgttctagatggtactgggaaaggccttcatcctaggtttcatattacagagattgctaagccctgagtactttttgcattactagcatctgaatacttattcaaaaacacacaaagcttgcacatcttcacttattatgtactgtctatattttcatcttgaacttttctggtactgacttgaaatgtctattaaatttgctagaaatgccaaggaattgctaagatttaatgacgctggtgttgaaatagttgtgaaggtgtgtggagagacatgtgtattcctcctatgacgaattcctcaggctccatgaaggtaagcctgtcttaatgggcttgattgttgaacctgacttagtacttttatccatgtcacgacattgaaccagacagtcactcatgtccttaggatattaacggtatacatcaacaattcattctattttaattgcttgcaaaacttttttggcccttcaaatgagttccacgcatcaagaagtcaagattccaggaggcctaaaataggagaggagggcgcagcttgattcaatccatgtcaagtcaaaggctgctgcgaagtttgcacatgcaagtagaatttagatggtttattcaatttcggttctaatgcttctgacagcagttgtatcagtcctcttgttcagcttacataataatgtactaaacttcagtttggtgtctatctcagtgtacctacactcagttggaaaacttcaaccacactgcaacaaggtttataaaaggtttgctatcaggaaaaacaaatttatgggctcaaacaaagtgtgatagtgaaagtcattttgcttccagcttaagaaccaagccaagaaaacagatatcaactgtgacgccacactcaaaagcttgtttggtgggagggacaaggttgggatgctggagatctccaagcttttgagtcgtggcttcccgaaaatctccaagcttttgtggtccatggagccagggatggctctttggtaaaagacttcgttgtggatggcctcttttatggtccatgttaagtcccaagtcccactaggtggttaagcagaaaaatcttgtgatggcattaagactttcagactttgtttttgggtctgatgcatgtaaaaaggattcccagtgtttctgttgctcttgcgatcctgtgaggacacatatgagagaaatatttagtttgttgatggcaaatcttgtcttatgttcatgtctgtgcctatctgatcaagcgttatgatatgatcccatgcgtggtactgtgttctttagagatgtacttaattatgtttctcttgcatttcatattgctttgtctaattgttaccgcaaattaagattttattataattccaatttgatatgcctcatcataaccatggttactgtagggcgcacgaag

SEQ ID NO: 3053 - DNA, 2775 bp, Zea Mays
ctccttccgacctcgccgcctccctccctaaactctaaaccctccaccagccgaagctactgccgcggccgcagcagaggtcgcgacgacgaacgctgaagaagcgccggcgagggagagtcctttactttttcctatgctgtagcaaaacaagcctataccatcttccaaatatactcgttccgtgccggcggcctcccctcctacgcccctgtcgattcttcaatcttcaccaacgtctgcgcgtagcaggctagcagtcggcacggcttcctcagatctgccggacgacttgttgttcgtcaccgactcaccagcaaccaatgtcggccatcagccggcagcaggggaagctgggcggagggtcattgcggcacggcgtccaggcgtacagcaggcaccagcaacagcccatggcaaacgccgcagatgaccctatggtagatgaagccggagtagaagatgccttcacacatgagatcaccgattatttgtacgtccctagataccatgtgttgagttggatggaaactgtggaggggatggtggccggtgtggcggcgcttccgccggtgtatttgatactgaacagagatcttcttgagacgggatggggatggaagaggctggtgccctacagacctggttatgttgagtggcatgtgttcaagaaataccttggggactatttcgaccataatcgtgaagcttttctttgtgccgagcagaagcctgatccatttggatggattattgctgaaaagagtgccctgattgctgcagccaaattgtgcctcaagatggagaaggcacttctcaggtactgtgctagctttctcactcctgacgacaaaaggctgatcctcgggatcaaggaccaggcaaagcaaatgatccaatcagaggtgcttcaagcaatggttcaaatgggtgtccttgttcctactggagatatgactgttgtcagaagaaccgctcaatttttccttaatagctttcaagagtgcctaacagcacaaaggaaggagagagaaatggcaaccgcagaactgggtttcaaaaagcaattaactaaggaggagaagtttgaaaagaggaagcagagacttgctacaatcggagaggatcttttggcgattgctgctgatcaaccatttcgcttccctgccacatttacatttgtggtcagagcattctcagttctagatggtactgggaaaggccttcatcctagaaatgccaaggaattgctaagatttaatgacgctggtgttgaaatagttgtgaaggtgtgtggagagacatgtgtattcctcctatgacgaattcctcaggctccatgaaggtaagcctgtcttaatgggcttgattgttgaacctgacttagtacttttatccatgtcacgacattgaaccagacagtcactcatgtccttaggatattaacggtatacatcaacaattcattctattttaattgcttgcaaaacttttttggcccttcaaatgagttccacgcatcaagaagtcaagattccaggaggcctaaaataggagaggagggcgcagcttgattcaatccatgtcaagtcaaaggctgctgcgaagtttgcacatgcaagtagaatttagatggtgaggttttgtctctgttcccatttttataacgactaggtgtttgaattcctaagattaaagtttatgtagattcttatttgtaattagatctctgttaggcatctaactgaataaatgatctcctaaagaattgacagattccatcactgagcagcccttcgccccggtggctgcggtgtcgcactggctgacacctgctcgcagttgcattacaagttttactgactatgtattttcaggtttattcaatttcggttctaatgcttctgacagcagttgtatcagtcctcttgttcagcttacatgtatccctcgcatccttccttggatccacataagtgttaataataattttgttgcatctcctctgctgatcagagctttcaaactcatgacagaataatgtactaaacttcagtttggtgtctatctcagtgtacctacactcagttggaaaacttcaaccacactgcaacaaggtttataaaaggaaaaacaaatttatgggctcaaacaaagtgtgatagtgaaagtcattttgcttccagcttaagaaccaagccaagaaaacagatatcaactgtgacgccacactcaaaagcttgtttggtgggagggacaaggttgggatgctggagatctccaagcttttgagtcgtggcttcccgaaaatctccaagcttttgtggtccatggagccagggatggctctttggtaaaagacttcgttgtggatggcctcttttatggtccatgttaagtcccaagtcccactaggtggttaagcagaaaaatcttgtgatggcattaagactttcagactttgtttttgggtctgatgcatgtaaaaaggattcccagtgtttctgttgctcttgcgatcctgtgaggacacatatgagagaaatatttagtttgttgatggcaaatcttgtcttatgttcatgtctgtgcctatctgatcaagcgttatgatatgatcccatgcgtggtactgtgttctttagagatgtacttaattatgtttctcttgcatttcatattgctttgtctaattgttaccgcaaattaagattttattataattccaatttgatatgcctcatcataaccatggttactgtagggcgcacgaag

SEQ ID NO: 3054 - DNA, 2343 bp, Zea Mays
ctccttccgacctcgccgcctccctccctaaactctaaaccctccaccagccgaagctactgccgcggccgcagcagaggtcgcgacgacgaacgctgaagaagcgccggcgagggagagtcctttactttttcctatgctgtagcaaaacaagcctataccatcttccaaatatactcgttccgtgccggcggcctcccctcctacgcccctgtcgattcttcaatcttcaccaacgtctgcgcgtagcaggctagcagtcggcacggcttcctcagatctgccggacgacttgttgttcgtcaccgactcaccagcaaccaatgtcggccatcagccggcagcaggggaagctgggcggagggtcattgcggcacggcgtccaggcgtacagcaggcaccagcaacagcccatggcaaacgatgaccctatggtagatgaagccggagtagaagatgccttcacacatgagatcaccgattatttgtacgtccctagataccatgtgttgagttggatggaaactgtggaggggatggtggccggtgtggcggcgcttccgccggtgtatttgatactgaacagagatcttcttgagacgggatggggatggaagaggctggtgccctacagacctggttatgttgagtggcatgtgttcaagaaataccttggggactatttcgaccataatcgtgaagcttttctttgtgccgagcagaagcctgatccatttggatggattattgctgaaaagagtgccctgattgctgcagccaaattgtgcctcaagatggagaaggcacttctcaggtactgtgctagctttctcactcctgacgacaaaaggctgatcctcgggatcaaggaccaggcaaagcaaatgatccaatcagaggtagtgcagagaaacctgtgaagcagcgtgcttcaagcaatggttcaaatgggtgtccttgttcctactggagatatgactgttgtcagaagaaccgctcaatttttccttaatagctttcaagagtgcctaacagcacaaaggaaggagagagaaatggcaaccgcagaactgggtttcaaaaagcaattaactaaggaggagaagtttgaaaagaggaagcagagacttgctacaatcggagaggatcttttggcgattgctgctgatcaaccatttcgcttccctgccacatttacatttgtggtcagagcattctcagttctagatggtactgggaaaggccttcatcctagaaatgccaaggaattgctaagatttaatgacgctggtgttgaaatagttgtgaaggtgtgtggagagacatgtgtattcctcctatgacgaattcctcaggctccatgaaggatattaacggtatacatcaacaattcattctattttaattgcttgcaaaacttttttggcccttcaaatgagttccacgcatcaagaagtcaagattccaggaggcctaaaataggagaggagggcgcagcttgattcaatccatgtcaagtcaaaggctgctgcgaagtttgcacatgcaagtagaatttagatggtttattcaatttcggttctaatgcttctgacagcagttgtatcagtcctcttgttcagcttacattgtacctacactcagttggaaaacttcaaccacactgcaacaaggtttataaaaggtttgctatcaggaaaaacaaatttatgggctcaaacaaagtgtgatagtgaaagtcattttgcttccagcttaagaaccaagccaagaaaacagatatcaactgtgacgccacactcaaaagcttgtttggtgggagggacaaggttgggatgctggagatctccaagcttttgagtcgtggcttcccgaaaatctccaagcttttgtggtccatggagccagggatggctctttggtaaaagacttcgttgtggatggcctcttttatggtccatgttaagtcccaagtcccactaggtggttaagcagaaaaatcttgtgatggcattaagactttcagactttgtttttgggtctgatgcatgtaaaaaggattcccagtgtttctgttgctcttgcgatcctgtgaggacacatatgagagaaatatttagtttgttgatggcaaatcttgtcttatgttcatgtctgtgcctatctgatcaagcgttatgatatgatcccatgcgtggtactgtgttctttagagatgtacttaattatgtttctcttgcatttcatattgctttgtctaattgttaccgcaaattaagattttattataattccaatttgatatgcctcatcataaccatggttactgtagggcgcacgaag

SEQ ID NO: 3055 - DNA, 3013 bp, Zea Mays
ctccttccgacctcgccgcctccctccctaaactctaaaccctccaccagccgaagctactgccgcggccgcagcagaggtcgcgacgacgaacgctgaagaagcgccggcgagggagagtcctttactttttcctatgctgtagcaaaacaagcctataccatcttccaaatatactcgttccgtgccggcggcctcccctcctacgcccctgtcgattcttcaatcttcaccaacgtctgcgcgtagcaggctagcagtcggcacggcttcctcagatctgccggacgacttgttgttcgtcaccgactcaccagcaaccaatgtcggccatcagccggcagcaggggaagctgggcggagggtcattgcggcacggcgtccaggcgtacagcaggcaccagcaacagcccatggcaaacgatgaccctatggtagatgaagccggagtagaagatgccttcacacatgagatcaccgattatttgtacgtccctagataccatgtgttgagttggatggaaactgtggaggggatggtggccggtgtggcggcgcttccgccggtgtatttgatactgaacagagatcttcttgagacgggatggggatggaagaggctggtgccctacagacctggttatgttgagtggcatgtgttcaagaaataccttggggactatttcgaccataatcgtgaagcttttctttgtgccgagcagaagcctgatccatttggatggattattgctgaaaagagtgccctgattgctgcagccaaattgtgcctcaagatggagaaggcacttctcaggtactgtgctagctttctcactcctgacgacaaaaggctgatcctcgggatcaaggaccaggcaaagcaaatgatccaatcagaggtagtgcagagaaacctgtgaagcagcgtacgtgatgagtaggagatatgttttcataagctaagctgccatctcctttcactagacttattaattggtctgtcgtctatacacgtaaggaccatatatttaccggccggagaaactcccgctggtttttggaggcagctgcacacgggcacaaaggggtcgttgtattcaattagggttctctcacagtagctgagacgtacgtgtacgttggccaaatatcttttatacgagtcatctatcattgatttagattatctatcattgttccaaaaattcagttactaagaggcagactaagaaaaggtaaagatatttgtactttcttttataggagcagatgaaggcataatatccccacttagacaaatttatctccatattgcaatttaaatggtagcagtagatcattaatccagtatcagtcaaaatattcgggaaggattgcttgaagtattctatggagtttatgaaaaggatcctgacaaagttagttctcagggcataatatcctgcagatgatagtttataccctgtgatgttctgggaagtgttgaatcttgtattcctgcaggtgcttcaagcaatggttcaaatgggtgtccttgttcctactggagatatgactgttgtcagaagaaccgctcaatttttccttaatagctttcaagagtgcctaacagcacaaaggaaggagagagaaatggcaaccgcagaactgggtttcaaaaagcaattaactaaggaggagaagtttgaaaagaggaagcagagacttgctacaatcggagaggatcttttggcgattgctgctgatcaaccatttcgcttccctgccacatttacatttgtggtcagagcattctcagttctagatggtactgggaaaggccttcatcctagaaatgccaaggaattgctaagatttaatgacgctggtgttgaaatagttgtgaaggtgtgtggagagacatgtgtattcctcctatgacgaattcctcaggctccatgaaggtaagcctgtcttaatgggcttgattgttgaacctgacttagtacttttatccatgtcacgacattgaaccagacagtcactcatgtccttaggatattaacggtatacatcaacaattcattctattttaattgcttgcaaaacttttttggcccttcaaatgagttccacgcatcaagaagtcaagattccaggaggcctaaaataggagaggagggcgcagcttgattcaatccatgtcaagtcaaaggctgctgcgaagtttgcacatgcaagtagaatttagatggtttattcaatttcggttctaatgcttctgacagcagttgtatcagtcctcttgttcagcttacattgtacctacactcagttggaaaacttcaaccacactgcaacaaggtttataaaaggtttgctatcaggaaaaacaaatttatgggctcaaacaaagtgtgatagtgaaagtcattttgcttccagcttaagaaccaagccaagaaaacagatatcaactgtgacgccacactcaaaagcttgtttggtgggagggacaaggttgggatgctggagatctccaagcttttgagtcgtggcttcccgaaaatctccaagcttttgtggtccatggagccagggatggctctttggtaaaagacttcgttgtggatggcctcttttatggtccatgttaagtcccaagtcccactaggtggttaagcagaaaaatcttgtgatggcattaagactttcagactttgtttttgggtctgatgcatgtaaaaaggattcccagtgtttctgttgctcttgcgatcctgtgaggacacatatgagagaaatatttagtttgttgatggcaaatcttgtcttatgttcatgtctgtgcctatctgatcaagcgttatgatatgatcccatgcgtggtactgtgttctttagagatgtacttaattatgtttctcttgcatttcatattgctttgtctaattgttaccgcaaattaagattttattataattccaatttgatatgcctcatcataaccatggttactgtagggcgcacgaag

SEQ ID NO: 3056 - DNA, 1970 bp, Zea Mays
gggttctctcacagtagctgagacgtgcttcaagcaatggttcaaatgggtgtccttgttcctactggagatatgactgttgtcagaagaaccgctcaatttttccttaatagctttcaagagtgcctaacagcacaaaggaaggagagagaaatggcaaccgcagaactgggtttcaaaaagcaattaactaaggaggagaagtttgaaaagaggaagcagagacttgctacaatcggagaggatcttttggcgattgctgctgatcaaccatttcgcttccctgccacatttacatttgtggtcagagcattctcagttctagatggtactgggaaaggccttcatcctaggtttcatattacagagattgctaagccctgagtactttttgcattactagcatctgaatacttattcaaaaacacacaaagcttgcacatcttcacttattatgtactgtctatattttcatcttgaacttttctggtactgacttgaaatgtctattaaatttgctagaaatgccaaggaattgctaagatttaatgacgctggtgttgaaatagttgtgaaggtgtgtggagagacatgtgtattcctcctatgacgaattcctcaggctccatgaaggatattaacggtatacatcaacaattcattctattttaattgcttgcaaaacttttttggcccttcaaatgagttccacgcatcaagaagtcaagattccaggaggcctaaaataggagaggagggcgcagcttgattcaatccatgtcaagtcaaaggctgctgcgaagtttgcacatgcaagtagaatttagatggtgaggttttgtctctgttcccatttttataacgactaggtgtttgaattcctaagattaaagtttatgtagattcttatttgtaattagatctctgttaggcatctaactgaataaatgatctcctaaagaattgacagattccatcactgagcagcccttcgccccggtggctgcggtgtcgcactggctgacacctgctcgcagttgcattacaagttttactgactatgtattttcaggtttattcaatttcggttctaatgcttctgacagcagttgtatcagtcctcttgttcagcttacatgtatccctcgcatccttccttggatccacataagtgttaataataattttgttgcatctcctctgctgatcagagctttcaaactcatgacagaataatgtactaaacttcagtttggtgtctatctcagtgtacctacactcagttggaaaacttcaaccacactgcaacaaggtttataaaaggaaaaacaaatttatgggctcaaacaaagtgtgatagtgaaagtcattttgcttccagcttaagaaccaagccaagaaaacagatatcaactgtgacgccacactcaaaagcttgtttggtgggagggacaaggttgggatgctggagatctccaagcttttgagtcgtggcttcccgaaaatctccaagcttttgtggtccatggagccagggatggctctttggtaaaagacttcgttgtggatggcctcttttatggtccatgttaagtcccaagtcccactaggtggttaagcagaaaaatcttgtgatggcattaagactttcagactttgtttttgggtctgatgcatgtaaaaaggattcccagtgtttctgttgctcttgcgatcctgtgaggacacatatgagagaaatatttagtttgttgatggcaaatcttgtcttatgttcatgtctgtgcctatctgatcaagcgttatgatatgatcccatgcgtggtactgtgttctttagagatgtacttaattatgtttctcttgcatttcatattgctttgtctaattgttaccgcaaattaagattttattataattccaatttgatatgcctcatcataaccatggttactgtagggcgcacgaag

SEQ ID NO: 3057 - DNA, 1506 bp, Zea Mays
agatggtactgggaaaggccttcatcctagaaatgccaaggaattgctaagatttaatgacgctggtgttgaaatagttgtgaaggtgtgtggagagacatgtgtattcctcctatgacgaattcctcaggctccatgaagtcactcatgtccttaggatattaacggtatacatcaacaattcattctattttaattgcttgcaaaacttttttggcccttcaaatgagttccacgcatcaagaagtcaagattccaggaggcctaaaataggagaggagggcgcagcttgattcaatccatgtcaagtcaaaggctgctgcgaagtttgcacatgcaagtagaatttagatggtgaggttttgtctctgttcccatttttataacgactaggtgtttgaattcctaagattaaagtttatgtagattcttatttgtaattagatctctgttaggcatctaactgaataaatgatctcctaaagaattgacagattccatcactgagcagcccttcgccccggtggctgcggtgtcgcactggctgacacctgctcgcagttgcattacaagttttactgactatgtattttcaggtttattcaatttcggttctaatgcttctgacagcagttgtatcagtcctcttgttcagcttacatgtatccctcgcatccttccttggatccacataagtgttaataataattttgttgcatctcctctgctgatcagagctttcaaactcatgacagaataatgtactaaacttcagtttggtgtctatctcagtgtacctacactcagttggaaaacttcaaccacactgcaacaaggtttataaaaggtttgctatcaggaaaaacaaatttatgggctcaaacaaagtgtgatagtgaaagtcattttgcttccagcttaagaaccaagccaagaaaacagatatcaactgtgacgccacactcaaaagcttgtttggtgggagggacaaggttgggatgctggagatctccaagcttttgagtcgtggcttcccgaaaatctccaagcttttgtggtccatggagccagggatggctctttggtaaaagacttcgttgtggatggcctcttttatggtccatgttaagtcccaagtcccactaggtggttaagcagaaaaatcttgtgatggcattaagactttcagactttgtttttgggtctgatgcatgtaaaaaggattcccagtgtttctgttgctcttgcgatcctgtgaggacacatatgagagaaatatttagtttgttgatggcaaatcttgtcttatgttcatgtctgtgcctatctgatcaagcgttatgatatgatcccatgcgtggtactgtgttctttagagatgtacttaattatgtttctcttgcatttcatattgctttgtctaattgttaccgcaaattaagattttattataattccaatttgatatgcctcatcataaccatggttactgtagggcgcacgaag

SEQ ID NO: 3058 - DNA, 1469 bp, Zea Mays
atagaccccgcgcatggacggcctccatccactccgcccagcacccgcacctcgtcagtcgtcaccgagaagcagaagcagcagctgctgcctgctggtcgttcgttcgcctcgttctctccgcctccccccaccccccgcctcgcttcctcctccgcgcttccttcgccgaggcgtcagcgtcagcgagggcgtataaagcgctccccctccgcgcgcgtccgcacaatcgccaccgcctctccgctcctcgacaagaccaatggcggctgctgcgtcctccgctctgcacgccgttggcgccgtcgcctccgccaagcctagatccgtcgcccccgcggtggcgacgaggaggagcgtgcgcgtggcgcccgcggccaagcgaggaccaggctcgggaggaggcaggctcgtggctcgcagcgccgttgcagccaaggcggatgaggcggccgcggcggcgggatccaagtcaggcggccatgagttgctgatgtttgaggcccttcgtgaagccttgatagaagagatgaatttggatccaacagtgtgcgtcatgggtgaagatgttggtcattatggaggttcatacaaggtgaccaaagggttggctgagatgttcggagatctccgggtccttgatacccctatcgccgagaactccttcactggcatgggagttggagcagcaatgaaggggctgaggcctgttgtggaaggcatgaacatgggtttccttctccttgcctacaaccagatctcgaacaaccaggtgagcacgtgaccatcctcacgtactcccgcatgaggtaccacgtgatgcaggctgccaagacgctggtgaacaaggggtacgaccccgaggtcatcgacatcaggtcgctgaagccgttcgacctgcacacgatcgggaactcgatcaagaagacccaccgcgtgctgatcgtggaggagtgcatgcggacgggcggcatcggcgccagcctgcggtcggccatcatcgacaacttctgggactacctggacgcccccatcatgtgcctgtcgtcgcaggacgtgccgaccccgtacgccgcgacgctggaggacgccaccgtggtgcagcccgcgcagatcgtggccgccgtcgagcagatctgccaatgatcagtgatatcatggctttgttgagtacctgatctgtggagtcagattaccgtggttttgtttctctgtcgcatcgcgactgtcaccgtgccttagacaagacatgtttttgtattttgcaacgcagaagccatactcgtactggatgccgtttgtgggtggcctatttgttcattgtgcaaagttggatgccatactcgtacactattattatcaggtttcagcattcgtttgtactttgtagcagcgccgtgttgcgctgtcggcatgacgttgaattcactcctgcacctgaattttgttggttatattttagatttttt

SEQ ID NO: 3059 - DNA, 1545 bp, Zea Mays
atagaccccgcgcatggacggcctccatccactccgcccagcacccgcacctcgtcagtcgtcaccgagaagcagaagcagcagctgctgcctgctggtcgttcgttcgcctcgttctctccgcctccccccaccccccgcctcgcttcctcctccgcgcttccttcgccgaggcgtcagcgtcagcgagggcgtataaagcgctccccctccgcgcgcggccgcggcggcgggatccaagtcaggcggccatgagttgctgatgtttgaggcccttcgtgaagccttgatagaagagatgaatttggatccaacagtgtgcgtcatgggtgaagatgttggtcattatggaggttcatacaaggtgaccaaagggttggctgagatgttcggagatctccgggtccttgatacccctatcgccgagaactccttcactggcatgggagttggagcagcaatgaaggggctgaggcctgttgtggaaggcatgaacatgggtttccttctccttgcctacaaccagatctcgaacaactgcggcatgcttcactacacctcaggcggccagttcaagatcccggtcgtgatccgaggccccggcggtgtcggtcgccagctcggtgccgagcactcgcagcggctagagtcgtacttccagtcgattcctggccttcagatggttgcctgctccactccttacaacgcaaagggcctgatgaaggcggccataaggagcgagaaccccgtggtgctgtttgagcacgtcctcttgtacaacctgaaggagaaaatccccgacgaggagtacatctgctgcctggaggaggcggagatggtgcggccaggtgagcacgtgaccatcctcacgtactcccgcatgaggtaccacgtgatgcaggctgccaagacgctggtgaacaaggggtacgaccccgaggtcatcgacatcaggtcgctgaagccgttcgacctgcacacgatcgggaactcgatcaagaagacccaccgcgtgctgatcgtggaggagtgcatgcggacgggcggcatcggcgccagcctgcggtcggccatcatcgacaacttctgggactacctggacgcccccatcatgtgcctgtcgtcgcaggacgtgccgaccccgtacgccgcgacgctggaggacgccaccgtggtgcagcccgcgcagatcgtggccgccgtcgagcagatctgccaatgatcagtgatatcatggctttgttgagtacctgatctgtggagtcagattaccgtggttttgtttctctgtcgcatcgcgactgtcaccgtgccttagacaagacatgtttttgtattttgcaacgcagaagccatactcgtactggatgccgtttgtgggtggcctatttgttcattgtgcaaagttggatgccatactcgtacactattattatcaggtttcagcattcgtttgtactttgtagcagcgccgtgttgcgctgtcggcatgacgttgaattcactcctgcacctgaattttgttggttatattttagatttttt

SEQ ID NO: 3060 - DNA, 1329 bp, Zea Mays
ctcttacagtggatatacaatgggaatatcgaggaatctattgccatggaaaataagatacaagatttacaggcacaactaaaggtaaggtttattcaaaaaaactatctgttttatcttgtttcacgctctttaatcattacacctaaactaacaaaacaagagtcactgctaaagacaacaggagcaacaaaaatgagcatatggtaaagtcaactgcatttcaacattacaaatttcacagcatatcagaatatggtaagagcaagggcgtctcagttcagcttcagtaacaggaagcctgaaaagcgatcctgtatcctgcttatttgctgttgacttgcaaagttcgaatgatatatatcaaaactatcaatgtgtttctgctatgattatttgtcgccaagaaacataggagcagcagtacagatagacgaagatgaatatttctgtgggaatccattcatatggatccaccttataaaagcattatttggagaccataaattacatttgcattacatcttgcactgtaacaactcagattggtcaaccatggccaattcctaaaaacgaacttcctggttccccctacgatgtatctaatgaattaaataaggaactgaaatttgtaccagataaggatcgatcgtgctaacctagtgcatgatcaagggcttgtcgctgaaatccaccaacggcttgggcacactgagcgtcaacaggcgcaggcggatgccgaagcctctgacgagaatgcgggccttcatggctttgggatgccgagtcgttgaaggtggaggtggggcggaagccgagaacgccgaccgcagcagcttgctgggtatctcatcgggtggctttgacttcgaggcggtcaggatggagttggacgtcgtggtgggtgtcgagcctgcgtcgaaggataagtggtccgtggaggcctgaccgaagctacagatcgcgacctcggaccactcctccgaggacgtcctcggggagaagcccccctaatagtcgaagacgcctcttgccgcgacaccaccgtcgtcgaagaaggagcggcaggagtcgacggcgtcgaagtagatggagttgaccatcttgtacatcttatcgcctggcgcagccccgcacggcgccacagccttccgtcgtcggccccactgggtgatgctactaggcgagcgccgggagggaacggtaggatggcggcggcttgggcgtgaggggatgagggcggctagagatccgggatgggatgacgagctattagattagggttgcaaatagctgacatcatgttgtgtggccctttaggtgcgtctg

SEQ ID NO: 3061 - DNA, 2079 bp, Zea Mays
cacacttccttcctcatcaagactccctctttcctcctcgaccttgagcaatcctcgcgcgctgctccagcctccgctaaccagttttcaccctccaaatcccttttttccccacagtttcacttctttcttctttttcttcttctttctgcttctttgctgctgttggtggttattaacctaaagaattggtcctgcatcttgttcttgccacgacctgatacggtgcttgataattgttatgctcacctcactttatttatttttttcttttattttggtgctctttatcgtagcagctggtgcctggtggttcggttaggtgcttccctcgtcaacgtcagacgcccccacttccgccagcaacaacaccagcagcagcacgatgatgagcttcaggagcagcagccacgagggcttcggcttcggccacgccgccgccgcggccagcggagcgccgctgccgtggtgggcagggccggccccgatgctgagcggcgagccgctggccctgtcgccggaggcccactgccgggacggccgcatccaggccccccagggacctcccgtgccgtcggtcaaggctcctgtactggcaccccagcagccgcctccgctgccggagagggggatccctgagctcctcaacctctccgtggatcctcaaggtaaagggaagaaaggatctgatcactctgccactattgctttgcaatcaccatttgcaatatacaatgctcattttgagctgggccttggtcaatcaatgatttccgctgataattcttatgctgatcaacactatggcctgctttctccttatccagtgggtgcaacgcctgggaggtcgtctgcttatacccactgaaataggcctaacagaaagcacccaattttatgtgaacgcttaagcaaatatgacgcccatcatgcgtacgggcgctgtgccccgtgccaaaagcagagagggaaaaataggctggtcaaaaggcagggaagccatatctccatgagtcacgccatcagcatgcactgcgtcgcccgcgaggctctggcggacgcttcctgaacacaaagaaagaatccagcgggaaggatgctggtggtggcagcaaggcaatgttcagcaaccccctcatgcgccaggtggcgtctccaagctcagagatccagcagtcagacctgggcaacccgagcagcgtgtccagcctgtcgggttcagaggtgtcaagcatgtacgaccatgaagacgcgggtcactgccacggcttggatcaccccttcttcacccggctcccgagcatcatggacggcggcgagcacggggtcatcgtcggcaaccccttcaagtgggcagcggcctctgaagtctgctgcgacctcctgaaagcatgactagaggggttaccggacggccaaacgctaggagctggtgactgctggcggtttccagctccgggtcaggggttgtccctccctccgtttggctcccggtaggcaaatcattcttggctgaaggcaacgtgagcgttccactcgtcccacctatttctcctggaaactctggctcctagtttctgggatcttgtggtgagtgcaacatcccttgcctaaaaaaacaaaaaaaaatcactagttgattgtactatctaccaacttctaaatggtttcaccttagctttctgaataataaagcctgaaacttcggactcgtctgaagtttcagaggtactggagttctgctatgtatggattctgttaagcgtcaagactaaggttctgttggtgatgaattgtagtgtgattggagcttgggtggtcttgattcctactttgtaatgtgctgaaagcttgtgctagagtaatgtattggaactggagcttggtttgtattttgctttttgtgccatggctttggagttgtggctttttgtgccaggaaggattctgtttatgaccggcctttgcagattagttcttgaactaaactgaatgggaactcagctaaaaactgagctgtttgaatgcttgttttgcagcgggtcacatgatcaaaagtgaaaaggcactgttgcttgt

SEQ ID NO: 3062 - DNA, 2495 bp, Zea Mays
cacttccttcctcatcaagactccctctttcctcctcgaccttgagcaatcctcgcgcgctgctccagcctccgctaaccagttttcaccctccaaatcccttttttccccacagtttcacttctttcttctttttcttcttctttctgcttctttgctgctgttggtggttattaacctaaagaattggtcctgcatcttgttcttgccacgacctgatacggtgcttgataattgttatgctcacctcactttatttatttttttcttttattttggtgctctttatcgtagcagctggtgcctggtggttcggttaggtgcttccctcgtcaacgtcagacgcccccacttccgccagcaacaacaccagcagcagcacgatgatgagcttcaggagcagcagccacgagggcttcggcttcggccacgccgccgccgcggccagcggagcgccgctgccgtggtgggcagggccggccccgatgctgagcggcgagccgctggccctgtcgccggaggcccactgccgggacggccgcatccaggccccccagggacctcccgtgccgtcggtcaaggctcctgtactggcaccccagcagccgcctccgctgccggagagggggatccctgagctcctcaacctctccgtggatcctcaaggtaaagggaagaaaggatctgatcactctgccactattgctttgcaatcaccatttgcaatatacaatgctcattttgagctgggccttggtcaatcaatgatttccgctgataattcttatgctgatcaacactatggcctgctttctccttatccagtgggtgcaacgcctgggaggtcgtctgcttatacccactgaaataggcctaacagaaagcacccaattttatgtgaacgcttaagcaaatatgacgcccatcatgcgtacgggcgctgtgccccgtgccaaaagcagagagggaaaaataggctggtcaaaaggcagggaaggtaccttgcactttctcaaactatcaaattgaacaccttaactgtcaccttctactggtgctagctatatcaccatgccttgcaacaaatcttctgttgtcttagttacatttatgttagtcagctgtctctatgagtcacgatctcaaatctagaactattaattgaactacttaactgtcacctatgactgaatgatgctatatgaccgtggcctgccctgcatcatatttttctgtcagtcctgcatttgttggcgcagccatatctcccatgaatcactctcactcatctcaaaactatgaactgaaaccctcaattgtcacctttttgactaaatgacgccgtcaccatgccatgcaacatatcttctgttgtcttctaccgctacatccatgttaccgccttcatgatgcagccatatctccatgagtcacgccatcagcatgcactgcgtcgcccgcgaggctctggcggacgcttcctgaacacaaagaaagaatccagcgggaaggatgctggtggtggcagcaaggcaatgttcagcaaccccctcatgcgccaggtggcgtctccaagctcagagatccagcagtcagacctgggcaacccgagcagcgtgtccagcctgtcgggttcagaggtgtcaagcatgtacgaccatgaagacgcgggtcactgccacggcttggatcaccccttcttcacccggctcccgagcatcatggacggcggcgagcacggggtcatcgtcggcaaccccttcaagtgggcagcggcctctgaagtctgctgcgacctcctgaaagcatgactagaggggttaccggacggccaaacgctaggagctggtgactgctggcggtttccagctccgggtcaggggttgtccctccctccgtttggctcccggtaggcaaatcattcttggctgaaggcaacgtgagcgttccactcgtcccacctatttctcctggaaactctggctcctagtttctgggatcttgtggtgagtgcaacatcccttgcctaaaaaaacaaaaaaaaatcactagttgattgtactatctaccaacttctaaatggtttcaccttagctttctgaataataaagcctgaaacttcggactcgtctgaagtttcagaggtactggagttctgctatgtatggattctgttaagcgtcaagactaaggttctgttggtgatgaattgtagtgtgattggagcttgggtggtcttgattcctactttgtaatgtgctgaaagcttgtgctagagtaatgtattggaactggagcttggtttgtattttgctttttgtgccatggctttggagttgtggctttttgtgccaggaaggattctgtttatgaccggcctttgcagattagttcttgaactaaactgaatgggaactcagctaaaaactgagctgtttgaatgcttgttttgcagcgggtcacatgatcaaaagtgaaaaggcactgttgcttgt

SEQ ID NO: 3063 - DNA, 1719 bp, Zea Mays
cgaaccatccctcacgccgcgtctctctcgctgcgtccctccgtagtctcctccctcaatcaacgcgtcctcgccttaccatgccaacctagccccggctctccatggaaggtgcgacctctgcacccaactctccagggaaggcatggtctactctccatggcctcccgcaatcaacggtctctcaccccaccacgacgaccctgccctggctccccatggaaggccatggaaggtgcgatcgagccccagctcaacatggaaggcgcgatccactctcctcgccccatcatcggcgtccactatccatcaaagagtcccgccttcccagtcccccttccccacagatggtcggtgaacccatcgccaccgtgccaacggggcccgaatccgtggccgaggccgaccgcctcctggcgctggctgagtcggagctctccgcgggcaggctccgagccacgcgcaggcacgccctccacgccgcccgcctgtacccgacctccccgcgcgccccggtagtggccaccaccgccaacgtgctcctcgccgacgcctcctcccaccacgccgcgctgctgctgcccgagcccgacgaccccgacgcctcaccgctcttcgcctccgagctccgccgccacttcaaatcgctcgtcaagtccctccgcgtcggcctcaacgccgccaccgcagccgcctacccctccgtcgccgccgccgccgaggaggcactcggccacgccaccgaggcctacgaggcgctcaccacccctacccctgggaccttctggaccgcctgcgccgggtgccgcctcctccacgagttcgagcgcaactctggaaattgttgatcaattaattgtgggggggggggaagtgtctctacttccttcccggttggtcaaggcggacaagcggtcgttggtctggtatccccttcctgtgtcctctctcctttgtgtagatggcgaattcgtggagtttgaagaatctgaatgttctcgcatatcactgtgcaagacagggatcacaaattcttgacaaaaacagtggaagaagcataccgaggagtcgattgcggtgacggaggtccatttggagtagttgtcgtccgcaatgatgaagtggtagttagctgccataacatggttctgaagcacactgaccctactgcgcatgctgaagtaactgcaatttgagaggttgcaaaaagttcgggaaaatcaagctctctgactgcgaaatttacgtgtcctgcgagccatgcccaatgtgctttggtgcagttcatctctcccgaatcaagaagctggtttatggggccaaggcggaggctgccatcgccattgacctgcaatgcactactctcttatgatcatgtgtgtactgccacattctgatatgagtactcaactttaaattaatcaatctactgtaagtcacaacttttggataaaatttcttcctagatgaaccacttccagagttccagatacttactcttaccgagatgggactgggcagaagagagttatccatgttaatttctaacaaatgatgaacatgcttattatttgcttgctcattatttgcttcctcggagttttttatatgtggactgtacaatgaaaacacaacctatcatgatgccaggtccctcatggatgtgttcattctcttgtaatctacgcaattctgttaaagttagtcgaaccattttct

SEQ ID NO: 3064 - DNA, 2284 bp, Zea Mays
cgaaccatccctcacgccgcgtctctctcgctgcgtccctccgtagtctcctccctcaatcaacgcgtcctcgccttaccatgccaacctagccccggctctccatggaaggtgcgacctctgcacccaactctccagggaaggcatggtctactctccatggcctcccgcaatcaacggtctctcaccccaccacgacgaccctgccctggctccccatggaaggccatggaaggtgcgatcgagccccagctcaacatggaaggcgcgatccactctcctcgccccatcatcggcgtccactatccatcaaagagtcccgccttcccagtcccccttccccacagatggtcggtgaacccatcgccaccgtgccaacggggcccgaatccgtggccgaggccgaccgcctcctggcgctggctgagtcggagctctccgcgggcaggctccgagccacgcgcaggcacgccctccacgccgcccgcctgtacccgacctccccgcgcgccccggtagtggccaccaccgccaacgtgctcctcgccgacgcctcctcccaccacgccgcgctgctgctgcccgagcccgacgaccccgacgcctcaccgctcttcgcctccgagctccgccgccacttcaaatcgctcgtcaagtccctccgcgtcggcctcaacgccgccaccgcagccgcctacccctccgtcgccgccgccgccgaggaggcactcggccacgccaccgaggcctacgaggcgctcaccacccctacccctgggaccttctggaccgcctgcgccgggtgccgcctcctccacgagttcgagcgcaagtatgtgggatactgagtgcaattaaggttcatcaagtgaaatttagatactgagtgcgatttcggtttcagctctggaaattgttgatcaattaattgtgggggggggggaagtgtctctacttccttcccggttggtcaaggcggacaagcggtcgttggtctggtatccccttcctgtgtcctctctcctttgtgtagatggcgaattcgtggagtttgaagaatctgaatgttctcgcatatcagtaagtctctgaaggtgtttcgtttctactagcatccaagagcgattactagatatgttgcagaaacaactcaaataataatgttcagttgacaacacaagtgcgcaaagatagcttgtcctcaaacctaagaaccatgatcgaggacaacgagttctttgatttttttgagaaaatgacagctaacaagttgatatatccaatcagccactgaagaacatacggtttgcaaaagttacagtggtaagaacggtgccacaacatccagacaatcaggttgccaacagctagataaagctgagatttgcaagttgactgttgtgttttaaccagtgactgagaagagttgcaaactgaataagaatgtacagttgacaaagcaagagcataagaaaataaggacgataagttcatctatccagtcaaacactgaagagcatacataattttgcaaaagttcaactgaaggcacaacactacagcacccaggcagctgtgcaagacagggatcacaaattcttgacaaaaacagtggaagaagcataccgaggagtcgattgcggtgacggaggtccatttggagtagttgtcgtccgcaatgatgaagtggtagttagctgccataacatggttctgaagcacactgaccctactgcgcatgctgaagtaactgcaatttgagaggttgcaaaaagttcgggaaaatcaagctctctgactgcgaaatttacgtgtcctgcgagccatgcccaatgtgctttggtgcagttcatctctcccgaatcaagaagctggtttatggggccaaggcggaggctgccatcgccattgacctgcaatgcactactctcttatgatcatgtgtgtactgccacattctgatatgagtactcaactttaaattaatcaatctactgtaagtcacaacttttggataaaatttcttcctagatgaaccacttccagagttccagatacttactcttaccgagatgggactgggcagaagagagttatccatgttaatttctaacaaatgatgaacatgcttattatttgcttgctcattatttgcttcctcggagttttttatatgtggactgtacaatgaaaacacaacctatcatgatgccaggtccctcatggatgtgttcattctcttgtaatctacgcaattctgttaaagttagtcgaaccattttct

SEQ ID NO: 3065 - DNA, 2640 bp, Zea Mays
cgaaccatccctcacgccgcgtctctctcgctgcgtccctccgtagtctcctccctcaatcaacgcgtcctcgccttaccatgccaacctagccccggctctccatggaaggtgcgacctctgcacccaactctccagggaaggcatggtctactctccatggcctcccgcaatcaacggtctctcaccccaccacgacgaccctgccctggctccccatggaaggccatggaaggtgcgatcgagccccagctcaacatggaaggcgcgatccactctcctcgccccatcatcggcgtccactatccatcaaagagtcccgccttcccagtcccccttccccacagatggtcggtgaacccatcgccaccgtgccaacggggcccgaatccgtggccgaggccgaccgcctcctggcgctggctgagtcggagctctccgcgggcaggctccgagccacgcgcaggcacgccctccacgccgcccgcctgtacccgacctccccgcgcgccccggtagtggccaccaccgccaacgtgctcctcgccgacgcctcctcccaccacgccgcgctgctgctgcccgagcccgacgaccccgacgcctcaccgctcttcgcctccgagctccgccgccacttcaaatcgctcgtcaagtccctccgcgtcggcctcaacgccgccaccgcagccgcctacccctccgtcgccgccgccgccgaggaggcactcggccacgccaccgaggcctacgaggcgctcaccacccctacccctgggaccttctggaccgcctgcgccgggtgccgcctcctccacgagttcgagcgcaagtatgtgggatactgagtgcaattaaggttcatcaagtgaaatttagatactgagtgcgatttcggtttcagctctggaaattgttgatcaattaattgtgggggggggggaagtgtctctacttccttcccggttggtcaaggcggacaagcggtcgttggtctggtatccccttcctgtgtcctctctcctttgtgtagatggcgaattcgtggagtttgaagaatctgaatgttctcgcatatcagtaagtctctgaaggtgtttcgtttctactagcatccaagagcgattactagatatgttgcagaaacaactcaaataataatgttcagttgacaacacaagtgcgcaaagatagcttgtcctcaaacctaagaaccatgatcgaggacaacgagttctttgatttttttgagaaaatgacagctaacaagttgatatatccaatcagccactgaagaacatacggtttgcaaaagttacagtggtaagaacggtgccacaacatccagacaatcaggttgccaacagctagataaagctgagatttgcaagttgactgttgtgttttaaccagtgactgagaagagttgcaaactgaataagaatgtacagttgacaaagcaagagcataagaaaataaggacgataagttcatctatccagtcaaacactgaagagcatacataattttgcaaaagttcaactgaaggcacaacactacagcacccaggcaggttgccaacagttaggcagagcagaaatatgcaagtttgaccatttgcaatccacaactgagaattacatacacaacatataagttgatggttttagcagagcagccttctcataatatttcttgtgcatgtagctgatgactgcctacctacccactgctatatcacaaccaaacgacaaggccgtgtgttttggcgtgtcccatgttaggttttgccaaaaccgaaatctagaaatccacagggataatatagtatacactccaggcggaatcatgttaggaaagaacatcggctgatgcgggatagtatagtatacactccaggctattcagataaatttccctaaccatttactgtgcaagacagggatcacaaattcttgacaaaaacagtggaagaagcataccgaggagtcgattgcggtgacggaggtccatttggagtagttgtcgtccgcaatgatgaagtggtagttagctgccataacatggttctgaagcacactgaccctactgcgcatgctgaagtaactgcaatttgagaggttgcaaaaagttcgggaaaatcaagctctctgactgcgaaatttacgtgtcctgcgagccatgcccaatgtgctttggtgcagttcatctctcccgaatcaagaagctggtttatggggccaaggcggaggctgccatcgccattgacctgcaatgcactactctcttatgatcatgtgtgtactgccacattctgatatgagtactcaactttaaattaatcaatctactgtaagtcacaacttttggataaaatttcttcctagatgaaccacttccagagttccagatacttactcttaccgagatgggactgggcagaagagagttatccatgttaatttctaacaaatgatgaacatgcttattatttgcttgctcattatttgcttcctcggagttttttatatgtggactgtacaatgaaaacacaacctatcatgatgccaggtccctcatggatgtgttcattctcttgtaatctacgcaattctgttaaagttagtcgaaccattttct

SEQ ID NO: 3066 - DNA, 822 bp, Zea Mays
cgaaccatccctcacgccgcgtctctctcgctgcgtccctccgtagtctcctccctcaatcaacgcgtcctcgccttaccatgccaacctagccccggctctccatggaagctgtgcaagacagggatcacaaattcttgacaaaaacagtggaagaagcataccgaggagtcgattgcggtgacggaggtccatttggagtagttgtcgtccgcaatgatgaagtggtagttagctgccataacatggttctgaagcacactgaccctactgcgcatgctgaagtaactgcaatttgagaggttgcaaaaagttcgggaaaatcaagctctctgactgcgaaatttacgtgtcctgcgagccatgcccaatgtgctttggtgcagttcatctctcccgaatcaagaagctggtttatggggccaaggcggaggctgccatcgccattgacctgcaatgcactactctcttatgatcatgtgtgtactgccacattctgatatgagtactcaactttaaattaatcaatctactgtaagtcacaacttttggataaaatttcttcctagatgaaccacttccagagttccagatacttactcttaccgagatgggactgggcagaagagagttatccatgttaatttctaacaaatgatgaacatgcttattatttgcttgctcattatttgcttcctcggagttttttatatgtggactgtacaatgaaaacacaacctatcatgatgccaggtccctcatggatgtgttcattctcttgtaatctacgcaattctgttaaagttagtcgaaccattttct

SEQ ID NO: 3067 - DNA, 835 bp, Zea Mays
gtacagttgacaaagcaagagcataagaaaataaggacgataagttcatctatccagtcaaacactgaagagcatacataattttgcaaaagttcaactgaaggcacaacactacagcacccagctgtgcaagacagggatcacaaattcttgacaaaaacagtggaagaagcataccgaggagtcgattgcggtgacggaggtccatttggagtagttgtcgtccgcaatgatgaagtggtagttagctgccataacatggttctgaagcacactgaccctactgcgcatgctgaagtaactgcaatttgagaggttgcaaaaagttcgggaaaatcaagctctctgactgcgaaatttacgtgtcctgcgagccatgcccaatgtgctttggtgcagttcatctctcccgaatcaagaagctggtttatggggccaaggcggaggctgccatcgccattgacctgcaatgcactactctcttatgatcatgtgtgtactgccacattctgatatgagtactcaactttaaattaatcaatctactgtaagtcacaacttttggataaaatttcttcctagatgaaccacttccagagttccagatacttactcttaccgagatgggactgggcagaagagagttatccatgttaatttctaacaaatgatgaacatgcttattatttgcttgctcattatttgcttcctcggagttttttatatgtggactgtacaatgaaaacacaacctatcatgatgccaggtccctcatggatgtgttcattctcttgtaatctacgcaattctgttaaagttagtcgaaccattttct

SEQ ID NO: 3068 - DNA, 738 bp, Zea Mays
acaaaaagatctaaaatacagaaaaaaaaagttgtccggaacctacgaggaaggcttaggcgttttcctcgttcgctcgccgcggcgtcggacgatgcctctggggctgacgctggggtcgctggggcgggctatgcggcagaagcggccgtcctcgctcgacatcctctcctccaagcgggcgccgcgggactactacaagggcaagaactgcaagcccaccgggttccacacgcgcaaaggcggatacgtggttgtcgatgaaaagctgccaaggttcgcagttcctgacaatgactcatttcaaggacgaggttgaggtccagtcctcgccatgaaccggatgccatgtgtgggcgattgcagctgaagccgttcgtgtcgcagtgcaccagggacctcgcagcgtcgacgacatcctcggcctctctaacttcagcacagactactgagagcaggagctgattgtcatcggactgctctagccatttgcaggaagcgagcgaccaagccttgcagtattgcggctacgttttcctggagagtgcccgtgttcagaggattagtcattagtgtcggcgtcttagcagctacaggtggtcatttcagatgtatttttctctctctctctctttatcttgtgtaagggcaaacatgtggcgtaaggccctgtcggccctgtctgttttcttccagaattatataatctaacttatagattacataagcatctaatga

SEQ ID NO: 3069 - DNA, 1140 bp, Zea Mays
ggatgatgatggtggtggatacaggatacatgtacggcggcgacagcagccatacaaaaaaaaagagctcaaatgcagagcctaattaccaacatgtcacccagcagcgtcagactgactaatcaacatgcttaccgatccatcagattacaatgcgaatgcaaatgtttgttcctacatgagatacacggtgctggaaggggtgttccgttccggcctcagatgcacttcacgttgagtgcccgttgttcacgttgttcacgggctggctgctctcctcgcttccgcctttgtcggcagcggtgttctctagtggagcggcgtctggctcggctccaggcgcggcatcagtggcggcagcatctgccttggtcccgggtgctggatcagcggcggcagcatctgatttgatttcaggcgctggggcgagaacagcagcaggctcggcaactgattcggtctcaggcactggggcaggaacagcagcaggctcggcaggagcaggggctgagttctcagttgggttgcttactggagctggagccacagcttcaggctcatctggcttggcatcttctttcttctcctccgattgcgcaagaggagctacaacagcttcagctggtttctcagtttctttctcatcttcttccattggcgccggagcaggagtatcgtccgccttgtctgcagccttctcagcgtcatcagtttcagtaggagcttccttcgcctcttcagcaggcttcatctccacgtcagtctcctttgtgccatcttcacttggggcgtcctggccggtttcagcatctttggcttcttcagtttcaggggcttccttctttccctgcctacccttcctaccactggagttcctgctgcgtttcgggatcttctcgccctctgggctatcaaaaaccttgactttctcgctaatgcgagcagaacgccttggggtatcacctgtttgcaaagccagttccccaatcaaaatctgaagcagcagggcctccagggtgtgcctttaggtattggcttagttgcctcttgttcttaatttcctcgccagttggcgaaacaaaaacaatctcggatcttccccctctctggggagtaaactgtaacattgaaaaagaagga

SEQ ID NO: 3070 - DNA, 556 bp, Zea Mays
caatagatcatccttttcatggatggcactgattagcttattaagtttttccttttgttgcatgtttaggtcggcaaaaagggtacgtaaattattttcctcatcactagcattgtcatcactagaggattcatatttagtggaggatttagatttaaccttcttccttttgccgtcttttgccatgaggcacttgtggccgacgttggggaagaggagtcccttggtgacggcgatgttggcggcgtcctcgtcggaggaggaggagtcggtggagctctcgtcggagtcccacacgcggcacgtgtgggcatcgccgcccttcctcttgtgttaatcgcagtattcacgaggcaaaaagttcgcccagtggcagctaagtcttgagaacatatatgcttcgtagatatggcttcgatgtggttcccttgtagttcagtcagaagttcaccaactgctcgacgatcaactagatgatttgtcgaacctggcgctatttggtgaaagagatttgaataaggatagatccagatatttatttgaatgctaacatttt

SEQ ID NO: 3071 - DNA, 1178 bp, Zea Mays
caatcatggggcatttcccctctctccagcacattgctgcttccacagttccacacacataaggccaccacagcaaataaaggcactgctgcactctctctctctctctctctctctctctctctctacgcgaaaagaaaagaggaaagtgggatagctcaatctctccttccaccgtctctcagttctcactctagcgctctctctctccacatatatatcagtaggatggatgtgcaaacctagcttgttgctgcctttctagctgagaactgagctgtagctgttggtgagtgtcccggggaacagcatgctcagcatggtgacagttcggtgtgggcactgcacaaatctactgtcagtgaatctgagagcactcatgcactcagtcccagaacaagatcagctccagcaggagaacatcagggtccatggcacgttgcgtgagcatcatcagtgcggcggcggccaccatctggagctgggctcttcgtcgtcctcaaggttccggctgccgatgatgatgtcgtacgcgccgcagaacgagcacttgctgcaggaacagacactgaacaacgctcgtccggctcctgagaagaggcagcgggttccgtcggcgtataacagattcatcaaggaagagattcgcaggatcaaggcgaacaaccccgacattagccacagggaagccttcagcacagcagccaagaactgggcacattatccgaacatccatttcggcttaaactccggccgagagggtggcaagaataagctcgtggacgaggctgtcgcggcggtggcggtggctccgaagaagatccaaggtttctactgatcgatgccggtcgatcgagggatcagcgctcgtcgtcatcaactggccggccgggtgtggaagaattaataataccacacaaattataaatgtactgtgatgagtaaattaaagagttatagtggggaatgaagggagagagagatatatagcaatacgtatattaccttaccttattaatgagtgcaaaaaaaacacttgtgaaggtttctactgatgcatgagtgggaagtgaagcatcatacaatcacatgaattatattactactggcatggtgggcgccatgcatggtttaaattaaccgagaagacgacttaataaatcattatttgacctacc

SEQ ID NO: 3072 - DNA, 1140 bp, Zea Mays
aggtgagagccatgatttagcctggactatatacttatcagattgtgtatgggatactgatactcccaggagagagagaaaaggcatgggaaacaagcaagagaacaaaagcgatgggcacgcaggtgttaggaaagtgagaaaccatcagcagggcagcaatagttacaggcgtgtctgataaaagtcatgtgatggaccagcagcgcgcggcagcttgttcatgctgcagcgctggtagctagctgcttaaagtgagtgtcccggggaacagcatgctcagcatggtgacagttcggtgtgggcactgcacaaatctactgtcagtgaatctgagagcactcatgcactcagtcccagaacaagatcagctccaggagaacatcagggtccatggcacgttgcgtgagcatcatcagtgcggcggcggccaccatctggagctgggctcttcgtcgtcctcaaggttccggctgccgatgatgatgtcgtacgcgccgcagaacgagcacttgctgcaggaacagacactgaacaacgctcgtccggctcctgagaagaggcagcgggttccgtcggcgtataacagattcatcaaggaagagattcgcaggatcaaggcgaacaaccccgacattagccacagggaagccttcagcacagcagccaagaactgggcacattatccgaacatccatttcggcttaaactccggccgagagggtggcaagaataagctcgtggacgaggctgtcgcggcggtggcggtggctccgaagaagatccaaggtttctactgatcgatgccggtcgatcgagggatcagcgctcgtcgtcatcaactggccggccgggtgtggaagaattaataataccacacaaattataaatgtactgtgatgagtaaattaaagagttatagtggggaatgaagggagagagagatatatagcaatacgtatattaccttaccttattaatgagtgcaaaaaaaacacttgtgaaggtttctactgatgcatgagtgggaagtgaagcatcatacaatcacatgaattatattactactggcatggtgggcgccatgcatggtttaaattaaccgagaagacgacttaataaatcattatttgacctacc

SEQ ID NO: 3073 - DNA, 862 bp, Zea Mays
gtgagaaatactgacgacgacaacaaaagtgagtgtcccggggaacagcatgctcagcatggtgacagttcggtgtgggcactgcacaaatctactgtcagtgaatctgagagcactcatgcactcagtcccagaacaagatcagctccaggagaacatcagggtccatggcacgttgcgtgagcatcatcagtgcggcggcggccaccatctggagctgggctcttcgtcgtcctcaaggttccggctgccgatgatgatgtcgtacgcgccgcagaacgagcacttgctgcaggaacagacactgaacaacgctcgtcggaagagattcgcaggatcaaggcgaacaaccccgacattagccacagggaagccttcagcacagcagccaagaactgggcacattatccgaacatccatttcggcttaaactccggccgagagggtggcaagaataagctcgtggacgaggctgtcgcggcggtggcggtggctccgaagaagatccaaggtttctactgatcgatgccggtcgatcgagggatcagcgctcgtcgtcatcaactggccggccgggtgtggaagaattaataataccacacaaattataaatgtactgtgatgagtaaattaaagagttatagtggggaatgaagggagagagagatatatagcaatacgtatattaccttaccttattaatgagtgcaaaaaaaacacttgtgaaggtttctactgatgcatgagtgggaagtgaagcatcatacaatcacatgaattatattactactggcatggtgggcgccatgcatggtttaaattaaccgagaagacgacttaataaatcattatttgacctacc

SEQ ID NO: 3074 - DNA, 895 bp, Zea Mays
acaaaagtgagtgtcccggggaacagcatgctcagcatggtgacagttcggtgtgggcactgcacaaatctactgtcagtgaatctgagagcactcatgcactcagtcccagaacaagatcagctccagcaggagaacatcagggtccatggcacgttgcgtgagcatcatcagtgcggcggcggccaccatctggagctgggctcttcgtcgtcctcaaggttccggctgccgatgatgatgtcgtacgcgccgcagaacgagcacttgctgcaggaacagacactgaacaacgctcgtccggctcctgagaagaggcagcgggttccgtcggcgtataacagattcatcaaggaagagattcgcaggatcaaggcgaacaaccccgacattagccacagggaagccttcagcacagcagccaagaactgggcacattatccgaacatccatttcggcttaaactccggccgagagggtggcaagaataagctcgtggacgaggctgtcgcggcggtggcggtggctccgaagaagatccaaggtttctactgatcgatgccggtcgatcgagggatcagcgctcgtcgtcatcaactggccggccgggtgtggaagaattaataataccacacaaattataaatgtactgtgatgagtaaattaaagagttatagtggggaatgaagggagagagagatatatagcaatacgtatattaccttaccttattaatgagtgcaaaaaaaacacttgtgaaggtttctactgatgcatgagtgggaagtgaagcatcatacaatcacatgaattatattactactggcatggtgggcgccatgcatggtttaaattaaccgagaagacgacttaataaatcattatttgacctacc

SEQ ID NO: 3075 - DNA, 2412 bp, Zea Mays
cccgctcccggaagcttcaagaaggtggacggtcggagggacgggctacatgggtggctgcttctggtagcttcggtcgcccgccgcgccgccgccaggctgagtggaaggtagggggaagcaaggaaccagagggtgtgatgtggatgtagaggattggatgctataatggcgcaagctgctgtcgagcccgctttgaatggtggctctttgattgggaggcagccggtggttccaaggatgaagaggaagacaccgtctgaactgaggggtgagcaactgaagcggcgtacctctgaaaagcttggagatgatctgttaccttctgccacattggataggtcaaacaatggacttcggaacacagagcaacaaaagatttccaagtacatcaacacacgtgttacagaggtgttccctgtgagaaaagcaagaaaccttgggaaggaaaattccaaggatgtcttacagaataatgagaaggtttctaagtttgttaatggtacaccagcctcaaattttgcatcatcttcacttctatgtggtcatggtgacactgctaagttggacactttagttccaaccatggaggctgcaaagccaggtttcaagaaagttgagaaatgcagtgaaaatgctctgcggagtgtatctgagcttcatgtaggcgatgagaagcagactggttctaacaaatttgatatggaaaaggtactgaaagggtttggagctcgtgatgcttttgtggcttctgggctcaacggccctaatggacaagttggtggtactgtgtcgaagccttcagacatatgcccttctaagatcactgttcctggggaaaaagctcctctggattttaccttaaagactagtttgcagtttgtttcatcgtcatctgtgaagtggtgtcacaagctcaatacaagttttggcagaagtagcatcactggagccattggtcagagctgtcctcgtgggtgtcaaaatttagagtgctcaaagcttgagagcaaaaaggaatttctattctcaaaggctttacagtcatgggtatatccacaatcgctgttgccttcctctatcatatctgctatgctctcatcaactgcaggagaaagtgattttcttctcaaaagacatcaggactgggaagattcatttcagaatctttactacatgctccggaagaacatgttgaatatattctatgtttatacaacacaatttgttgctctcttcattagtggaagctgtttggagaaaaagcagtctagtaatgcctacttatcacaatctacacgtggcctacgctcattactacggaaacatggcgtttgcttttctatgcctctttgcagcactgaagtggagcaggctactgaggacgaccttattgaactttcagaaatcgaaaggcgcaatgtcggacaggcactccatttggatgctttatctgacgtggataacaccacgcagtcgctgctttcgtttactggcaacgagaacgttcatggcctatacgacgttctattgaattacaagtccttgctgaattcattatctgctgtggatgtcccagtcttgtattcaccccagccatttcaaaatggctgtctacacatcccagaggtgaagtgtagggagatgaggagagcagacatgtcatccggcgggttcgacacagaacagggatccgcatttgcgtcgacggcaggcaacgtatgctacagcatggaagtaaaggacgcggttctgccgccatgggtggtctctgggctgtgcgccgccatgagcttggacgcgaccagctttgatctgacgatcgccacggagccgtcgtcgatgggcttgaacgtggctctcgactccatgggcaccaccaccacggatgtccagcctgaaggatccaccccctccagctgctctgcgcccacgacgcccttggtgggtgccgttcctgacgcggccctcgtccctgccctgcactccgcctcgctgcgccgcctcacctacacggacggcggcgggtacgttgcgcacacaaccgtgtgagcgcctctgagcttgagagcccggccctcctcggtatgcgcagcgcagcgcaggcttgttcttttgagaatttggagcctgccctggcctttgtcgtacaaggacgacgtgtcgttacacgcttggttgggttggatggtaactaaactatgaggccagacttcttctggtggtctggaaaaggaacacttatgcttgaactcggtgtgtgctttttgcctggtcgtactgtcgttcaaagttgggaccgttcttaccttgccgtgacaccgcctgttggtgtgagctcctgctgtttgaattctgaagacaaccatcaccgttctgcggttgacagaggacggtttcttgattcttttt

SEQ ID NO: 3076 - DNA, 2393 bp, Zea Mays
ctcccggaagcttcaagaaggtggacggtcggagggacgggctacatgggtggctgcttctggtagcttcggtcgcccgccgcgccgccgccaggctgagtggaaggtagggggaagcaaggaaccagagggtgtgatgtggatgtagaggattggatgctataatggcgcaagctgctgtcgagcccgctttgaatggtggctctttgattgggaggcagccggtggttccaaggatgaagaggaagacaccgtctgaactgaggcggcgtacctctgaaaagcttggagatgatctgttaccttctgccacattggataggtcaaacaatggacttcggaacacagagcaacaaaagatttccaagtacatcaacacacgtgttacagaggtgttccctgtgagaaaagcaagaaaccttgggaaggaaaattccaaggatgtcttacagaataatgagaaggtttctaagtttgttaatggtacaccagcctcaaattttgcatcatcttcacttctatgtggtcatggtgacactgctaagttggacactttagttccaaccatggaggctgcaaagccaggtttcaagaaagttgagaaatgcagtgaaaatgctctgcggagtgtatctgagcttcatgtaggcgatgagaagcagactggttctaacaaatttgatatggaaaaggtactgaaagggtttggagctcgtgatgcttttgtggcttctgggctcaacggccctaatggacaagttggtggtactgtgtcgaagccttcagacatatgcccttctaagatcactgttcctggggaaaaagctcctctggattttaccttaaagactagtttgcagtttgtttcatcgtcatctgtgaagtggtgtcacaagctcaatacaagttttggcagaagtagcatcactggagccattggtcagagctgtcctcgtgggtgtcaaaatttagagtgctcaaagcttgagagcaaaaaggaatttctattctcaaaggctttacagtcatgggtatatccacaatcgctgttgccttcctctatcatatctgctatgctctcatcaactgcaggagaaagtgattttcttctcaaaagacatcaggactgggaagattcatttcagaatctttactacatgctccggaagaacatgttgaatatattctatgtttatacaacacaatttgttgctctcttcattagtggaagctgtttggagaaaaagcagtctagtaatgcctacttatcacaatctacacgtggcctacgctcattactacggaaacatggcgtttgcttttctatgcctctttgcagcactgaagtggagcaggctactgaggacgaccttattgaactttcagaaatcgaaaggcgcaatgtcggacaggcactccatttggatgctttatctgacgtggataacaccacgcagtcgctgctttcgtttactggcaacgagaacgttcatggcctatacgacgttctattgaattacaagtccttgctgaattcattatctgctgtggatgtcccagtcttgtattcaccccagccatttcaaaatggctgtctacacatcccagaggtgaagtgtagggagatgaggagagcagacatgtcatccggcgggttcgacacagaacagggatccgcatttgcgtcgacggcaggcaacgtatgctacagcatggaagtaaaggacgcggttctgccgccatgggtggtctctgggctgtgcgccgccatgagcttggacgcgaccagctttgatctgacgatcgccacggagccgtcgtcgatgggcttgaacgtggctctcgactccatgggcaccaccaccacggatgtccagcctgaaggatccaccccctccagctgctctgcgcccacgacgcccttggtgggtgccgttcctgacgcggccctcgtccctgccctgcactccgcctcgctgcgccgcctcacctacacggacggcggcgggtacgttgcgcacacaaccgtgtgagcgcctctgagcttgagagcccggccctcctcggtatgcgcagcgcagcgcaggcttgttcttttgagaatttggagcctgccctggcctttgtcgtacaaggacgacgtgtcgttacacgcttggttgggttggatggtaactaaactatgaggccagacttcttctggtggtctggaaaaggaacacttatgcttgaactcggtgtgtgctttttgcctggtcgtactgtcgttcaaagttgggaccgttcttaccttgccgtgacaccgcctgttggtgtgagctcctgctgtttgaattctgaagacaaccatcaccgttctgcggttgacagaggacggtttcttgattcttttt

SEQ ID NO: 3077 - DNA, 2405 bp, Zea Mays
ctcccggaagcttcaagaaggtggacggtcggagggacgggctacatgggtggctgcttctggtagcttcggtcgcccgccgcgccgccgccaggctgagtggaaggtagggggaagcaaggaaccagagggtgtgatgtggatgtagaggattggatgctataatggcgcaagctgctgtcgagcccgctttgaatggtggctctttgattgggaggcagccggtggttccaaggatgaagaggaagacaccgtctgaactgaggggtgagcaactgaagcggcgtacctctgaaaagcttggagatgatctgttaccttctgccacattggataggtcaaacaatggacttcggaacacagagcaacaaaagatttccaagtacatcaacacacgtgttacagaggtgttccctgtgagaaaagcaagaaaccttgggaaggaaaattccaaggatgtcttacagaataatgagaaggtttctaagtttgttaatggtacaccagcctcaaattttgcatcatcttcacttctatgtggtcatggtgacactgctaagttggacactttagttccaaccatggaggctgcaaagccaggtttcaagaaagttgagaaatgcagtgaaaatgctctgcggagtgtatctgagcttcatgtaggcgatgagaagcagactggttctaacaaatttgatatggtactgaaagggtttggagctcgtgatgcttttgtggcttctgggctcaacggccctaatggacaagttggtggtactgtgtcgaagccttcagacatatgcccttctaagatcactgttcctggggaaaaagctcctctggattttaccttaaagactagtttgcagtttgtttcatcgtcatctgtgaagtggtgtcacaagctcaatacaagttttggcagaagtagcatcactggagccattggtcagagctgtcctcgtgggtgtcaaaatttagagtgctcaaagcttgagagcaaaaaggaatttctattctcaaaggctttacagtcatgggtatatccacaatcgctgttgccttcctctatcatatctgctatgctctcatcaactgcaggaggtgaaagtgattttcttctcaaaagacatcaggactgggaagattcatttcagaatctttactacatgctccggaagaacatgttgaatatattctatgtttatacaacacaatttgttgctctcttcattagtggaagctgtttggagaaaaagcagtctagtaatgcctacttatcacaatctacacgtggcctacgctcattactacggaaacatggcgtttgcttttctatgcctctttgcagcactgaagtggagcaggctactgaggacgaccttattgaactttcagaaatcgaaaggcgcaatgtcggacaggcactccatttggatgctttatctgacgtggataacaccacgcagtcgctgctttcgtttactggcaacgagaacgttcatggcctatacgacgttctattgaattacaagtccttgctgaattcattatctgctgtggatgtcccagtcttgtattcaccccagccatttcaaaatggctgtctacacatcccagaggtgaagtgtagggagatgaggagagcagacatgtcatccggcgggttcgacacagaacagggatccgcatttgcgtcgacggcaggcaacgtatgctacagcatggaagtaaaggacgcggttctgccgccatgggtggtctctgggctgtgcgccgccatgagcttggacgcgaccagctttgatctgacgatcgccacggagccgtcgtcgatgggcttgaacgtggctctcgactccatgggcaccaccaccacggatgtccagcctgaaggatccaccccctccagctgctctgcgcccacgacgcccttggtgggtgccgttcctgacgcggccctcgtccctgccctgcactccgcctcgctgcgccgcctcacctacacggacggcggcgggtacgttgcgcacacaaccgtgtgagcgcctctgagcttgagagcccggccctcctcggtatgcgcagcgcagcgcaggcttgttcttttgagaatttggagcctgccctggcctttgtcgtacaaggacgacgtgtcgttacacgcttggttgggttggatggtaactaaactatgaggccagacttcttctggtggtctggaaaaggaacacttatgcttgaactcggtgtgtgctttttgcctggtcgtactgtcgttcaaagttgggaccgttcttaccttgccgtgacaccgcctgttggtgtgagctcctgctgtttgaattctgaagacaaccatcaccgttctgcggttgacagaggacggtttcttgattcttttt

SEQ ID NO: 3078 - DNA, 2396 bp, Zea Mays
ctcccggaagcttcaagaaggtggacggtcggagggacgggctacatgggtggctgcttctggtagcttcggtcgcccgccgcgccgccgccaggctgagtggaaggtagggggaagcaaggaaccagagggtgtgatgtggatgtagaggattggatgctataatggcgcaagctgctgtcgagcccgctttgaatggtggctctttgattgggaggcagccggtggttccaaggatgaagaggaagacaccgtctgaactgaggggtgagcaactgaagcggcgtacctctgaaaagcttggagatgatctgttaccttctgccacattggataggtcaaacaatggacttcggaacacagagcaacaaaagatttccaagtacatcaacacacgtgttacagaggtgttccctgtgagaaaagcaagaaaccttgggaaggaaaattccaagaataatgagaaggtttctaagtttgttaatggtacaccagcctcaaattttgcatcatcttcacttctatgtggtcatggtgacactgctaagttggacactttagttccaaccatggaggctgcaaagccaggtttcaagaaagttgagaaatgcagtgaaaatgctctgcggagtgtatctgagcttcatgtaggcgatgagaagcagactggttctaacaaatttgatatggaaaaggtactgaaagggtttggagctcgtgatgcttttgtggcttctgggctcaacggccctaatggacaagttggtggtactgtgtcgaagccttcagacatatgcccttctaagatcactgttcctggggaaaaagctcctctggattttaccttaaagactagtttgcagtttgtttcatcgtcatctgtgaagtggtgtcacaagctcaatacaagttttggcagaagtagcatcactggagccattggtcagagctgtcctcgtgggtgtcaaaatttagagtgctcaaagcttgagagcaaaaaggaatttctattctcaaaggctttacagtcatgggtatatccacaatcgctgttgccttcctctatcatatctgctatgctctcatcaactgcaggagaaagtgattttcttctcaaaagacatcaggactgggaagattcatttcagaatctttactacatgctccggaagaacatgttgaatatattctatgtttatacaacacaatttgttgctctcttcattagtggaagctgtttggagaaaaagcagtctagtaatgcctacttatcacaatctacacgtggcctacgctcattactacggaaacatggcgtttgcttttctatgcctctttgcagcactgaagtggagcaggctactgaggacgaccttattgaactttcagaaatcgaaaggcgcaatgtcggacaggcactccatttggatgctttatctgacgtggataacaccacgcagtcgctgctttcgtttactggcaacgagaacgttcatggcctatacgacgttctattgaattacaagtccttgctgaattcattatctgctgtggatgtcccagtcttgtattcaccccagccatttcaaaatggctgtctacacatcccagaggtgaagtgtagggagatgaggagagcagacatgtcatccggcgggttcgacacagaacagggatccgcatttgcgtcgacggcaggcaacgtatgctacagcatggaagtaaaggacgcggttctgccgccatgggtggtctctgggctgtgcgccgccatgagcttggacgcgaccagctttgatctgacgatcgccacggagccgtcgtcgatgggcttgaacgtggctctcgactccatgggcaccaccaccacggatgtccagcctgaaggatccaccccctccagctgctctgcgcccacgacgcccttggtgggtgccgttcctgacgcggccctcgtccctgccctgcactccgcctcgctgcgccgcctcacctacacggacggcggcgggtacgttgcgcacacaaccgtgtgagcgcctctgagcttgagagcccggccctcctcggtatgcgcagcgcagcgcaggcttgttcttttgagaatttggagcctgccctggcctttgtcgtacaaggacgacgtgtcgttacacgcttggttgggttggatggtaactaaactatgaggccagacttcttctggtggtctggaaaaggaacacttatgcttgaactcggtgtgtgctttttgcctggtcgtactgtcgttcaaagttgggaccgttcttaccttgccgtgacaccgcctgttggtgtgagctcctgctgtttgaattctgaagacaaccatcaccgttctgcggttgacagaggacggtttcttgattcttttt

SEQ ID NO: 3079 - DNA, 1672 bp, Zea Mays
cggaagcttcaagaaggtggacggtcggagggacgggctacatgggtggctgcttctggtagcttcggtcgcccgccgcgccgccgccaggctgagtggaaggtagggggaagcaaggaaccagagggtgtgatgtggatgtagaggattggatgctataatggcgcaagctgctgtcgagcccgctttgaatggtggctctttgattgggaggcagccggtggttccaaggatgaagaggaagacaccgtctgaactgaggggtgagcaactgaagcggcgtacctctgaaaagcttggagatgatctgttaccttctgccacattggataggtcaaacaatggacttcggaacacagagcaacaaaagatttccaagtacatcaacacacgtgttacagaggtgttccctgtgagaaaagcaagaaaccttgggaaggaaaattccaaggatgtcttacagaataatgagaaggtttctaagtttgttaatggtacaccagcctcaaattttgcatcatcttcacttctatgtggtcatggtgacactgctaagttggacactttagttccaaccatggaggctgcaaagccaggtttcaagaaagttgagaaatgcagtgaaaatgctctgcggagtgtatctgagcttcatgtaggcgatgagaagcagactggttctaacaaatttgatatggaaaaggtactgaaagggtttggagctcgtgatgcttttgtggcttctgggctcaacggccctaatggacaagttggtggtactgtgtcgaagccttcagacatatgcccttctaagatcactgttcctggggaaaaagctcctctggattttaccttaaagactagtttgcagtttgtttcatcgtcatctgtgaagtggtgtcacaagctcaatacaagttttggcagaagtagcatcactggagccattggtcagagctgtcctcgtgggtgtcaaaatttagagtgctcaaagcttgagagcaaaaaggaatttctattctcaaaggctttacagtcatgggtatatccacaatcgctgttgccttcctctatcatatctgctatgctctcatcaactgcaggagaaagtgattttcttctcaaaagacatcaggactgggaagattcatttcagaatctttactacatgctccggaagaacatgttgaatatattctatgtttatacaacacaatttgttgctctcttcattagtggaagctgtttggagaaaaagcagtctagtaatgcctacttatcacaatctacacgtggcctacgctcattactacggaaacatggcgtttgcttttctatgcctctttgcagcactgaagtggagcaggctactgaggacgaccttattgaactttcagaaatcgaaaggcgcaatgtcggacaggcactccatttggatgctttatctgacgtggataacaccacgcagtcgctgctttcgtttactggcaacgagaacgttcatggcctatacgacgttctattgaattacaagtccttgctgaattcattatctgctgtggatgtcccagtcttgtattcaccccagccatttcaaaatggctgtctacacatcccagagaaaggggaccatgttagtgcgacatgttagaaatgcaaactggtgcatgtg

SEQ ID NO: 3080 - DNA, 2413 bp, Zea Mays
cggaagcttcaagaaggtggacggtcggagggacgggctacatgggtggctgcttctggtagcttcggtcgcccgccgcgccgccgccaggctgagtggaaggtagggggaagcaaggaaccagagggtgtgatgtggatgtagaggattggatgctataatggcgcaagctgctgtcgagcccgctttgaatggtggctctttgattgggaggcagccggtggttccaaggatgaagaggaagacaccgtctgaactgaggggtgagcaactgaagcggcgtacctctgaaaagcttggagatgatctgttaccttctgccacattggataggtcaaacaatggacttcggaacacagagcaacaaaagatttccaagtacatcaacacacgtgttacagaggtgttccctgtgagaaaagcaagaaaccttgggaaggaaaattccaaggatgtcttacagaataatgagaaggtttctaagtttgttaatggtacaccagcctcaaattttgcatcatcttcacttctatgtggtcatggtgacactgctaagttggacactttagttccaaccatggaggctgcaaagccaggtttcaagaaagttgagaaatgcagtgaaaatgctctgcggagtgtatctgagcttcatgtaggcgatgagaagcagactggttctaacaaatttgatatggaaaaggtactgaaagggtttggagctcgtgatgcttttgtggcttctgggctcaacggccctaatggacaagttggtggtactgtgtcgaagccttcagacatatgcccttctaagatcactgttcctggggaaaaagctcctctggattttaccttaaagactagtttgcagtttgtttcatcgtcatctgtgaagtggtgtcacaagctcaatacaagttttggcagaagtagcatcactggagccattggtcagagctgtcctcgtgggtgtcaaaatttagagtgctcaaagcttgagagcaaaaaggaatttctattctcaaaggctttacagtcatgggtatatccacaatcgctgttgccttcctctatcatatctgctatgctctcatcaactgcaggaggtgaaagtgattttcttctcaaaagacatcaggactgggaagattcatttcagaatctttactacatgctccggaagaacatgttgaatatattctatgttatagtttatacaacacaatttgttgctctcttcattagtggaagctgtttggagaaaaagcagtctagtaatgcctacttatcacaatctacacgtggcctacgctcattactacggaaacatggcgtttgcttttctatgcctctttgcagcactgaagtggagcaggctactgaggacgaccttattgaactttcagaaatcgaaaggcgcaatgtcggacaggcactccatttggatgctttatctgacgtggataacaccacgcagtcgctgctttcgtttactggcaacgagaacgttcatggcctatacgacgttctattgaattacaagtccttgctgaattcattatctgctgtggatgtcccagtcttgtattcaccccagccatttcaaaatggctgtctacacatcccagaggtgaagtgtagggagatgaggagagcagacatgtcatccggcgggttcgacacagaacagggatccgcatttgcgtcgacggcaggcaacgtatgctacagcatggaagtaaaggacgcggttctgccgccatgggtggtctctgggctgtgcgccgccatgagcttggacgcgaccagctttgatctgacgatcgccacggagccgtcgtcgatgggcttgaacgtggctctcgactccatgggcaccaccaccacggatgtccagcctgaaggatccaccccctccagctgctctgcgcccacgacgcccttggtgggtgccgttcctgacgcggccctcgtccctgccctgcactccgcctcgctgcgccgcctcacctacacggacggcggcgggtacgttgcgcacacaaccgtgtgagcgcctctgagcttgagagcccggccctcctcggtatgcgcagcgcagcgcaggcttgttcttttgagaatttggagcctgccctggcctttgtcgtacaaggacgacgtgtcgttacacgcttggttgggttggatggtaactaaactatgaggccagacttcttctggtggtctggaaaaggaacacttatgcttgaactcggtgtgtgctttttgcctggtcgtactgtcgttcaaagttgggaccgttcttaccttgccgtgacaccgcctgttggtgtgagctcctgctgtttgaattctgaagacaaccatcaccgttctgcggttgacagaggacggtttcttgattcttttt

SEQ ID NO: 3081 - DNA, 2405 bp, Zea Mays
gaagcttcaagaaggtggacggtcggagggacgggctacatgggtggctgcttctggtagcttcggtcgcccgccgcgccgccgccaggctgagtggaaggtagggggaagcaaggaaccagagggtgtgatgtggatgtagaggattggatgctataatggcgcaagctgctgtcgagcccgctttgaatggtggctctttgattgggaggcagccggtggttccaaggatgaagaggaagacaccgtctgaactgaggggtgagcaactgaagcggcgtacctctgaaaagcttggagatgatctgttaccttctgccacattggataggtcaaacaatggacttcggaacacagagcaacaaaagatttccaagtacatcaacacacgtgttacagaggtgttccctgtgagaaaagcaagaaaccttgggaaggaaaattccaaggatgtcttacagaataatgagaaggtttctaagtttgttaatggtacaccagcctcaaattttgcatcatcttcacttctatgtggtcatggtgacactgctaagttggacactttagttccaaccatggaggctgcaaagccaggtttcaagaaagttgagaaatgcagtgaaaatgctctgcggagtgtatctgagcttcatgtaggcgatgagaagcagactggttctaacaaatttgatatggaaaaggtactgaaagggtttggagctcgtgatgcttttgtggcttctgggctcaacggccctaatggacaagttggtggtactgtgtcgaagccttcagacatatgcccttctaagatcactgttcctggggaaaaagctcctctggattttaccttaaagactagtttgcagtttgtttcatcgtcatctgtgaagtggtgtcacaagctcaatacaagttttggcagaagtagcatcactggagccattggtcagagctgtcctcgtgggtgtcaaaatttagagtgctcaaagcttgagagcaaaaaggaatttctattctcaaaggctttacagtcatgggtatatccacaatcgctgttgccttcctctatcatatctgctatgctctcatcaactgcaggaggtgaaagtgattttcttctcaaaagacatcaggactgggaagattcatttcagaatctttactacatgctccggaagaacatgttgaatatattctatgtttatacaacacaatttgttgctctcttcattagtggaagctgtttggagaaaaagcagtctagtaatgcctacttatcacaatctacacgtggcctacgctcattactacggaaacatggcgtttgcttttctatgcctctttgcagcactgaagtggagcaggctactgaggacgaccttattgaactttcagaaatcgaaaggcgcaatgtcggacaggcactccatttggatgctttatctgacgtggataacaccacgcagtcgctgctttcgtttactggcaacgagaacgttcatggcctatacgacgttctattgaattacaagtccttgctgaattcattatctgctgtggatgtcccagtcttgtattcaccccagccatttcaaaatggctgtctacacatcccagaggtgaagtgtagggagatgaggagagcagacatgtcatccggcgggttcgacacagaacagggatccgcatttgcgtcgacggcaggcaacgtatgctacagcatggaagtaaaggacgcggttctgccgccatgggtggtctctgggctgtgcgccgccatgagcttggacgcgaccagctttgatctgacgatcgccacggagccgtcgtcgatgggcttgaacgtggctctcgactccatgggcaccaccaccacggatgtccagcctgaaggatccaccccctccagctgctctgcgcccacgacgcccttggtgggtgccgttcctgacgcggccctcgtccctgccctgcactccgcctcgctgcgccgcctcacctacacggacggcggcgggtacgttgcgcacacaaccgtgtgagcgcctctgagcttgagagcccggccctcctcggtatgcgcagcgcagcgcaggcttgttcttttgagaatttggagcctgccctggcctttgtcgtacaaggacgacgtgtcgttacacgcttggttgggttggatggtaactaaactatgaggccagacttcttctggtggtctggaaaaggaacacttatgcttgaactcggtgtgtgctttttgcctggtcgtactgtcgttcaaagttgggaccgttcttaccttgccgtgacaccgcctgttggtgtgagctcctgctgtttgaattctgaagacaaccatcaccgttctgcggttgacagaggacggtttcttgattcttttt

SEQ ID NO: 3082 - DNA, 2367 bp, Zea Mays
cgccttcatctcctcaatgccgcgcacattcttggtttcgccactgatttggcgctgagtggaaggtagggggaagcaaggaaccagagggtgtgatgtggatgtagaggattggatgctataatggcgcaagctgctgtcgagcccgctttgaatggtggctctttgattgggaggcagccggtggttccaaggatgaagaggaagacaccgtctgaactgaggggtgagcaactgaagcggcgtacctctgaaaagcttggagatgatctgttaccttctgccacattggataggtcaaacaatggacttcggaacacagagcaacaaaagatttccaagtacatcaacacacgtgttacagaggtgttccctgtgagaaaagcaagaaaccttgggaaggaaaattccaaggatgtcttacagaataatgagaaggtttctaagtttgttaatggtacaccagcctcaaattttgcatcatcttcacttctatgtggtcatggtgacactgctaagttggacactttagttccaaccatggaggctgcaaagccaggtttcaagaaagttgagaaatgcagtgaaaatgctctgcggagtgtatctgagcttcatgtaggcgatgagaagcagactggttctaacaaatttgatatggaaaaggtactgaaagggtttggagctcgtgatgcttttgtggcttctgggctcaacggccctaatggacaagttggtggtactgtgtcgaagccttcagacatatgcccttctaagatcactgttcctggggaaaaagctcctctggattttaccttaaagactagtttgcagtttgtttcatcgtcatctgtgaagtggtgtcacaagctcaatacaagttttggcagaagtagcatcactggagccattggtcagagctgtcctcgtgggtgtcaaaatttagagtgctcaaagcttgagagcaaaaaggaatttctattctcaaaggctttacagtcatgggtatatccacaatcgctgttgccttcctctatcatatctgctatgctctcatcaactgcaggagaaagtgattttcttctcaaaagacatcaggactgggaagattcatttcagaatctttactacatgctccggaagaacatgttgaatatattctatgtttatacaacacaatttgttgctctcttcattagtggaagctgtttggagaaaaagcagtctagtaatgcctacttatcacaatctacacgtggcctacgctcattactacggaaacatggcgtttgcttttctatgcctctttgcagcactgaagtggagcaggctactgaggacgaccttattgaactttcagaaatcgaaaggcgcaatgtcggacaggcactccatttggatgctttatctgacgtggataacaccacgcagtcgctgctttcgtttactggcaacgagaacgttcatggcctatacgacgttctattgaattacaagtccttgctgaattcattatctgctgtggatgtcccagtcttgtattcaccccagccatttcaaaatggctgtctacacatcccagaggtgaagtgtagggagatgaggagagcagacatgtcatccggcgggttcgacacagaacagggatccgcatttgcgtcgacggcaggcaacgtatgctacagcatggaagtaaaggacgcggttctgccgccatgggtggtctctgggctgtgcgccgccatgagcttggacgcgaccagctttgatctgacgatcgccacggagccgtcgtcgatgggcttgaacgtggctctcgactccatgggcaccaccaccacggatgtccagcctgaaggatccaccccctccagctgctctgcgcccacgacgcccttggtgggtgccgttcctgacgcggccctcgtccctgccctgcactccgcctcgctgcgccgcctcacctacacggacggcggcgggtacgttgcgcacacaaccgtgtgagcgcctctgagcttgagagcccggccctcctcggtatgcgcagcgcagcgcaggcttgttcttttgagaatttggagcctgccctggcctttgtcgtacaaggacgacgtgtcgttacacgcttggttgggttggatggtaactaaactatgaggccagacttcttctggtggtctggaaaaggaacacttatgcttgaactcggtgtgtgctttttgcctggtcgtactgtcgttcaaagttgggaccgttcttaccttgccgtgacaccgcctgttggtgtgagctcctgctgtttgaattctgaagacaaccatcaccgttctgcggttgacagaggacggtttcttgattcttttt

SEQ ID NO: 3083 - DNA, 2680 bp, Zea Mays
tctgcttccctttttttttttgaaatcctccgcttccttccttctgcttctcctcgagggtcgaggctctgccgctctgctatgctgctgccgccactcgctcggaaaaagcttcgtccttttctctcgctccctcccctcacattcgttcctcgcacccttccactttccgcgtctgcgctcggccgcccatgagcgcctgcgggggcaccatccccgcgtcgcgcttcctgcgccgccgcgccgccgtgcgggacctgggcggggacgcggccgccggcgacaccgacgccttctgggccgccccgccccgcctctacgacttctcccagcagcagcagcagcagcacacggcccaggccgcgcggcgatcgccctcgccggcgccgaccagcccgtgcctcctcgcccggaagcggcaccagcagtccccgtcgcctcctccatccccgcggcgctcgccttcgtcgcccgggacctgcctgctctccgccctgcaccgcacctgcgtgggctggggcgtcaccaggcgcgccgagtaccccagacggcaccgcccggtttctcccgcggcttgtgggcaggttacggggatgcacacgcacgggcgggcggcggctcggtgcgtggacgaggacgaggagagcaccagcaagaacagcaagtgcctgttggccgtgggcaagaacgagctggaggaggaggtgggtcaagaccacgagagctgcctgcaccgccgccgccgcgccaagaaggccccgtgggccgtcaaggaggagcaggagacgtcaggtgaggcggcggaggagggcgccaagcgcgccaagaggaccccactgaagcatgaggcggcggcggcggcggagagcaagcccgccggcgccgccaccgccaccgccactcccgactccggctcgccacgcggcaacggcaaggtcgaccggtgggcggcgtggcggtacgcggcgggcgaggcggcgctggccaacatcctgcgcgagcgcggcgccaccgccggcaatcccacgccgcgggccgtcctgcgggcgcaggcgcgccgcttcatcagcgacaccggcctgctcgacaacctcctccgccacgtcgccgacaaggtccccgccggcaccgctgaccgcgtccgccgccggtataacccggccggaggcatggagtactggatcgagccggccgggctggcggccgcgcggcgggaggccggcgtcgaggacacgtactgggtgccgccgcccgggtggaagcccggagaccccgtgtcgccggaggcccgcacgctcgaggtgcagaagcaggtggaggtgctcgccggggagcttgccgtcgtaaagaggcaaatggagcagctcgactccaatctggtgcaaatgagcaaggaagcctacatctcatggaaggggtatgactgtatggtcaaggccaatggcaagctggaaaaagaggtgctgtccttggaggagaagtatgagactgcggcacaggtgaatggggagctgaaagagctgctgctgctactgaaggataagtatgatactgtgcttgagaagaatgagaaactggagggccagatggttgctctgtccacttctttccagtccatgaaggaagagttgctcctgcagagaatggaagaacaccctctgctgatgctagcgcaagagccttgggaaggtgacaagcgagaagccggtggtgcgaacaaggctttggtggtgtgtgcaggcgaccagctggccggcgctgatgccttcgatggcagcttcagcagcaaccacagtgcctatggtgacgagaagatggtgctgaggaaacgtatctgcgtgcgggagggagcatgccagtggcctaggtctgctacttccagtggcgctacggctggcagccctggggacctgccggagccgctgacaccgggtgcggatctgatcgtcactgacttcgacaccatgatcgatagcctcgcgctaccgtccatggaggagtacctacaggtcgatggtctccccacgccgacgtctgcctcgtccaccaccgcatctcccaagctccagctcctcccctcaccagcctcgccgagccaggtccagcctctgccgtcaacaaccatggtcgtgggcgacttcaacatgcagctccggcacatggacacgtcgtcgtcgtcgtcatcaggaccgtgcggtgccaaggcgctgaagctcgacgccggagctggaggtggcgaggttggcactgagctggtcctggcgacccccacctactgacgagttcttataaatggacagatgaccactgaagttttgcctcacctcacctcaccgccattaacccatcgtcgcctcacatctgagaacatagcacacatgacaggatagctgcagattacctacccttttacctttgctttaattgtcagtcagtagccgtcactagtctcagttggaacttacttgcaggtgggtttacttacagctgagcaccatgttgctgctgcttaatccctacagtagtttgtacttttggttggagacatttgtctgccactctgttgaagccaaatgctcatcaggagctggcatctgtagtgccgccgccaccttttgtcttgcctttgtttgcttgatggtttcttgacccagctatgactgtatgcttgattttgcca

SEQ ID NO: 3084 - DNA, 1999 bp, Zea Mays
aagagcgtaataccctccttcctaggatgactttgtatatggatgagattacagtcggtgattactggactgaggggatgctaatgagataaaaatagatggggtcccccttggccttatatacacaaccatgggcgtcttcccgcacaagtatcgatcgcagtcttcctacttatcttctaattagtagcaaacatcttttactatctcgaggaaaatccggcgttttcatgccgagatatccccgtcgttttagttaggatgtcgggcacgggaacaaacagacccgacatatccacgtctatgccgcgactagcttggacgtgggcctctttcgcctctagattggcctgctttcattgtctttgttcgtctggcccatgatgggacgcttgagaggggcaactgtcacgtggccccgagcgaagttttcgcccttgtgtggatccgaggatatccatctcccacagctctaccatgacaagataggtggattggcaggtgttttggtttccttcaatatttcaaagtctatatctcctgcatcaaaatttctttataagagaagcacacccagtaatgcatagtagcattttggatgggcatataggcatattggtaacagtatatataatcacctttagcgttgatcaagcataggtatatgtcatccagttttgatgaagtagccctcatttatcatgaaccaaacgcacacaatttgtaacagtggcatattcaactctcatattattggatgatattggatgagtaggctatacatatcaagtactccctccgtatcaaaaatattagtcgttttagctcttgatttttatgaagataaacctagatacatatataaaatatatacatcaaatgttgtatgaatatattaattggtgtttaggctttgtaccttgtttttgataaattagacttgctatatttgctgatgagtatagtcaccacaataagtgcgtgcccacgttgctacgaaatccataagaattacctacattagatataatatgaaaatatttggacaaaatggcgcaacacgcacaaactatgaccagaatagcccaaacgacaaaaatgaaatatgtggatatatatgacttatctgtatcattcatcatcaggacaaaacatcgtctacttgtagtagtagtagaaacaaaaataacaagaaagaaagggcatctagagaacaacgatgcaggccagcaagaaacattgtaatcgatcgggacttcgtgtaactacagcctatggcttgctgctgcctgctatacacaacggcggcggcacggctctgccgcgatcagttagacatagtacaaccagtgagggagacggccggcgacgtcactcgtcggagatcggcggtccaccatagtggacgctgcacatcttgagctctctcggcatgtcgatctcctcaagccacgccagatggccttggccctggccccgctccacgtcctcgcccgcagccaccactgcagagcaaagacacgaaccggtctcccatacgtgagtcactactctagtgcaacggcaagaactcatgaggtgaaagatgcggccacttacgcgagtggtgtgcgtacggtaattccgcgtagtacgtgcagtccctgtcctcctctatggagtaggggggcccgaggacgtcgaggatcgcgcagggcgccatggcggtgaaccggtgcatgttccctcccgccgtcgggtacagcacggaggtgtcgcacggcgccgtgaagacgtcgtccaccaccagttctgccagcctcactgcgcaggaacagaacaagatcatagacatcagtgctgcagtgcagaggggttaacaacagaaacagacgatcaagccggcgagcggcgacagtgagtggcagaagcttacggcatgggccatcggaggacgaagagctggtggtgctcgtggcggaagaaggatcggggtcagcagtgttgagccagtcgtacg

SEQ ID NO: 3085 - DNA, 3700 bp, Zea Mays
atcagatctcaccaaccacctcaccacaccccaccccacccccaaaaccacacgaacccagagagtggattataaataagccctcccaaaccccttccatttcccgtgctcctctcctcctcctcacctatcatcgccgctgcgccgtctcctccgctcccgtcgtccggaaagatggcgtcccacattgttggataccctcgcatgggccccaagagggagctcaagtttgcacttgagtctttctgggatgggaagagcaccgctgaggatctggagaaggttgctaccgacctcagggccagtatctggaagcagatggctgatgctgggatcaagtacatccccagcaacactttctcgtactatgaccaggggcaacgccactgttcctgctatggagatgaccaagtggtttgacaccaactaccactttattgtccctgaattgggcccaaacaccaagttctcctatgcttctcacaaggctgttaacgaatataaggaggctaaggcgctcggtgttgataccgtgccagtacttgttggaccagtctcgtacctgttgctctcaaagcctgccaagggtgtggagaagggattccctcttctttcccttcttagcagcatcctcccagtctacaaggaggtcattgctgagttgaaggcagctggggcttcatggattcagtttgatgagcccactcttgtcctcgaccttgattctgacaaattggctgcattctctgctgcatacgcagaacttgaatctgtactttctggattgaatgtgcttgttgagacttactttgctgatgttcctgctgagtcctacaagaccctaacatccctgagcagtgtgactgcttatggttttgatcttgtccgtggaacccaaactcttgggcttgtcacgagtgctggtttccctgctggaaagtacctctttgctggtgttgtggatggacgcaacatctgggctgatgatcttgctacatctctcagcactctccagtctcttgaggctgttgttgggaaggacaagcttgtcgtatcaacttcctgctcgctcatgcacaccgctgtggatcttgtgaacgagactaagcttgacagcgagattaagtcttggcttgcttttgctgcccagaaggttgttgaggttgatgctcttgctaaggcattggctggtcaaaaggatgaggcttacttcgcagcaaatgctgctgctcaggcctcgaggaaatcctcaccccgtgtgaccaatgaagaagtccagaaggctgctgctgctctcaagggctctgaccaccgccgtgggaccaacgttagtgctagattggatgcccagcagaagaagcttaacctccccatccttcccaccactacaatcggttcgttcccacaaaccgttgagctcaggagggtccgccgtgagtacaaggcaaaaaagatctctgaggaggaatacgtcactgccatcaaggaggaaatcaacaaggtcgttaagcttcaagaagagcttgacattgatgtgcttgtgcatggcgagcctgagagaaacgatatggttgagtacttcggtgagcagctctccggttttgcgttcactgccaatggctgggtgcagtcttatgggtcaaggtgcgtcaagcctccgatcatctacggtgacgtgagccgccccaaccccatgaccgttttctggtcgaagacggcacagagcatgacgtctcgcccaatgaaggggatgctgactggcccagtcacaatcctcaactggtccttcgtccggaatgaccagccgaggtttgagacttgctaccagatcgctcttgcgatcaagaaggaagtcgaggatcttgaggctggtggtattcaggttatccaaatcgacgaggctgcactgagagaagggctgccgctccgcaaggctgagcatgcattctacttggactgggctgtccactccttcagaattaccaactgcgagatccaggacaccacccagatccacacccacatgtgctactccaacttcaacgacatcatccactcccccaggatcccgtcggctgaggagatcgccgaccgcatcgacaagatgctggcggtgctggacaccaacatcctctgggtgaaccccgactgcggcctcaagacccgcaagtacacggaggtcaagcccgccctgaccaacatggtctccgccgctaagctcatccgcacccagctcgccagcgccaacggttgcggttgcttctgcctcttcttcggctgttcctctgcaccatgaggcggcgccggcgccggagaaggaggcgagacagggaccggcggctgccacgaccacgggggaggagtcttcggcccaggagcagcacccggcgtctggtgtggcggtggtgctggggccggcggggatggaggccgacgcgacggtggcttaggataagtacgtggcggctgtggcggggacggagagcgacgcggtggtggcggcggggacggaagccgacgcgacggtggcttaggataagtacgtggcggctgtggcggggacggagagcgacgcggtggtggcggcggggacggaagccgacgcgacggtggcttaggataagtacgtggcggctgtggcggggacggagagcgacgcgacggtggcggcggggacggagagcgacgcgacggtggcttaggataagtacggggcggctgtggcggggacggagaccgacgcggtggtggctgcggggacggaggccgacgcgacggtgacttaggataagtacggggcggctgtggcggggacggagaccgacgcggtggtggcggcggggacggaggccgacgcgacggtggcttatgataagtacggggcggctgtggcggggacggagagcgacgcggtggtggcggcggggacggaagccgacgcgacggtggcttagtataagtacgtggcggctgctgggacggagagcgacgcgacggtggcggctgggacggaggccgacgcgacggtggcttaggataagtacggggtggctgtggcggggacggagaccgacgcggtggggacggagaccgatgcggcggtggcttagggtaagtacgtggttgtggtggcggcggttcaggagcaggaatggaaggttctgggcgcgatgggtgccgacgtggttgaggtggtagaggaggcgcctgcgttggcgatgggttctggcgtgtcagcggcggcggttcaggagcaggaacggacggctctggcggcgatggacgccggcgtggttgttgttgtggaggaggaggaggtggcgacggcgacggagtcggcgagtgcgacagcgcggcgacgatggggagcgtgatgatgagcttctcgccctcgaacctggcgcggacgccgtcggagtcgcagttgtcggggaggcggaggtccttcttgaacctggcccaccggccgcccctggcgggtcgctcgccggtggcgcgcagcacgccgtggttgtccacctgcaccctcacctggtccttgcggaaccccggcagcgcgatctccaccacgtcctgctcctcccctgccagcttccactccacctccgggtcgaagtcctcgaacacccgcgccgccgcgcgctgccgccggtccatgcctgcctatttcctcgccgccggagaccgaagctgctcgccc

SEQ ID NO: 3086 - DNA, 3888 bp, Zea Mays
accccacccccaaaaccacacgaacccagagagtggattataaataagccctcccaaaccccttccatttcccgtgctcctctcctcctcctcacctatcatcgccgctgcgccgtctcctccgctcccgtcgtccggatggcgtcccacattgttggataccctcgcatgggccccaagagggagctcaagtttgcacttgagtctttctgggatgggaagagcaccgctgaggatctggagaaggttgctaccgacctcagggccagtatctggaagcagatggctgatgctgggatcaagtacatccccagcaacactttctcgtactatgaccaggtccttgacaccactgccatgctcggcgctgtccccgaacgttactcatggactggaggagagattggatttgacacctacttctccatggccaggggcaacgccactgttcctgctatggagatgaccaagtggtttgacaccaactaccactttattgtccctgaattgggcccaaacaccaagttctcctatgcttctcacaaggctgttaacgaatataaggaggctaaggcgctcggtgttgataccgtgccagtacttgttggaccagtctcgtacctgttgctctcaaagcctgccaagggtgtggagaagggattccctcttctttcccttcttagcagcatcctcccagtctacaaggaggtcattgctgagttgaaggcagctggggcttcatggattcagtttgatgagcccactcttgtcctcgaccttgattctgacaaattggctgcattctctgctgcatacgcagaacttgaatctgtactttctggattgaatgtgcttgttgagacttactttgctgatgttcctgctgagtcctacaagaccctaacatccctgagcagtgtgactgcttatggttttgatcttgtccgtggaacccaaactcttgggcttgtcacgagtgctggtttccctgctggaaagtacctctttgctggtgttgtggatggacgcaacatctgggctgatgatcttgctacatctctcagcactctccagtctcttgaggctgttgttgggaaggacaagcttgtcgtatcaacttcctgctcgctcatgcacaccgctgtggatcttgtgaacgagactaagcttgacagcgagattaagtcttggcttgcttttgctgcccagaaggttgttgaggttgatgctcttgctaaggcattggctggtcaaaaggatgaggcttacttcgcagcaaatgctgctgctcaggcctcgaggaaatcctcaccccgtgtgaccaatgaagaagtccagaaggctgctgctgctctcaagggctctgaccaccgccgtgggaccaacgttagtgctagattggatgcccagcagaagaagcttaacctccccatccttcccaccactacaatcggttcgttcccacaaaccgttgagctcaggagggtccgccgtgagtacaaggcaaaaaagatctctgaggaggaatacgtcactgccatcaaggaggaaatcaacaaggtcgttaagcttcaagaagagcttgacattgatgtgcttgtgcatggcgagcctgagagaaacgatatggttgagtacttcggtgagcagctctccggttttgcgttcactgccaatggctgggtgcagtcttatgggtcaaggtgcgtcaagcctccgatcatctacggtgacgtgagccgccccaaccccatgaccgttttctggtcgaagacggcacagagcatgacgtctcgcccaatgaaggggatgctgactggcccagtcacaatcctcaactggtccttcgtccggaatgaccagccgaggtttgagacttgctaccagatcgctcttgcgatcaagaaggaagtcgaggatcttgaggctggtggtattcaggttatccaaatcgacgaggctgcactgagagaagggctgccgctccgcaaggctgagcatgcattctacttggactgggctgtccactccttcagaattaccaactgcgagatccaggacaccacccagatccacacccacatgtgctactccaacttcaacgacatcatccactcgatcatcgacatggacgcggacgtgatcaccattgagaactcgcggtccgacgagaagctgctctccgtgttccgcgagggcgtcaagtacggcgcgggcatcggccccggtgtctacgacatccactcccccaggatcccgtcggctgaggagatcgccgaccgcatcgacaagatgctggcggtgctggacaccaacatcctctgggtgaaccccgactgcggcctcaagacccgcaagtacacggaggtcaagcccgccctgaccaacatggtctccgccgctaagctcatccgcacccagctcgccagcgccaacggttgcggttgcttctgcctcttcttcggctgttcctctgcaccatgaggcggcgccggcgccggagaaggaggcgagacagggaccggcggctgccacgaccacgggggaggagtcttcggcccaggagcagcacccggcgtctggtgtggcggtggtgctggggccggcggggatggaggccgacgcgacggtggcttaggataagtacgtggcggctgtggcggggacggagagcgacgcggtggtggcggcggggacggaagccgacgcgacggtggcttaggataagtacgtggcggctgtggcggggacggagagcgacgcggtggtggcggcggggacggaagccgacgcgacggtggcttaggataagtacgtggcggctgtggcggggacggagagcgacgcgacggtggcggcggggacggagagcgacgcgacggtggcttaggataagtacggggcggctgtggcggggacggagaccgacgcggtggtggctgcggggacggaggccgacgcgacggtgacttaggataagtacggggcggctgtggcggggacggagaccgacgcggtggtggcggcggggacggaggccgacgcgacggtggcttatgataagtacggggcggctgtggcggggacggagagcgacgcggtggtggcggcggggacggaagccgacgcgacggtggcttagtataagtacgtggcggctgctgggacggagagcgacgcgacggtggcggctgggacggaggccgacgcgacggtggcttaggataagtacggggtggctgtggcggggacggagaccgacgcggtggggacggagaccgatgcggcggtggcttagggtaagtacgtggttgtggtggcggcggttcaggagcaggaatggaaggttctgggcgcgatgggtgccgacgtggttgaggtggtagaggaggcgcctgcgttggcgatgggttctggcgtgtcagcggcggcggttcaggagcaggaacggacggctctggcggcgatggacgccggcgtggttgttgttgtggaggaggaggaggtggcgacggcgacggagtcggcgagtgcgacagcgcggcgacgatggggagcgtgatgatgagcttctcgccctcgaacctggcgcggacgccgtcggagtcgcagttgtcggggaggcggaggtccttcttgaacctggcccaccggccgcccctggcgggtcgctcgccggtggcgcgcagcacgccgtggttgtccacctgcaccctcacctggtccttgcggaaccccggcagcgcgatctccaccacgtcctgctcctcccctgccagcttccactccacctccgggtcgaagtcctcgaacacccgcgccgccgcgcgctgccgccggtccatgcctgcctatttcctcgccgccggagaccgaagctgctcgccc

SEQ ID NO: 3087 - DNA, 2132 bp, Zea Mays
cttttaccagtacgaccgaatgcacacgcttccgaatttaatacctttgccggcccttcgtatttacgtgctgaaatacgaaactagttactcactccatcccagatttaggtcttgtttgtttatcctccagattatataatccggcttaaataagttaaagagccaaacagacaacacagattattaggtggattatattatctagatacctagattatgataatccataagcaggtgcaggtcattaggtgtttatgtaattcataagatggattatataatcttggaaagaaacaaacatggccttataagtcgtcttggcttttcagcatggcttgtgctacgcagctagacgttcgctgtgtcttggttggtgcccggtaaagaaaaaaaaataactattctctcccttcttttttatttgtcgctgtttagatcaaaattgaactagcgggcgataaatatttgagaacggagggaggtagtgtgtagtatgtaggagtatataaaaaagagaataaaaaatgatctataataatttcataatttggagcagagcaggggcggagggcccagtatggcccagtattgcctgggcaataccttgggccggcccactaatagaatagagattagggttcgtcacggcgttccgcacagccgcactgccagcgtcccgcacagctgcctgctcggccgcaggccgctcctgccggtgctccagcctccaggcctccagccgctcggagcctcggactcgtcacgctccagccgccagctccggtgctccgctgatctgcttgtccggttgaccggttgtcttgtcccgccggcggccggctgcgggctgcttgccgcttggtcccgccgaggcgccgacccgcatggccgcacggctgccgcctgccgctgcttcctgcttggccgcacgtctgcttgtctagttgtctgcttggctgattgcttaatgcttagtgcttctagttgtctgcttgcttcgtgcttctatgcttctagttgtttgattgtgacttgtgagacttgtgagcagagcatagaaaggtcaaaggtagctcatgagtatttatttgattacccgcgtgagtattttattatgcgtgtctaatctagtagatttttcaatgtgcagattttccaatttctaaatagcagtcttggatacaaacaaaaacaagacaaagaatatggcccaaaaaagtatctctctatattatgtgaacactccctgttggctgttgtaatgtcttctaattatctaatacatgctatatgcttcgtaaaatgacagatttaaagagctatttcagtcaagcttctagtggaagtagactaagcactcgcgctgatggagtttgcaatgaacccagaatacaagttggagtccaagagaataatagtgaagatgccaatggtgaaaatgttaatggtcaagtcgaaggtataaatcagttcaacccggatcacattatttctgatccgggactttgtattccaatggattcttttgctcctaatattagagatgatgttagaagggctttcatagctaaagattttattcgccatatgacatttggttgtaaatggattgtaatcaagatgactattaaataaggtatttttcaacatctattacttattttatagctacaagttgttttaaactgtgtcataaatttttagtcttagtcgcgttagcaacacctaaattttctagcgtcctccgccactggagcagagataacacatccgcatcccatataatcgtgtagcataccagacgggagatggatccaccgcatcaattaaaaagtatgattgtcgacgagcatatattacaaaaaaaaaattaagaggatttaggtcatccttcgagagacggatgcataaagcagcggagacccaaaactgtcgagagcatccatggagggagatgatcgacgcaacgcaagggtaggcggcaggcccaaaggacccctttacagtggatctacgcgcacggcgaaaccattaaccggcatcatcccgtgaacgaaaggggaccggcgagtcgagtacctacctactccaaaaagatctactaccaatcgttcccgacgagatcggaa

SEQ ID NO: 3088 - DNA, 5836 bp, Zea Mays
agtcttctccctcaagcgcccagttcctcgtcctccccatctccttccttgccctctcctggccatggcactagttctcactcgcgcggccagtgaccactgaaacccaccgcccgcatgagcaaagatggcatctgggcgatgggacgaatctcgtgcggcggccatcctcgcgttcacgcctccccggggccatccctctcccttgcggagctccctccacgcgcgccctgcctcccatggcggccgtccggctgctcggtcgccatctccatagccgcgcctacccctctgtttcccatgcgccaccgctccggttccagctcgcccgagctccatgactcctgcgtttcctcagtcgcgcccaacttctcccgtgcgcgcgagctcctctgccggcgcgcccgtctcctatggcgcgttcctccagctccagtgtcgcgcccatcccctgctctccctctagctcgcggagctcccttcgctgcttcctggccgcgtcctctgatccgtcgtccctagcgtcggtcgagtccctccatcgcggcacccctctccctagttgagcttctctctctcccacagctccctgcgcgcgtcctgggttgcgtgcccaggcttctgctcagctgagctttctgctcgccgcgtgccctggcgttcgccatggccaccgcgtcgtggagtcctgtgcgctcggtcctgctcactccctgtgcgcgcgcccagccgaagtcccctgcgtgcagctcacgccctgctcgccactctgcttgtcgagctcgcccgtccacgtcgtgctctgttcccggtgcatggtcgtgcccctctgctcgccacgacgtgtcgaactcctgcaccaagtccttttcccagctcacccggccggattttactgcgcgcgccgttttccccagctcggattccgccagccaccgttgtcctatccgcgtgaacacgcgaccgtggtcgtgttcgtcgagttcgccaacgctctgttgccgattcgactgtcgtcgctgttgggtgcctcactgcgtgcccgccgagtgttgtctgttgtacctcatcactcgtgcttgccgctggctcgcgttaacgatcacgcgcctgctcgttgtcactgcggcgcactcgctcttcgtccatcgaacttcacgtgtgctcgcatttgtcgtcgagctgttgaacccgtcctcccttgctcgtgacttcgtcgtcgcctgagctcgcgctaacctgctcgaccccacctcaccagctcgctccaaattcgatctcgtcgtcgttctgtacgtcatcaagaaaacccaagagtcaggtgaagatgaagctagcagcgtgatattcaccaagtgctcaacaaaagctcgattctatactcgtcagctattcgatagaggacttcaactgaaggccatcgtcgttcaggcaactaccaaatcgaattgagatgtggtacgataattcatcacgtgatacggaagacgaaccaagtcgaccccaagcgtgggctactccgcatggtggtgctgatggatgaacctgcctgaacaaatgccaagacaaaaggatggtcgtcaagtggtcgccacctaacaaacactaacgtagtgtttattccaggcaagccccggtgcattcgccccttgtgttttaaatggtttttcaccttatatgatgcattaggtgataggagttgtgtgataaacaattgatgcattaccattcattggaaactccttaatcccggttttataaaaagaactaataatgcttagccctgcttagaaactgaaaaatcatttgttttcaataagaatgattgtggaacattggttatgggcctttcgtttcaaaaatcaaatcaaacttatggtgatgattccacttcggccggagtgggttcatcattcgaaaaagagtacccctgttgggcaccaaaaatgggaaaaatggtttgaatacatctagaccagacgttgagcggacatggtcgcccgtctgtgtcaattaaggaccgttcgatgtaggcttgttgtggtggagactttgcaattatccacatgctccggtaagcctgaatccggctattccatacgtgaaaagacaaccgcgcactgggcgtgggagatgaagggagtagcgtgtaccctcctggctagaggctggatggaggagtcttgtgctcccgggtagcgcggaccggttcacgttgtggaggatccgtgggaacgattgacatatgcaagggattagtgctacatatgtcgtgtggttagggatccccagctgggtataatcggtttgaatcgtcgttgctcctcggtcatggagactctaccctctgaccactcatcgtagttaataagtaaaataagagtttggtaaaagaaagctagaccaggacaagtgaatgctctagattaggcaaatctagattcaggaaaagtacttaacttgtgaagtaaaattttggcataaggattcactactagtaagctcttctgcaaaatgagtctttgaaatttggtaagccttaccttgattcctaatcagccagcttatccttgagagtcttttctttagtcgggtaagtcttgctgagtaattgcgtactcagggttttattccctgttgtttttaggttatagttttgtgctgctgttgatggtgttaagtgccggtgggctcggccttcttataagtctaagtaactcttctatacttcttattgaggatggtccttgagctatcatatattttaaaactacaaataatttataacagttcaaagttatttttttgaatcacttttgtaatcactccgatcatatataacgtaaacttgatgtaacttgtaaaatttggtaataagttttccgctgcaaaatgttggtgtgtgtgattggtgttacttaatcatgcggtcctggttgtaagtggtttatccgaggtccttagggcacttggacagatcctgttaagttatccggtgcacatgcatagtagtctaaggtctttgagacaaggacatgtacgtgtgggcctaataacttgggaggttctgccacagtgtgacactgccttttctatcttttcaaatcaaaattttgctcaaagctgactgaaagggagatatacgtggtgatgtagctcatcaaacaagaaattttattgaactcttactatgacagtacgccacgtctttcatagtgaaaaaatgtggtcagacaataagatcctaaggctgttgtggtcaggcaataaatatatagaataaatcaactcagtgcatggaagattttatttctcatgacgccctacttgctatgttcggtgacatcaagtttccactgcgtgacgcgctgaatgtcggtgtagccgccagtggagaagacacagagtaggttgagcgtggtagcggattgggcgtactcctaaagcatcctttatgggtccaagatatgattcttctcgtcgaacatcttgtcattgatgttttcacccttatagcttggcagcttcacgtcatccctcacctcaaacaatcgaacacatggaagtcaccatctgaaaaaatagattagttcgaagcgaaggcaattttgtttagcttattgtcttaatgaaacatggtgttttggtttcctccaatatttcagagtttcgctcaacatatatttatagctacaaaataaaaagttcatatatctcttgcaacatttgtgatgccatgaaaggccaagtgtgtagaagtatatatataatagtagatagtccttattttgattgatattgataagcatgcaaaccatgttgcaagtcattcaataactaatgcatcattaatttatcatgtatactctagaaccatcatgcatcaatgtctttctatgaagagtgtttttatgcctagtcctaatgttgtatgacatgaaggaaaaatgaagaatgacggggctgcattgacaatgtgctttcctgttagtctattattagacttaatttaccatcctagcatgaagttttcggttgttgctacgatagactctaatggctatgtagagagacgaaaccaatcaataaagaattacgtggttttgcaatattcaataagatgaaaactgccacctaattttgagttaatgaggacttcaaccaatatggctaagtgcatgaccacaactcccacctgacaaattgagtcaagttcactttctcataagtaatatgaattcaatacagtaaatcaaggaactttaggaagccacattaattatccggtagctctacattagccgccaaaaacaaatgtattatttttggcagctagagagtagacgtcgaaaatatgtttattttctagcggttaggtacctaccaaaaataattgtgttctttttagcgagtaagctctagcagtcgaaaacaatacacattttattaaacaaggtgtagggtaaaacaaactaggtaacctattgagctcacattaatttaacctaacagtacatggaagggtgaggaatatagaagttaatattattaggtcaacaatgtgatcaagggacacaacttgcctttaactgcgagctcctactcatatccttcaaactattgggcttcaaaatcctcgttcactagttcgtttattcatagcaatacaaacaaatatttcgtctattcgtagcaatacaaacaataaataaaatatcattacaccaaacagagaagtaaactacacaaaaatattctatgtgccgcaacgaatctgtatattcgagaaccactaaaatcgaggttaaaatgaagcagctattatttaaataagcttttttcaattatttttgttttaaacagtaattccagaattaatttgtatgattattttttctgtcctggactgctggcactattctcagatagcttagggtcaaatccaataaaaataagacctaaccgctttgattttataacatatatagaccacacgagttgattaggaatttctaccatgactctttagcaaaacctaaacgaacgtataaggttgaccactcagagtccatctgctgatctccgtattggattcactcttgccgaaccattatcccccttctaatcttactcgtctatccctggatcaacgatcagggacttgctgcttcggtttcttgtgagcggaaaagaaaccaaactgtgtcctaaagtttattacagcggtggagattgtggaggatcccaacagtccgaagttttttatgagcagaaaagaaagggctaggagcaactccaaaaggatgttaaaaattttatccaaaaaactgattattaagagtaggctaaaaagttttaaaagtgaatcatgatgggtattccaatggttcttttaaatgtgacatgtggcacaaactgtagagttgtcgggaggccgtggatgtagtggccgaccctgttgctatgtttagggtgtgccaaggaaaaaaataaaaaaacaaacaaaaaaaaggatcaacaagactcgaaccttgaccaccaagtttaaaatatagcacttacaccaatatactaactacacttatgtgattttagggtgtgccgtcgaccatatggaccacccgttgggtccgcccctgtgtggatgatccgatacgttgaggaatggattggagagtgatgaaacacactaaaatatgagggagaggaggctgtggatgcgggacgccagttttttcgggaagaatgagggagttgttggaataagaaaaaacactattcttgactaatatctattttagggttagtttacacattcttttggagttgctctaac

SEQ ID NO: 3089 - DNA, 2016 bp, Zea Mays
ccaggctccaaacatgtttgcaccagctcattcgacctcagtagaagcaaaagaacgttggatataaacctgtagtccctcggtgttttatggagctcggtaaaagcactgatagcctccctggttattagccaaactgactgtatcatgtatgcacaggtagttccactctcgcgtttgtgttcacagagcccatgtatgttcctatggtgcactcggctttatagctagcagtgctaggataactcccactcgattgattaccttcaccaagttcactctacgatctcaccctcgctgaccaacgccgagtccacacaaatcccttcatacgagcaccttgaagaagaatttgaagtggaagtggaaagagagaatgttcctccatccgaaacttctccaactgaggatgtcactaaaggtccccccggagggtgtcccatttggatttgctgctaactgcaatatccttgtagaagagcccgactctcctcctcaccaaggcaagccctggtgcatttgccaccttcttgatgttttaaacttttatcacttatatgctgcattaggtgtggtaggagttgaatgattaaacctttgttgcataacttccttgaactattgattaccatccttgatacctattttaaaaagctagatgtgcttagtatgctcatagactaagaacaaaatgttttaatctatgaatcatgtttttacaaagaaaaagaggctggagttatgaaggtatcaaaggccttgataacttcatgcatttagtagggtacctcagacaggtaccaggttttcagaaataatttaaggggagaccagacgttgagcaggaaaggtcatccatctgtgttgattaaggaccattccgattgttggcctcctgatctaggactctttaactggccacatgcctcatcatgggtaagcttagcctcggtcggaccaataccagaatagctcgcacacactaggagtggagagatggcgagagtaacgtgtgcccaccaggcaggtggctgaatggtggggtgttgtggtctcgggtcgcgtgaacccgttctggtcttgagaaacccgatggcgagttgagatatgcaagtgttaagtgctacatatgtcgtgtggttggatatcctcagctgagtattaatcgatttggatcgccgttacttctcggatatgaagactggatcactgccctgcatcgtagttaacaagcgaaactaaagctgctaaaatgaagctagagtaggacacgtgaatgctctagattaggcaaatctagattaaggctacttaacttgtgaagtaaaattttggcataaggatccactactagtaagcttttctgcaaaaatgattctttgaaacttgatgagccttaccttgaatccttttaaatccagcatacccttgagagtcttttctttagtcgggtcagtcttgctgagtaatcccatactcagggttttattcccattgttgctgcaggagaaactatcaacacgtatgagttttgttaaactcataatggcgacttttacttatgtgcattatgtgtgtactgcgggaagatggtttcttgatagttgatgtaataagttagcacttaaactctacctcgggcatgtaataataaatactacttggttttgtatacttaacagttacttaatgtctattaccttagtgcaaagtcttccgctcaactcatgtgtttaaagttatgttcatgtatgattattgtaatatttgcaactttggatgaatggtccttggaattgaacaagttcatcgaaactcggcaccccgagtaagttatctgatccacttaagtatctatctgaagccttgatggcaaggattggggtacgtgggtccgataacttggttgggttgtgacaatatacgtggggatgtagctcatcaaacaggaaattttattgaactcttactatgactatacgccacgtctttcatagtgaaaaaatatggtcagac

SEQ ID NO: 3090 - DNA, 1034 bp, Zea Mays
atgaccggcgacggcgcgttcgagggtcggcctcttgctgctgtgatggccccatccttcacgcagccccacactcagtcgctgcgtggcacatctggggcgtcgcgtggagcacggtaccacgcgggccagaggtggactgacggcgacatcgacttctgcggcatgggtaccggcggcgaccggtgttccgtgacggcgagggcatatttgaagtccggcgtcagcctatcgctgctttggtggccccacacttgtcgcggccccagctgcagtcgttgagtgcgcggatctgggcgttgcatttttaggttgccgacacctttcctcgtcgaagacggcgacatacatcactacagcgagcgcacgtccgagcagtgccggagcatggaggccggcatacttttcctctcgactatcataaaattagtactctctcgcttttggtgactccttcagtccttcctcgtatttctcggcttacccgtacggccgtacccaccttgtttttgaacgtcgttttctttcacgtctggtttcctcgctgccgtcggtgcttcctcatggagttctctcggtcagtcctgatgctgatgctgttcggtacctagcacgtgcggacttcctccgtgcgacatgtttgttttcctatgctgtattctgcctacgtttcctgggtgttcttgtatcggccatgcttgcgtcctttggtatgtgttttcaaagtggaagaactaatgcagcaaaggaaacgcgaagcgcaaaaacgggtagggggaaattcttgcgattttttattttagagagacaacgtgttttacaagttagttgggggcttttggttttgatcacaggtttggcatgtgctgcgaggtggagttaccacagggagtagaaaatcaattttacttattgcttggttaacggttaacgctgagatgtgctccaagaacaggggtaaagggtcgccgccgtttcgcggcaaagtaccagcaggattcaattgggaggcgaggctgccctgggccttctaa

SEQ ID NO: 3091 - DNA, 757 bp, Zea Mays
atgaccggcgacggcgcgttcgagggtcggcctcttgctgctgtgatggccccatccttcacgcagccccacactcagtcgctgcgtggcacatctggggcgtcgcgtggagcacggtaccacgcgggccagaggtggactgacggcgacatcgacttctgcggcatgggtaccggcggcgaccggtgttccgtgacggcgagggcatatttgaagtccggcgtcagcctatcgctgctttggtggccccacacttgtcgcggccccagctgcagtcgttgagtgcgcggatctgggcgttgcatttttaggttgccgacacctttcctcgtcgaagacggcgacatacatcactacagcgagcgcacgtccgagcagtgccggagcatggaggccggcatacttttcctctcgactatcataaaattagtactctctcgcttttggtgactccttcagtccttcctcgtatttctcggcttacccgtacggccgtacccaccttgtttttgaacgtcgttttctttcacgtctggtttcctcgctgccgtcggtgcttcctcatggagttctctcggtttggcatgtgctgcgaggtggagttaccacagggagtagaaaatcaattttacttattgcttggttaacggttaacgctgagatgtgctccaagaacaggggtaaagggtcgccgccgtttcgcggcaaagtaccagcaggattcaattgggaggcgaggctgccctgggccttctaa

SEQ ID NO: 3092 - DNA, 1188 bp, Zea Mays
actttttgctcagcgtcacccggccgccgccacagctgttgcccagccgcttgagcaggcaaccagaccggccgccgccacagctgctgcccagccgcgagcaggcaagcaggccgtccagctccgaccagccgcacgagcagcaagcaggccgcccagctccggccagccgcacgagcagccagccgcacgactagtgcacagcagacagcaccggcaagcagccgagcagctgcttctcatccggcgccaggtccagtgcgcgcgcgccttatctgctgcagctgcttgccgtcctcgtccgtcgtccctcggcaccggcaggtccagactgacgctgcgctcagtttgaagctcctccatggtgtcggactgggacagcgacagcgactgtgaagtacgcatgattgattatcctcgcgagcgtcgtgctggtgctgctactcaggcagagaaaggaaaggctatggtcgatgccggtacatcttcaagtgttgctggtgtgatggtgatggatcgatatgggaaaccagtgaagttaaatggaccaattgatgtgacttggagccatggtgagccatatcctgggcctcatggggctggctttaagtgtttttattgtttgaccaccaaaaaaggcggggggtgtctcgattaaaagagcatctaggtcatatatctgggagtgtggaggcatgccgtaaagtgccaaatcatgtgaaggacctaatgtctcaaaaagtaacagatgggagaattaggagggcacatggtaagaagcttcgtctgtttgttgaaaaggaggtttctgcaacaagacaaggttatcgaagtgcaataattcctcttgatgaacaagcacagattgatatggcaatgagaaattcattgagggattctttttccacaatggaacgtgatagttgtccaccttttggtaagtcaacgggtagtgcaagtggagctgcaagttgtccaaaatggcaagaaaaccgaagttccaacatgttatgacaatggccataaagaaactttcaagctcatcttcaaaggcttcagctgcaattgatcaatatactttcttcagaaagcaagctgggttatttggaggagaagaggctaaagattcagcacttaatggccgcgcaagtgcagttctaggagtgaatcagtgccgacacttgatga

SEQ ID NO: 3093 - DNA, 2920 bp, Zea Mays
gttttttttataaagattattgaactggtggtggaagagtttaagtgctaaatgtgacatacagttggattacgatctcatggattagatggtttgcttgcacgcttgcacagaaggactacttgcatagccgtcgttgccatgagtaaattgctggaggggatagtctaatgtgctaactgagccggctaacactcctttatgcattactgaggcctcgctagggtttaagcatttaggtaaccaaataaactcaatatgtctaggatggtagccagccagccaaccaaagatgccgaaagttcctctgttgtgaataatatagggctcagagcagagagcagagagcagccacaagttgggcggatagcacacacttgttcacgggatcgaccggatcagatgccgtcgtcctcgtccgcctccggcgtaggcctagggcggcggcggcctcccattgcagcaggggggcctagaagaagcgatagcagatggtggtgggcgagattaatggagaagaactatagtgatgctgagagttatcgcgcaaggaggccggaagagaggctgatcaacgattacctgctgcttgagtccgccgcacggaaggtcgccaccggcctcgcgtatctgttgctgacgtggtccaccgttgtcctccttggtggtttcgtctccgcgctcaagctcatcgacttttggtgtctggctgccattagtacgtcatttgcagtcaattctttcattgtccaggctaattgcaaacaactatggcaatgttggtgacgatgctgccaattcagcaaagctcaaggcatccctgcagattttctactctctcaccctggtgcagattaatgccttctacttctggaagatgctggtccttaggaagaaacattgtgcgtctgctgtggccaagaagtgcagatttggggagtggggcttccgcttggtttggtcatacattgaagaaaccaaaaccatgctcgagagagacggggcagtgctgcggggcagaaacctgatcaccttcgcagttggcttgctcggctccgaatcgctgcacgaccgtcgttctgcacttcgcatgctggacacgttcgtcggagacaaggtgtcagtagcaccctgcctgctgccttgcaggggtccccttgagaacctcatggaagcgctcgaggtgggcgatggcgagaccagggagcgtgccgctaggatcgttgcggctcttgctggcgatctccgccgcatcgatcagctccccagagcattgcatcacatggcttcactgcttcaagcctctgattatcggttccccagacccagaactacaactgcaactgatgcaagaacaacgacgacaagcatgcaagaacaacgacaacgacaagcagcagagagcaagcgcgggaggtttgggctgctattctgggcgatcctgtcttgtctcaacttctgggaagtcttggcgaaagagaaaaaggaagacaccttcccctctggcggcggaccaaagcagctcgtctctcaagggctgcttatcgttgagagactcgctcggcacccagcaaaccgtgcccagatatgcaacaacagcgtcctgctctcaaagctcacagcgcccctattctcccatgctttcctcgacaccgcggagcacggcagaggatgggttgttggcatgttagccacgtcgctgaggatcataaccaggctgcttattagggctcctggagaggccagcagagggctgcgtgacgggatcacaagcaacgcacaggcggtctctaacctgtccagggttctggaggaggaggacgacgccaagtttggcccggaactgaaagcagctgccgttgacatcctagcagaactagcgttgccttcatcagacaggtcttccacctcgaggttgggcaaggctgacatcgtcagggggctgtggtgcatcttccttgttcaagtggacgatggcgttgacggcagcaacactcagggagaggaacagcgacagcaggatagcacactgaggaagaaagctagcgaagcactggcacagatgctgtctgcagaactgcgtcatgttgctggccggcttactgacatgctggctaaaagtaagggctccacaagtcgagtaaggacagcaagaaccctcgagtgcttgtgttcacatatttctacagaacatggacagcctccaagactggatgctattgaaatgctgacaaaggttcttcagctgatactacggatcccatgcgaatcaaacaagctggagacggctgacgaggagcagcaagaagaagaggaattcctggtcgccttgctatcacttgccgtggtgatatgtgacggcatggtcgacgaacatggcttcagctgtgctgcgccccctcaagacatggtgccgctggtgagaaagcttaaggacataatacaggctaacaacacaaccacggtcgaatgcctgcggacagtgaagcttacctgcaagctggtcgtttcaatggcacagctcaagcccatgtgcatcaaagatttcacagagcacaatttcatggatgtactcttggagtctttgaagacgttgtcagatctcgataactgcctcgtattatttgaggtcgataatcattatcaggtgacaaagactgataagccactggtttcacttgtgaagaaagctcatcaactcttctaaaaagcaacgagaacaacccggtaatgtgtatgtgtacgcgtgcatgtgtgcgtgcacgcgcgcattgtcaagtctgcatatcaatccaatagtgcgctgcgtgaaatgatgtgaaactcagcctgataagataaggcgcaaaacgccattgcttacggtattcaaccatccactgtatgtttcctgtatgaagtgtgcatcccaccccccccc

SEQ ID NO: 3094 - DNA, 3132 bp, Zea Mays
gttttttttataaagattattgaactggtggtggaagagtttaagtgctaaatgtgacatacagttggattacgatctcatggattagatggtttgcttgcacgcttgcacagaaggactacttgcatagccgtcgttgccatgagtaaattgctggaggggatagtctaatgtgctaactgagccggctaacactcctttatgcattactgaggcctcgctagggtttaagcatttaggtaaccaaataaactcaatatgtctaggatggtagccagccagccaaccaaagatgccgaaagttcctctgttgtgaataatatagggctcagagcagagagcagagagcagccacaagttgggcggatagcacacacttgttcacgggatcgaccggatcagatgccgtcgtcctcgtccgcctccggcgtaggcctagggcggcggcggcctcccattgcagcaggggggcctagaagaagcgatagcagatggtggtgggcgagattaatggagaagaactatagtgatgctgagagttatcgcgcaaggaggccggaagagaggctgatcaacgattacctgctgcttgagtccgccgcacggaaggtcgccaccggcctcgcgtatctgttgctgacgtggtccaccgttgtcctccttggtggtttcgtctccgcgctcaagctcatcgacttttggtgtctggctgccattagtacgtcatttgcagtcaacagtctagcagatttgttcgagtacacgaggggatatatgttggcggcggccagtgtgtacgctggactacgtgatgatcggccatcatctaggagttgtcgcttgggtgtacatgtatccatcttgctcgctgaggccttgcttggggtgctgataactgtacattttgttgtggttcaagtccttacttttgcgccggtggttgccatagttctttcattgtccaggctaattgcaaacaactatggcaatgttggtgacgatgctgccaattcagcaaagctcaaggcatccctgcagattttctactctctcaccctggtgcagattaatgccttctacttctggaagatgctggtccttaggaagaaacattgtgcgtctgctgtggccaagaagtgcagatttggggagtggggcttccgcttggtttggtcatacattgaagaaaccaaaaccatgctcgagagagacggggcagtgctgcggggcagaaacctgatcaccttcgcagttggcttgctcggctccgaatcgctgcacgaccgtcgttctgcacttcgcatgctggacacgttcgtcggagacaaggtgtcagtagcaccctgcctgctgccttgcaggggtccccttgagaacctcatggaagcgctcgaggtgggcgatggcgagaccagggagcgtgccgctaggatcgttgcggctcttgctggcgatctccgccgcatcgatcagctccccagagcattgcatcacatggcttcactgcttcaagcctctgattatcggttccccagacccagaactacaactgcaactgatgcaagaacaacgacgacaagcatgcaagaacaacgacaacgacaagcagcagagagcaagcgcgggaggtttgggctgctattctgggcgatcctgtcttgtctcaacttctgggaagtcttggcgaaagagaaaaaggaagacaccttcccctctggcggcggaccaaagcagctcgtctctcaagggctgcttatcgttgagagactcgctcggcacccagcaaaccgtgcccagatatgcaacaacagcgtcctgctctcaaagctcacagcgcccctattctcccatgctttcctcgacaccgcggagcacggcagaggatgggttgttggcatgttagccacgtcgctgaggatcataaccaggctgcttattagggctcctggagaggccagcagagggctgcgtgacgggatcacaagcaacgcacaggcggtctctaacctgtccagggttctggaggaggaggacgacgccaagtttggcccggaactgaaagcagctgccgttgacatcctagcagaactagcgttgccttcatcagacaggtcttccacctcgaggttgggcaaggctgacatcgtcagggggctgtggtgcatcttccttgttcaagtggacgatggcgttgacggcagcaacactcagggagaggaacagcgacagcaggatagcacactgaggaagaaagctagcgaagcactggcacagatgctgtctgcagaactgcgtcatgttgctggccggcttactgacatgctggctaaaagtaagggctccacaagtcgagtaaggacagcaagaaccctcgagtgcttgtgttcacatatttctacagaacatggacagcctccaagactggatgctattgaaatgctgacaaaggttcttcagctgatactacggatcccatgcgaatcaaacaagctggagacggctgacgaggagcagcaagaagaagaggaattcctggtcgccttgctatcacttgccgtggtgatatgtgacggcatggtcgacgaacatggcttcagctgtgctgcgccccctcaagacatggtgccgctggtgagaaagcttaaggacataatacaggctaacaacacaaccacggtcgaatgcctgcggacagtgaagcttacctgcaagctggtcgtttcaatggcacagctcaagcccatgtgcatcaaagatttcacagagcacaatttcatggatgtactcttggagtctttgaagacgttgtcagatctcgataactgcctcgtattatttgaggtcgataatcattatcaggtgacaaagactgataagccactggtttcacttgtgaagaaagctcatcaactcttctaaaaagcaacgagaacaacccggtaatgtgtatgtgtacgcgtgcatgtgtgcgtgcacgcgcgcattgtcaagtctgcatatcaatccaatagtgcgctgcgtgaaatgatgtgaaactcagcctgataagataaggcgcaaaacgccattgcttacggtattcaaccatccactgtatgtttcctgtatgaagtgtgcatcccaccccccccc

SEQ ID NO: 3095 - DNA, 3102 bp, Zea Mays
gttttttttataaagattattgaactggtggtggaagagtttaagtgctaaatgtgacatacagttggattacgatctcatggattagatggtttgcttgcacgcttgcacagaaggactacttgcatagccgtcgttgccatgagtaaattgctggaggggatagtctaatgtgctaactgagccggctaacactcctttatgcattactgaggcctcgctagggtttaagcatttaggtaaccaaataaactcaatatgtctaggatggtagccagccagccaaccaaagatgccgaaagttcctctgttgtgaataatatagggctcagagcagagagcagagagcagccacaagttgggcggatagcacacacttgttcacgggatcgaccggatcagatgccgtcgtcctcgtccgcctccggcgtaggcctagggcggcggcggcctcccattgcagcaggggggcctagaagaagcgatagcagatggtggtgggcgagattaatggagaagaactatagtgatgctgagagttatcgcgcaaggaggccggaagagaggctgatcaacgattacctgctgcttgagtccgccgcacggaaggtcgccaccggcctcgcgtatctgttgctgacgtggtccaccgttgtcctccttggtggtttcgtctccgcgctcaagctcatcgacttttggtgtctggctgccattaatttgttcgagtacacgaggggatatatgttggcggcggccagtgtgtacgctggactacgtgatgatcggccatcatctaggagttgtcgcttgggtgtacatgtatccatcttgctcgctgaggccttgcttggggtgctgataactgtacattttgttgtggttcaagtccttacttttgcgccggtggttgccatagttctttcattgtccaggctaattgcaaacaactatggcaatgttggtgacgatgctgccaattcagcaaagctcaaggcatccctgcagattttctactctctcaccctggtgcagattaatgccttctacttctggaagatgctggtccttaggaagaaacattgtgcgtctgctgtggccaagaagtgcagatttggggagtggggcttccgcttggtttggtcatacattgaagaaaccaaaaccatgctcgagagagacggggcagtgctgcggggcagaaacctgatcaccttcgcagttggcttgctcggctccgaatcgctgcacgaccgtcgttctgcacttcgcatgctggacacgttcgtcggagacaaggtgtcagtagcaccctgcctgctgccttgcaggggtccccttgagaacctcatggaagcgctcgaggtgggcgatggcgagaccagggagcgtgccgctaggatcgttgcggctcttgctggcgatctccgccgcatcgatcagctccccagagcattgcatcacatggcttcactgcttcaagcctctgattatcggttccccagacccagaactacaactgcaactgatgcaagaacaacgacgacaagcatgcaagaacaacgacaacgacaagcagcagagagcaagcgcgggaggtttgggctgctattctgggcgatcctgtcttgtctcaacttctgggaagtcttggcgaaagagaaaaaggaagacaccttcccctctggcggcggaccaaagcagctcgtctctcaagggctgcttatcgttgagagactcgctcggcacccagcaaaccgtgcccagatatgcaacaacagcgtcctgctctcaaagctcacagcgcccctattctcccatgctttcctcgacaccgcggagcacggcagaggatgggttgttggcatgttagccacgtcgctgaggatcataaccaggctgcttattagggctcctggagaggccagcagagggctgcgtgacgggatcacaagcaacgcacaggcggtctctaacctgtccagggttctggaggaggaggacgacgccaagtttggcccggaactgaaagcagctgccgttgacatcctagcagaactagcgttgccttcatcagacaggtcttccacctcgaggttgggcaaggctgacatcgtcagggggctgtggtgcatcttccttgttcaagtggacgatggcgttgacggcagcaacactcagggagaggaacagcgacagcaggatagcacactgaggaagaaagctagcgaagcactggcacagatgctgtctgcagaactgcgtcatgttgctggccggcttactgacatgctggctaaaagtaagggctccacaagtcgagtaaggacagcaagaaccctcgagtgcttgtgttcacatatttctacagaacatggacagcctccaagactggatgctattgaaatgctgacaaaggttcttcagctgatactacggatcccatgcgaatcaaacaagctggagacggctgacgaggagcagcaagaagaagaggaattcctggtcgccttgctatcacttgccgtggtgatatgtgacggcatggtcgacgaacatggcttcagctgtgctgcgccccctcaagacatggtgccgctggtgagaaagcttaaggacataatacaggctaacaacacaaccacggtcgaatgcctgcggacagtgaagcttacctgcaagctggtcgtttcaatggcacagctcaagcccatgtgcatcaaagatttcacagagcacaatttcatggatgtactcttggagtctttgaagacgttgtcagatctcgataactgcctcgtattatttgaggtcgataatcattatcaggtgacaaagactgataagccactggtttcacttgtgaagaaagctcatcaactcttctaaaaagcaacgagaacaacccggtaatgtgtatgtgtacgcgtgcatgtgtgcgtgcacgcgcgcattgtcaagtctgcatatcaatccaatagtgcgctgcgtgaaatgatgtgaaactcagcctgataagataaggcgcaaaacgccattgcttacggtattcaaccatccactgtatgtttcctgtatgaagtgtgcatcccaccccccccc

SEQ ID NO: 3096 - DNA, 2804 bp, Zea Mays
gttttttttataaagattattgaactggtggtggaagagtttaagtgctaaatgtgacatacagttggattacgatctcatggattagatggtttgcttgcacgcttgcacagaaggactacttgcatagccgtcgttgccatgagtaaattgctggaggggatagtctaatgtgctaactgagccggctaacactcctttatgcattactgaggcctcgctagggtttaagcatttaggtaaccaaataaactcaatatgtctaggatggtagccagccagccaaccaaagatgccgaaagttcctctgttgtgaataatatagggctcagagcagagagcagagagcagccacaagttgggcggatagcacacacttgttcacgggatcgaccggatcagatgccgtcgtcctcgtccgcctccggcgtaggcctagggcggcggcggcctcccattgcagcaggggggcctagaagaagcgatagcagatggtggtgggcgagattaatggagaagaactatagtgatgctgagagttatcgcgcaaggaggccggaagagaggctgatcaacgattacctgctgcttgagtccgccgcacggaaggtcgccaccggcctcgcgtatctgttgctgacgtggtccaccgttgtcctccttggtggtttcgtctccgcgctcaagctcatcgacttttggtgtctggctgccattagtacgtcatttgcagtcaaattaatgccttctacttctggaagatgctggtccttaggaagaaacattgtgcgtctgctgtggccaagaagtgcagatttggggagtggggcttccgcttggtttggtcatacattgaagaaaccaaaaccatgctcgagagagacggggcagtgctgcggggcagaaacctgatcaccttcgcagttggcttgctcggctccgaatcgctgcacgaccgtcgttctgcacttcgcatgctggacacgttcgtcggagacaaggtgtcagtagcaccctgcctgctgccttgcaggggtccccttgagaacctcatggaagcgctcgaggtgggcgatggcgagaccagggagcgtgccgctaggatcgttgcggctcttgctggcgatctccgccgcatcgatcagctccccagagcattgcatcacatggcttcactgcttcaagcctctgattatcggttccccagacccagaactacaactgcaactgatgcaagaacaacgacgacaagcatgcaagaacaacgacaacgacaagcagcagagagcaagcgcgggaggtttgggctgctattctgggcgatcctgtcttgtctcaacttctgggaagtcttggcgaaagagaaaaaggaagacaccttcccctctggcggcggaccaaagcagctcgtctctcaagggctgcttatcgttgagagactcgctcggcacccagcaaaccgtgcccagatatgcaacaacagcgtcctgctctcaaagctcacagcgcccctattctcccatgctttcctcgacaccgcggagcacggcagaggatgggttgttggcatgttagccacgtcgctgaggatcataaccaggctgcttattagggctcctggagaggccagcagagggctgcgtgacgggatcacaagcaacgcacaggcggtctctaacctgtccagggttctggaggaggaggacgacgccaagtttggcccggaactgaaagcagctgccgttgacatcctagcagaactagcgttgccttcatcagacaggtcttccacctcgaggttgggcaaggctgacatcgtcagggggctgtggtgcatcttccttgttcaagtggacgatggcgttgacggcagcaacactcagggagaggaacagcgacagcaggatagcacactgaggaagaaagctagcgaagcactggcacagatgctgtctgcagaactgcgtcatgttgctggccggcttactgacatgctggctaaaagtaagggctccacaagtcgagtaaggacagcaagaaccctcgagtgcttgtgttcacatatttctacagaacatggacagcctccaagactggatgctattgaaatgctgacaaaggttcttcagctgatactacggatcccatgcgaatcaaacaagctggagacggctgacgaggagcagcaagaagaagaggaattcctggtcgccttgctatcacttgccgtggtgatatgtgacggcatggtcgacgaacatggcttcagctgtgctgcgccccctcaagacatggtgccgctggtgagaaagcttaaggacataatacaggctaacaacacaaccacggtcgaatgcctgcggacagtgaagcttacctgcaagctggtcgtttcaatggcacagctcaagcccatgtgcatcaaagatttcacagagcacaatttcatggatgtactcttggagtctttgaagacgttgtcagatctcgataactgcctcgtattatttgaggtcgataatcattatcaggtgacaaagactgataagccactggtttcacttgtgaagaaagctcatcaactcttctaaaaagcaacgagaacaacccggtaatgtgtatgtgtacgcgtgcatgtgtgcgtgcacgcgcgcattgtcaagtctgcatatcaatccaatagtgcgctgcgtgaaatgatgtgaaactcagcctgataagataaggcgcaaaacgccattgcttacggtattcaaccatccactgtatgtttcctgtatgaagtgtgcatcccaccccccccc

SEQ ID NO: 3097 - DNA, 3121 bp, Zea Mays
gttttttttataaagattattgaactggtggtggaagagtttaagtgctaaatgtgacatacagttggattacgatctcatggattagatggtttgcttgcacgcttgcacagaaggactacttgcatagccgtcgttgccatgagtaaattgctggaggggatagtctaatgtgctaactgagccggctaacactcctttatgcattactgaggcctcgctagggtttaagcatttaggtaaccaaataaactcaatatgtctaggatggtagccagccagccaaccaaagatgccgaaagttcctctgttgtgaataatatagggctcagagcagagagcagagagcagccacaagttgggcggatagcacacacttgttcacgggatcgaccggatcagatgccgtcgtcctcgtccgcctccggcgtaggcctagggcggcggcggcctcccattgcagcaggggggcctagaagaagcgatagcagatggtggtgggcgagattaatggagaagaactatagtgatgctgagagttatcgcgcaaggaggccggaagagaggctgatcaacgattacctgctgcttgagtccgccgcacggaaggtcgccaccggcctcgcgtatctgttgctgacgtggtccaccgttgtcctccttggtggtttcgtctccgcgctcaagctcatcgacttttggtgtctggctgccattagtacgtcatttgcagtcaaatttgttcgagtacacgaggggatatatgttggcggcggccagtgtgtacgctggactacgtgatgatcggccatcatctaggagttgtcgcttgggtgtacatgtatccatcttgctcgctgaggccttgcttggggtgctgataactgtacattttgttgtggttcaagtccttacttttgcgccggtggttgccatagttctttcattgtccaggctaattgcaaacaactatggcaatgttggtgacgatgctgccaattcagcaaagctcaaggcatccctgcagattttctactctctcaccctggtgcagattaatgccttctacttctggaagatgctggtccttaggaagaaacattgtgcgtctgctgtggccaagaagtgcagatttggggagtggggcttccgcttggtttggtcatacattgaagaaaccaaaaccatgctcgagagagacggggcagtgctgcggggcagaaacctgatcaccttcgcagttggcttgctcggctccgaatcgctgcacgaccgtcgttctgcacttcgcatgctggacacgttcgtcggagacaaggtgtcagtagcaccctgcctgctgccttgcaggggtccccttgagaacctcatggaagcgctcgaggtgggcgatggcgagaccagggagcgtgccgctaggatcgttgcggctcttgctggcgatctccgccgcatcgatcagctccccagagcattgcatcacatggcttcactgcttcaagcctctgattatcggttccccagacccagaactacaactgcaactgatgcaagaacaacgacgacaagcatgcaagaacaacgacaacgacaagcagcagagagcaagcgcgggaggtttgggctgctattctgggcgatcctgtcttgtctcaacttctgggaagtcttggcgaaagagaaaaaggaagacaccttcccctctggcggcggaccaaagcagctcgtctctcaagggctgcttatcgttgagagactcgctcggcacccagcaaaccgtgcccagatatgcaacaacagcgtcctgctctcaaagctcacagcgcccctattctcccatgctttcctcgacaccgcggagcacggcagaggatgggttgttggcatgttagccacgtcgctgaggatcataaccaggctgcttattagggctcctggagaggccagcagagggctgcgtgacgggatcacaagcaacgcacaggcggtctctaacctgtccagggttctggaggaggaggacgacgccaagtttggcccggaactgaaagcagctgccgttgacatcctagcagaactagcgttgccttcatcagacaggtcttccacctcgaggttgggcaaggctgacatcgtcagggggctgtggtgcatcttccttgttcaagtggacgatggcgttgacggcagcaacactcagggagaggaacagcgacagcaggatagcacactgaggaagaaagctagcgaagcactggcacagatgctgtctgcagaactgcgtcatgttgctggccggcttactgacatgctggctaaaagtaagggctccacaagtcgagtaaggacagcaagaaccctcgagtgcttgtgttcacatatttctacagaacatggacagcctccaagactggatgctattgaaatgctgacaaaggttcttcagctgatactacggatcccatgcgaatcaaacaagctggagacggctgacgaggagcagcaagaagaagaggaattcctggtcgccttgctatcacttgccgtggtgatatgtgacggcatggtcgacgaacatggcttcagctgtgctgcgccccctcaagacatggtgccgctggtgagaaagcttaaggacataatacaggctaacaacacaaccacggtcgaatgcctgcggacagtgaagcttacctgcaagctggtcgtttcaatggcacagctcaagcccatgtgcatcaaagatttcacagagcacaatttcatggatgtactcttggagtctttgaagacgttgtcagatctcgataactgcctcgtattatttgaggtcgataatcattatcaggtgacaaagactgataagccactggtttcacttgtgaagaaagctcatcaactcttctaaaaagcaacgagaacaacccggtaatgtgtatgtgtacgcgtgcatgtgtgcgtgcacgcgcgcattgtcaagtctgcatatcaatccaatagtgcgctgcgtgaaatgatgtgaaactcagcctgataagataaggcgcaaaacgccattgcttacggtattcaaccatccactgtatgtttcctgtatgaagtgtgcatcccaccccccccc

SEQ ID NO: 3098 - DNA, 2904 bp, Zea Mays
gttttttttataaagattattgaactggtggtggaagagtttaagtgctaaatgtgacatacagttggattacgatctcatggattagatggtttgcttgcacgcttgcacagaaggactacttgcatagccgtcgttgccatgagtaaattgctggaggggatagtctaatgtgctaactgagccggctaacactcctttatgcattactgaggcctcgctagggtttaagcatttaggtaaccaaataaactcaatatgtctaggatggtagccagccagccaaccaaagatgccgaaagttcctctgttgtgaataatatagggctcagagcagagagcagagagcagccacaagttgggcggatagcacacacttgttcacgggatcgaccggatcagatgccgtcgtcctcgtccgcctccggcgtaggcctagggcggcggcggcctcccattgcagcaggggggcctagaagaagcgatagcagatggtggtgggcgagattaatggagaagaactatagtgatgctgagagttatcgcgcaaggaggccggaagagaggctgatcaacgattacctgctgcttgagtccgccgcacggaaggtcgccaccggcctcgcgtatctgttgctgacgtggtccaccgttgtcctccttggtggtttcgtctccgcgctcaagctcatcgacttttggtgtctggctgccattagtacgtcatttgcagtcaagctaattgcaaacaactatggcaatgttggtgacgatgctgccaattcagcaaagctcaaggcatccctgcagattttctactctctcaccctggtgcagattaatgccttctacttctggaagatgctggtccttaggaagaaacattgtgcgtctgctgtggccaagaagtgcagatttggggagtggggcttccgcttggtttggtcatacattgaagaaaccaaaaccatgctcgagagagacggggcagtgctgcggggcagaaacctgatcaccttcgcagttggcttgctcggctccgaatcgctgcacgaccgtcgttctgcacttcgcatgctggacacgttcgtcggagacaaggtgtcagtagcaccctgcctgctgccttgcaggggtccccttgagaacctcatggaagcgctcgaggtgggcgatggcgagaccagggagcgtgccgctaggatcgttgcggctcttgctggcgatctccgccgcatcgatcagctccccagagcattgcatcacatggcttcactgcttcaagcctctgattatcggttccccagacccagaactacaactgcaactgatgcaagaacaacgacgacaagcatgcaagaacaacgacaacgacaagcagcagagagcaagcgcgggaggtttgggctgctattctgggcgatcctgtcttgtctcaacttctgggaagtcttggcgaaagagaaaaaggaagacaccttcccctctggcggcggaccaaagcagctcgtctctcaagggctgcttatcgttgagagactcgctcggcacccagcaaaccgtgcccagatatgcaacaacagcgtcctgctctcaaagctcacagcgcccctattctcccatgctttcctcgacaccgcggagcacggcagaggatgggttgttggcatgttagccacgtcgctgaggatcataaccaggctgcttattagggctcctggagaggccagcagagggctgcgtgacgggatcacaagcaacgcacaggcggtctctaacctgtccagggttctggaggaggaggacgacgccaagtttggcccggaactgaaagcagctgccgttgacatcctagcagaactagcgttgccttcatcagacaggtcttccacctcgaggttgggcaaggctgacatcgtcagggggctgtggtgcatcttccttgttcaagtggacgatggcgttgacggcagcaacactcagggagaggaacagcgacagcaggatagcacactgaggaagaaagctagcgaagcactggcacagatgctgtctgcagaactgcgtcatgttgctggccggcttactgacatgctggctaaaagtaagggctccacaagtcgagtaaggacagcaagaaccctcgagtgcttgtgttcacatatttctacagaacatggacagcctccaagactggatgctattgaaatgctgacaaaggttcttcagctgatactacggatcccatgcgaatcaaacaagctggagacggctgacgaggagcagcaagaagaagaggaattcctggtcgccttgctatcacttgccgtggtgatatgtgacggcatggtcgacgaacatggcttcagctgtgctgcgccccctcaagacatggtgccgctggtgagaaagcttaaggacataatacaggctaacaacacaaccacggtcgaatgcctgcggacagtgaagcttacctgcaagctggtcgtttcaatggcacagctcaagcccatgtgcatcaaagatttcacagagcacaatttcatggatgtactcttggagtctttgaagacgttgtcagatctcgataactgcctcgtattatttgaggtcgataatcattatcaggtgacaaagactgataagccactggtttcacttgtgaagaaagctcatcaactcttctaaaaagcaacgagaacaacccggtaatgtgtatgtgtacgcgtgcatgtgtgcgtgcacgcgcgcattgtcaagtctgcatatcaatccaatagtgcgctgcgtgaaatgatgtgaaactcagcctgataagataaggcgcaaaacgccattgcttacggtattcaaccatccactgtatgtttcctgtatgaagtgtgcatcccaccccccccc

SEQ ID NO: 3099 - DNA, 3129 bp, Zea Mays
gttttttttataaagattattgaactggtggtggaagagtttaagtgctaaatgtgacatacagttggattacgatctcatggattagatggtttgcttgcacgcttgcacagaaggactacttgcatagccgtcgttgccatgagtaaattgctggaggggatagtctaatgtgctaactgagccggctaacactcctttatgcattactgaggcctcgctagggtttaagcatttaggtaaccaaataaactcaatatgtctaggatggtagccagccagccaaccaaagatgccgaaagttcctctgttgtgaataatatagggctcagagcagagagcagagagcagccacaagttgggcggatagcacacacttgttcacgggatcgaccggatcagatgccgtcgtcctcgtccgcctccggcgtaggcctagggcggcggcggcctcccattgcagcaggggggcctagaagaagcgatagcagatggtggtgggcgagattaatggagaagaactatagtgatgctgagagttatcgcgcaaggaggccggaagagaggctgatcaacgattacctgctgcttgagtccgccgcacggaaggtcgccaccggcctcgcgtatctgttgctgacgtggtccaccgttgtcctccttggtggtttcgtctccgcgctcaagctcatcgacttttggtgtctggctgccattagtacgtcatttgcagtcaatctagcagatttgttcgagtacacgaggggatatatgttggcggcggccagtgtgtacgctggactacgtgatgatcggccatcatctaggagttgtcgcttgggtgtacatgtatccatcttgctcgctgaggccttgcttggggtgctgataactgtacattttgttgtggttcaagtccttacttttgcgccggtggttgccatagttctttcattgtccaggctaattgcaaacaactatggcaatgttggtgacgatgctgccaattcagcaaagctcaaggcatccctgcagattttctactctctcaccctggtgcagattaatgccttctacttctggaagatgctggtccttaggaagaaacattgtgcgtctgctgtggccaagaagtgcagatttggggagtggggcttccgcttggtttggtcatacattgaagaaaccaaaaccatgctcgagagagacggggcagtgctgcggggcagaaacctgatcaccttcgcagttggcttgctcggctccgaatcgctgcacgaccgtcgttctgcacttcgcatgctggacacgttcgtcggagacaaggtgtcagtagcaccctgcctgctgccttgcaggggtccccttgagaacctcatggaagcgctcgaggtgggcgatggcgagaccagggagcgtgccgctaggatcgttgcggctcttgctggcgatctccgccgcatcgatcagctccccagagcattgcatcacatggcttcactgcttcaagcctctgattatcggttccccagacccagaactacaactgcaactgatgcaagaacaacgacgacaagcatgcaagaacaacgacaacgacaagcagcagagagcaagcgcgggaggtttgggctgctattctgggcgatcctgtcttgtctcaacttctgggaagtcttggcgaaagagaaaaaggaagacaccttcccctctggcggcggaccaaagcagctcgtctctcaagggctgcttatcgttgagagactcgctcggcacccagcaaaccgtgcccagatatgcaacaacagcgtcctgctctcaaagctcacagcgcccctattctcccatgctttcctcgacaccgcggagcacggcagaggatgggttgttggcatgttagccacgtcgctgaggatcataaccaggctgcttattagggctcctggagaggccagcagagggctgcgtgacgggatcacaagcaacgcacaggcggtctctaacctgtccagggttctggaggaggaggacgacgccaagtttggcccggaactgaaagcagctgccgttgacatcctagcagaactagcgttgccttcatcagacaggtcttccacctcgaggttgggcaaggctgacatcgtcagggggctgtggtgcatcttccttgttcaagtggacgatggcgttgacggcagcaacactcagggagaggaacagcgacagcaggatagcacactgaggaagaaagctagcgaagcactggcacagatgctgtctgcagaactgcgtcatgttgctggccggcttactgacatgctggctaaaagtaagggctccacaagtcgagtaaggacagcaagaaccctcgagtgcttgtgttcacatatttctacagaacatggacagcctccaagactggatgctattgaaatgctgacaaaggttcttcagctgatactacggatcccatgcgaatcaaacaagctggagacggctgacgaggagcagcaagaagaagaggaattcctggtcgccttgctatcacttgccgtggtgatatgtgacggcatggtcgacgaacatggcttcagctgtgctgcgccccctcaagacatggtgccgctggtgagaaagcttaaggacataatacaggctaacaacacaaccacggtcgaatgcctgcggacagtgaagcttacctgcaagctggtcgtttcaatggcacagctcaagcccatgtgcatcaaagatttcacagagcacaatttcatggatgtactcttggagtctttgaagacgttgtcagatctcgataactgcctcgtattatttgaggtcgataatcattatcaggtgacaaagactgataagccactggtttcacttgtgaagaaagctcatcaactcttctaaaaagcaacgagaacaacccggtaatgtgtatgtgtacgcgtgcatgtgtgcgtgcacgcgcgcattgtcaagtctgcatatcaatccaatagtgcgctgcgtgaaatgatgtgaaactcagcctgataagataaggcgcaaaacgccattgcttacggtattcaaccatccactgtatgtttcctgtatgaagtgtgcatcccaccccccccc

SEQ ID NO: 3100 - DNA, 1276 bp, Zea Mays
caattggaaagcaacacagattcaatgctataatgacctatttatttcattgtctccacatcaaaacatgcatggcacttgatagaggcagattactgataaccagaagcacacgatggcgccacctgaatttattctttcagtttgttactcattaactttaatcagcaacacctcttgtttatacaaaggtttgctccggttagcactgaatcatttacaggttcataaatcacaacagcctccaatccaacccttcgtttccacaggtgacagacaatcaaaaccactttttgctcagcagtttcgaaacggtcaagtctgtgtcgccgaatccatccataacggccttcgcggagtgaaattcggctcttgcggtaaagctgggggggagacggagacatgaactttgtaaacgacaagcacaggtatcatggccgagatatgcaagttacacggcagacagggccagcttacctgcttcgaacaactatgcatggcatgccaatgcgttcggctgcaaggacaccagattggctgcccgcaacaaggatgcagctttgcacgtcgcacccaacgtattctgaaccagctcggagagcagctattaccttgtcagagctggtaacagtgacaaggtcaaaattagacaatattcttttagggaggtatggagattatgcacattcagtgttagcgacaacctttcggatgctgtgatgtcaacactaagttttaggatcgatgcaaccttttctgcaatcctctgcttctcagccttctgggcttccctgacaagttgctcatccaaaccggatgtgactcctttaccaagaacaagttgcccataaaagctttcttcaacctcaacgtttccaacaatctttatttttgagattctttcgggacctaacttcatagctatagatctagagtcacatagaaaagaaatgagaacacagtattttttatgccatctatccttaggaaccatagtagtatgttaaacttgatagaataccattggcacattagtttgaaacaaattacaataccagacagtagttatttttaacataaaccataccttgaaatcttttctccatttctcccatatgcagccaatatggccaaaggaacaccttcaccaagtgcatcgtcaatgaacctttaaatgatttcattcacagaatcacatacaagacaatttaaagttcacgaacgagtcattcatatcttatggcaagcaaagagtacagaacagagaccaaagctg

SEQ ID NO: 3101 - DNA, 607 bp, Zea Mays
gtcagatcgcctttcccccatagattcatgttgattggcggctacttttttcattccaaagcaaagaatcattcattgtttgaaaaactggcaacctttgccttgattcgcactcaaagcgagagtaagtagcttttcagatgagcacaaccattttgcagcaccaagaagcaccattttttccttaagattaacttagaataaagcctgacgggggtaacagcatccatcgatccgcagtccatgctgtttgatgcatgggtctgctgaaaccgaggatgaacacagcactaacaactgacacagagcgaccttgcaatcaaaaacacagatgggcaacaacaaacacgacacgaacgaagataaaccctctggactagggtaaacatcacggtagcgaacaggataacttggccgcgcgggccccaccgctcagttcctccagttcccgtcggagttgccgtagccgccgacgaagcagcggtactcaacatccgacgccgccatctcgatccgctcacccacgaacccgaaccccggagaacctcacgaacccgaacccgaaccggagggggaggagaagccaacccacctctaagaaagcacg

SEQ ID NO: 3102 - DNA, 594 bp, Zea Mays
gctacttttttcattccaaagcaaagaatcattcattgtttgaaaaactggcaacctttgccttgattcgcactcaaagcgagagtaagtagcttttcagatgagcacaaccattttgcagcaccaagaagcaccattttttccttaagattaacttagaataaagcctgacgggggtaacagcatccatcgatccgcagtccatgctgtttgatgcatgggtctgctgaaaccgaggatgaacacagcactaacaactgacacagagcgaccttgcaatcaaaaacacagatgggcaacaacaaacacgacacgaacgaagataaaccctctggactagggtaaacatcacggtagcgaacaggataacttggccgcgcgggccccaccgctcagttcctccagttcccgtcggagttgccgtagccgccgccacggttgccaccgccgtagccgccgacgaagcagcggtactcaacatccgacgccgccatctcgatccgctcacccacgaacccgaaccccggagaacctcacgaacccgaacccgaaccggagggggaggagaagccaacccacctctaagaaagcacg

SEQ ID NO: 3103 - DNA, 511 bp, Zea Mays
cttttttcattccaaagcaaagaatcattcattgtttgaaaaactggcaacctttgccttgattcgcactcaaagcgagagtaagtagcttttcagatgagcacaaccattttgcagcaccaagaagcaccattttttccttaagattaacttagaataaagcctgacgggggtaacagcatccatcgatccgcagtccatgctgtttgatgcatgggtctgctgaaaccgaggatgaacacagcactaacaactgacacagagcgaccttgcaatcaaaaacacagatgggcaacaacaaacacgacacgaacgaagataaaccctctggactagggtaaacatcacggtagcgaacaggataacttggccgccgacgaagcagcggtactcaacatccgacgccgccatctcgatccgctcacccacgaacccgaaccccggagaacctcacgaacccgaacccgaaccggagggggaggagaagccaacccacctctaagaaagcacg

SEQ ID NO: 3104 - DNA, 562 bp, Zea Mays
tttcattccaaagcaaagaatcattcattgtttgaaaaactggcaacctttgccttgattcgcactcaaagcgagagtaagtagcttttcagatgagcacaaccattttgcagcaccaagaagcaccattttttccttaagattaacttagaataaagcctgacgggggtaacagcatccatcgatccgcagtccatgctgtttgatgcatgggtctgctgaaaccgaggatgaacacagcactaacaactgacacagagcgaccttgcaatcaaaaacacagatgggcaacaacaaacacgacacgaacgaagataaaccctctggactagggtaaacatcacggtagcgaacaggataacttggccgcgcgggccccaccgctcagttcctccagttcccgtcggagttgccgtagccgccgccgacgaagcagcggtactcaacatccgacgccgccatctcgatccgctcacccacgaacccgaaccccggagaacctcacgaacccgaacccgaaccggagggggaggagaagccaacccacctctaagaaagcacg

SEQ ID NO: 3105 - DNA, 5295 bp, Zea Mays
gaattattgaagctctagcaattattttcctattagaaatctatttataaatcattttctctggttttattatgttctggactgggcctcatttcctgcaaagtacagggggctcggggtaataatccgcagacacagagtacagtgcaagtggactgcgggtttgtttctctaaaactcagggtctctttagcaaaagtctcgggcgaaggggtattgtaatatctgggtcgttggatcaattctggatggcccggattaggccgtggcttttatgaaagggggtatgatgaacccaccgtgggatcaagatcggacgctcacaattaactcgaagctcatccgagtcagtacgcaatcacgatcgtacgatctaagatctatggttaacaacgcacccagcaagattcaatctgaaccgcccatagccgatcgacggtccacatccttcttccacctcccgacgacgcccagcggcggcgccctgcgctagcggtgatggctcaccggagacacgcgacccggcatcagtacacccaaatgattactcaagaggttcaaaacgcagtagggaacaaggcaaatcaaaatagggagggcacaccgtgaatcacgccgcacagcttcctggccacggcgcgcggcggcatcccaaattccggtgacgaacccgtgcaggtattatgacacaaatagtgcaagggctcgtgcagaggaaagaggagacgatgggataacctaaggagcagtagattaccggaggcaaggcaacaacgaggccgaccatggagcagagcaacactggcggaagacctcaactccgggaaagaaaccagggcgacccggtcaccaatcaaattcgacgaggccacgaagacacgcggattctaccgtgggtaccccacaacgaccagccgaggcccaggcactggttggttgagagtgtaggcaacgttggccatggcggcgactggaacgcgatcacaccaatccaagcaatggatgcgttctgtgttttcgtgcgggcaacagtaggaaaggggagggagccgcagggcgtccgggttttatccccaggatgaattggacccgtcagcaacggcgcagcgggagagggggaaggagcacgccgcggatctcgcgaattcgttgctgtgcgcgaccgactcggcagggaagacccagacaagcgggccccacatggcagtgggacgctagcgcgcagagcagaaggcctgtcgacccggtgggttcgtgggccgcgcggaacaggaaagaatgtgggctggcatcagagaaataggcccatggaacggtttgggggtattttctttttttttttgctttcttctttattcctaattcatttgaatttaaattttgaattccacttaagtgcaaattcaagttcatgttaactatgcaatttattcacaccatcatgtggtgaagttattaaattttaatattgttttatattgaataatatttctttcttattatgttttgattagtagtgttgatatggttgttaatatttaaatgcatagcaaacaaaactccgacgagatgcacactttcttttattttagtgtctttggttcgatttaatcactcttcattttatgtatgctctgttcatgatgcaaataaggcacataaaataaggaaatcaccatataatgcttttatacaatcttgagtattacaagtctgcccgaggcaaggcttacccatgacgaggcatgtgaccagttaaagggtcctcggtcatcaagcctacatcgagacggtccttaatcgactcagacggagacactacaccgagactcctttctcgtgcaagtcacccgcccggtctcagcttaatcatttcaaacccaaagtttggtacctgacagaggtacatcttttccgatgttgaatccatcaaggcctttgacagatccaccaccaagttttattttcgaaaacatcccacccacctttaccacatcatattttgtaaaaacaaaacattttgttttctaaagcagggctaagcatcaaaatcttttgtaaaacgggtggtcaaggaaggtaatcgaattcaaggaaggtaatgcaggaattgttttatcaatcaactcctatcacctaatgcatcaagcaagtgagaaagattttaaaaacatcaaggaaggtggcaaatgcaccggggcttgcctgagtaacactaggttagtgttgttagatgacgtccacttgacgatcagcctttattccgatactcgctccattgtccatcttcaggttggtccatctgctttatcctgcggattatcccgtgcttggggtcgacttggctcatcttccgcatcatacgattagttaacgtacctgaatgaaatgcattatgcatatgaatgcatataaggaacaataacaccagactttacgatgctacacaaagagaaataacctacttaatgacgagatattgcggacactagctatcgatatacgactacgcgtaataattacgcttctctaaattatacgaatctaacacaaacatcacgaacaacaaaccatacactttaaacataattagcctaaacataactcatcagctacttaattaaatgctaaatttatctcttgctttgtaaattatatcactttgcttacaaaaactaatttaattttatttcgcatcacacatatttatttaatctatctaacaattcggctaacaacttacgcgccagtaataaatttagcttagattcactactttgattaacgaatacgaatccgggtttttcgtcgattacatgttaaatatcgtactaatattaaattactctaaactaataacccaaacaaactacctagaacgcaataactattataacgcaagggatcagcaacatgtatgactaccgatcaaatcaccataaacgattcaggtagtctaataaatatcatatttagtcgactggaataacgaagccacttaccgtccattaaatccgacttaaagcttgcgagaacgtcgacagtctccgaataaaatcttcgatcaaaccgctgacgagtatagaacggagcttcactttctcttctatccacaattctcggaatctcttcatattaagtagaacgccgtataaacatcgatgattcttgttctagcctttcgccgagcacttggggcatcgaccacgggcttgcttctccacactgttttgggattcttttgtcggcgcgaacacaagtcggagacaatacgtagggattggcatcgaagcgaggcgacagaacaacgacaagtaacaaggagggatctacaatattgttgtagacccgacacgaagatgaacaacgatgaactagcgagctaaccacggcgaggaatgtcttgacgcggatgagcaatggtgactagcggactcagaatagtggagtgaggtgcacgaccagctagcaaagatgagtggatgcggcacggaagcgaaaacagaacttgatggccggtacggatggaaggagcttgatgggcgaataagaaatcaacgaccggtacaaaaggcacgacgctgggcataatgaaacgacgacgtgcccaaacctcgggtcgccgaccatgcccgcgaccattacccaccacgctttcgctgcgcccagcgatgcgacgaccagggccgtagcgaataaggagctgggcgggtttgacggccacggatgagcacagatcagcgcgacagagacgaagaccgagcgcggcagcaggaagggtgtgcggtcatgatcccggcgcgcgactagcggagaaactcacgcgcgcggcgagcaccggtgagcagcggggcgcagtttagcgagggaggagagaggtcctcgcgcagagaaaaaccagggagaagagctgggcgcagcagcaaacagagagggagtgagctgcacggccggaagctccatggctgggaaggattcgaccggcccggaggaacagggggcacggtccgagccgaggagaagaccaaagcaggcgcggccggacgaggactggagcaagaacagcgcgcgcagaggagctgggggagcagagctccggccgagcgcgccatgggagcttcaacctacgctaaaaaaaacgagcaggaagggcgtgagccagggagatccggtcggccatggggctggggagcgagcgggacgcagagggcagggccgagcgccgtggcgagctggaagtgcgcgcggccaccagagaagaagctgcgcgcggcaaggagctggggccaagcagccgccatggggaagcagagcagccggtgaccttccatgggcggcgtctacggagaggggcggcaggggaagggcagagggagctcgggaatggagcgcgtgctagcaggaggagcggccggggctggggcgagccaggaatggagctcatgccggcgaggaagaagacgcagggtgccgtgggagctcgtagggagcgagaggagcagaacacggtgggatatttgaaaaatcccgggcgggacgcaggggattctgcgatggacagcgaggcttgacggcaggcgaccgcggcgtgtagggaaaatatgaaaacagcagccgcggcgagatgggcagaggtgagctcgagggcgcgcagaacgccgagcagggagatgaaaagcggctacgtgcatgactgaatccgagcagaacgcagacgcgcagggacgagcgggagcagaatgctgggcgcgcagaaaagcgagccaagcacgcacacgcggaaaagggagctgggcacacaacgcgcaggagctctggccgacgccatggctgggagctggggcgagcagcacgcaggcacggcgagctggagtgccgcggctgagggagagagaagaggagatggctgggcgcgatagagagctccagcgagcagagaggactgaagggtgctcggcggccatggcagagggagcacggacgccatgggaaacaggggcacggcgaggaagaagacgtgcgcaggggagtaaacttcgcgcgcgccagggactgagctaggggcgcggcaaagggcgagtccaagcttgacgatggcagccatggggagcagggccgagatccgagcaggacgccggccacggagaagaagcaaagcacggctgatatttgaagactcctaggggcggcggcgcgataaggctgggcggagggtgggctcaagctggaggcgagctcggccgggacctgggcaccgggcgctgaggagttcaacggatgaagaagataagcctg

SEQ ID NO: 3106 - DNA, 1994 bp, Zea Mays
cacgtcgtctcttgcttcaaatagagaccatgccaaagcttatctctctcatataggcatgcatagagagcacgtctcctggtaaatattttcaaatacgtatagcgggaagtctcacaaagccgttgctctcaggctcaggttcttatctcatcgcgcgtcaacttcttgctcaggccacgtcttgtctcagctcgttcttcatctctgcgctggctattctcaagctctagccgtgtttccctgctccgcagctccacaaaacggggcgctcaccgtctgcacctctgctcccgtgttgtcggcacctggacgccgtactcggcacaccggtgagctcgaccacggccgcggctacctggacgtgtccgcatcatgcgccgtcgatcaccaacccagctagtcaccgcaccaccatccactgtttgcgctccagccagatctggccgtcggccatgacctctcaatactcggctcccaggcgtgtctccctgctccatagtgcccttcaccttccgtcgtcgcaacagcaaccccttgctcctcgtcgttaatacctgtcgcgttcgcgacatgctcgttgacctcgacgatttatctttcaattgcatgctactcgtgttgggatccgaagctctctatcgcgctcgactctggatgtcatcattccgtgtgtcatcaagaaatctcgagagtgggtaaagaagtgattctcgcgtggcgctcgtcaaatattcgacaaacttcttgaacatattatcgttgttatttctgcgaatttcaagtcggatttaggtaagctgattcactatttctattattttgttttaatgattggatgtgtttgattaaattactggtcgtaatgatagtcattatatgctatttttatttaaaaataggttattaatgtttatgtaatttctgataataattattaattagacattttatatgtatacggtaaagtttagacggtaatgtaatttaggcgaggagtgctttggtggtggatacgatcatacgaatgactagggtaatttaattgatttaatatttgcgatgtgcttgtgatcgcaattgtagcgtagacacatcgtgtaaagctcgggtttaaaatacagtttaggcgaaggagattttggtagacaagtatacgatgttagtgaatcgatgacgttaaaaataggtttagattaaatcagctagctgacatgttttgttagggtagtcgtattagattcgactaatcttgagaagcatgattgttgtacttagtcatctgtcgttggccagtgtacataagtactctagatatttaagttgctgagaaattagttttaccgaacgctatgttatctgttaatgtggtatctgttagagtaaatattgtgatgtttgatttagttaagtgtgtaattcaacttaattaagacgcatagtttaaggaattaattagattgttcctatacttattttaagtcgttggtatttgttgggggccttcggcctccgaaggtcctcaaaaacgtaattgactatgttctccaaaacaaatatgtgaacaggtaccttcgaagtcaagttgcgagtatgcaaaggcatggctaagacgaagctcaactgagccggcaatcacgacgaaggataagacgatcacgaagctatgagcagaagagtttcggcataacggcgaaaagggaaaccgacttaaagatgaaaagccagattaaacctcgaagaattactatagagttattgataaatgtaaagggcattaatgtaatcttgcatgggctgcgacccgtgcctataaataggtgaacagtattcccgtactgttcacgctgatttggcattgacttttgcgtcacacttgtatccttaccttctaacgagccgaaggtacatttgtaatttgatattatttctattccgtcatcataataaaatagaaacgaattgtcaatagcatataatcgtttatattaact

SEQ ID NO: 3107 - DNA, 1201 bp, Zea Mays
gtcgtctcttgcttcaaatagagaccatgccaaagcttatctctctcatataggcatgcatagagagcacgtctcctggtaaatattttcaaatacgtatagcgggaagtctcacaaagccgttgctctcaggctcaggttcttatctcatcgcgcgtcaacttcttgctcaggccacgtcttgtctcagctcgttcttcatctctgcgctggctattctcaagctctagccgtgtttccctgctccgcagctccacaaaacggggcgctcaccgtctgcacctctgctcccgtgttgtcggcacctggacgccgtactcggcacaccggtgagctcgaccacggccgcggctacctggacgtgtccgcatcatgcgccgtcgatcaccaacccagctagtcaccgcaccaccatccactgtttgcgctccagccagatctggccgtcggccatgacctctcaatactcggctcccaggcgtgtctccctgctccatagtgcccttcaccttccgtcgtcgcaacagcaaccccttgctcctcgtcgttaatacctgtcgcgttcgcgacatgctcgttgacctcgacgatttatctttcaattgcatgctactcgtgttgggatccgaagctctctatcgcgctcgactctggatgtcatcattccgtgtgtcatcaagaaatctcgagagtgggtaaagaagtgattctcgcgtggcgctcgtcaaatattcgacaaacttcttgaacatattatcgttgttatttctgcgaatttcaagtcggatttaggtaccttcgaagtcaagttgcgagtatgcaaaggcatggctaagacgaagctcaactgagccggcaatcacgacgaaggataagacgatcacgaagctatgagcagaagagtttcggcataacggcgaaaagggaaaccgacttaaagatgaaaagccagattaaacctcgaagaattactatagagttattgataaatgtaaagggcattaatgtaatcttgcatgggctgcgacccgtgcctataaataggtgaacagtattcccgtactgttcacgctgatttggcattgacttttgcgtcacacttgtatccttaccttctaacgagccgaaggtacatttgtaatttgatattatttctattccgtcatcataataaaatagaaacgaattgtcaatagcatat

SEQ ID NO: 3108 - DNA, 836 bp, Zea Mays
gtcgtctcttgcttcaaatagagaccatgccaaagcttatctctctcatataggcatgcatagagagcacgtctcctggtaaatattttcaaatacgtatagcgggaagtctcacaaagccgttgctctcaggctcaggttcttatctcatcgcgcgtcaacttcttgctcaggccacgtcttgtctcagctcgttcttcatctctgcgctggctattctcaagctctagccgtgtttccctgctccgcagctccacaaaacggggcgctcaccgtctgcacctctgctcccgtgttgtcggcacctggacgccgtactcggcacaccggtgagctcgaccacggccgcggctacctggacgtgtccgcatcatgcgccgtcgatcaccaacccagctagtcaccgcaccaccatccactgtttgcgctccagccagatctggccgtcggccatgacctctcaatactcggctcccaggcgtgtctccctgctccatagtgcccttcaccttccgtcgtcgcaacagcaaccccttgctcctcgtcgttaatacctgtcgcgttcgcgacatgctcgttgacctcgacgatttatctttcaattgcatgctactcgtgttgggatccgaagctctctatcgcgctcgactctggatgtcatcattccgtgtgtcatcaagaaatctcgagagtgggtaaagaagtgattctcgcgtggcgctcgtcaaatattcgacaaacttcttgaacatattatcgttgttatttctgcgaatttcaagtcggatttaggtaccttcgaagtcaagttgcgagtatgcaaaggcatggctaag

SEQ ID NO: 3109 - DNA, 2343 bp, Zea Mays
cgcccgcgcggaaatggcccctcggcccgacgtttcgtcggtgaatcctcgagctgctgccgtcacgtatgaggaactggagcgtcggggccgttgcggccttcgaatttgcgctctggagctccgtctggtgcttcctggtcgtctccgtcaccagtttctgagccgggatcctactcctcttctcgcgctactatcagtgcagtgcagtaggccactggactgctgtcgtgccggggtagttgcggccaaaggaacaagccaccttctccgagttggaattaggtgcggccctccgcatcaaaagggctcgtttggtgggaactttcgcttgcctactcgctgctgcctgcttcggtggtcctccgtgacggggattgctggaattggggttggaaggacattctgactgaattgctcgagtgaggggtggggttttggcgcccgttgcttgaggatggaggagaggccatcgtccgaggcaggcgcgggcaactcgagggccgaggacgacttcaggagctgctgcggggatgaggaagagtgggaggacacggaggagtcgttcacggccggcgtcaccaagggggagctggacgaggcctctgtgcgtctcttcttcaagggcgtgtcgagccctgaggcggaggggaagaagctgtctgggatcggagtcgtcatggagaggtcgcccggggtgcctgttcttaaggtgcagaagaagctggatttctatgtggaggagctcgtggctgatcacctcgccctcatggatgggctgcttgtcgcactgcagaatgggatcaggaagatcttcgcctttactaattcggagaagctctactttcagatagcagaagctgaaattcttgaagaccagcttttggtagctctaggacacaggattcttgaactggtggataagttggaagactttgatttgatattgcttcctagctttgaactagagaggcccttgcagttggctaaagaagctataggcatcagatatctgtctccctacgaggttggtacctgcccgatttgccgtgaggagaaactaggttctcagatgatcaaggcaggttgttctcacacatattgctataattgcctgactgggtatgttgaagagaagctgctgacctcgaagctgcctataaggtgtccacaattaaggtgtaaatacattatttccgctagtgagtgcaactcgttccttccagttagcagctatgattccctggagagagcatttgcagaagctggcacctcaggaatggaaagattttattgtccctttccaaactgttcagtgctgttagaccttagtcagcacttctctagggcaagttcatcaagccagtcagatctcagttgtgtcgagtgcccagaatgccatagagatatatgtatcaactgtggagtgccgtggcacatcatgatgggctgtgatgagtaccagagcttgcccgctgaggaaagagatgctggagacctatctttgcatcggcttgcacagaacaataggtggaggcgttgccagagatgtcgacgtatgattgaactgacacagggctgcttccatatgacttgctggtgtgggcacgagttctgctactcctgcggtgctgactacgctagcggcgttcaaacgtgccaatgcgtgttctgggacgacgaagccatggagccctcctccgccgcacggtccacccaagcagcgtccgagatctgggcgtgggacacatttgactgcatgccgaccgccgtggagggatactcggagcaggagagagcgcagctggcactcatccagaggttcctcgccggggggttcagcctgggtgagaacccctgccagtcgccgccccgctgcgccgactcctacatcgtcgacaccatgaaggacctccaccagctcccatggctcgagcggttcgtgtcggtgatcagcgacacgtacaacgatgactacatgcagtgaagggagggagggagggagagacagttatagatagcagtaaaagaaacggcacatactgagtcctccattcagaataatttgtttccatgcccctgtaggcaattggcgcagggaaaaatgatatgctttcatcatgaatacactggtgttgtttcctccattgtatggtaaccttcggcttcggtgctagttgtgcatgggcacaagagttctccattttatatgattatgtccttatttctttaaagtgagtgtaatctctctctctatatgtatatcttcagagctttctgaaattactcgttttgaatcaaatcagcagcatgagcaactgcctggatgatgcctccgtttat

SEQ ID NO: 3110 - DNA, 2370 bp, Zea Mays
gtgattccttacccgtttattggactactttgagtgttcgccaaaattagggcccgacgtttcgtcggtgaatcctcgagctgctgccgtcacgtatgaggaactggagcgtcggggccgttgcggccttcgaatttgcgctctggagctccgtctggtgcttcctggtcgtctccgtcaccagtttctgagccgggatcctactcctcttctcgcgctactatcagtgcagtgcagtaggccactggactgctgtcgtgccggggtagttgcggccaaaggaacaagccaccttctccgagttggaattaggtgcggccctccgcatcaaaagggctcgtttggtgggaactttcgcttgcctactcgctgctgcctgcttcggtggtcctccgtgacggggattgctggaattggggttggaaggacattctgactgaattgctcgagtgaggggtggggttttggcgcccgttgcttgaggatggaggagaggccatcgtccgaggcaggcgcgggcaactcgagggccgaggacgacttcaggagctgctgcggggatgaggaagagtgggaggacacggaggagtcgttcacggccggcgtcaccaagggggagctggacgaggcctctgtgcgtctcttcttcaagggcgtgtcgagccctgaggcggaggggaagaagctgtctgggatcggagtcgtcatggagaggtcgcccggggtgcctgttcttaaggtgcagaagaagctggatttctatgtggaggagctcgtggctgatcacctcgccctcatggatgggctgcttgtcgcactgcagaatgggatcaggaagatcttcgcctttactaattcggagaagctctactttcagatagcagaagctgaaattcttgaagaccagcttttggtagctctaggacacaggattcttgaactggtggataagttggaagactttgatttgatattgcttcctagctttgaactagagaggcccttgcagttggctaaagaagctataggcatcagatatctgtctccctacgaggttggtacctgcccgatttgccgtgaggagaaactaggttctcagatgatcaaggcaggttgttctcacacatattgctataattgcctgactgggtatgttgaagagaagctgctgacctcgaagctgcctataaggtgtccacaattaaggtgtaaatacattatttccgctagtgagtgcaactcgttccttccagttagcagctatgattccctggagagagcatttgcagaagctggcacctcaggaatggaaagattttattgtccctttccaaactgttcagtgctgttagaccttagtcagcacttctctagggcaagttcatcaagccagtcagatctcagttgtgtcgagtgcccagaatgccatagagatatatgtatcaactgtggagtgccgtggcacatcatgatgggctgtgatgagtaccagagcttgcccgctgaggaaagagatgctggagacctatctttgcatcggcttgcacagaacaataggtggaggcgttgccagagatgtcgacgtatgattgaactgacacagggctgcttccatatgacttgctggtgtgggcacgagttctgctactcctgcggtgctgactacgctagcggcgttcaaacgtgccaatgcgtgttctgggacgacgaagccatggagccctcctccgccgcacggtccacccaagcagcgtccgagatctgggcgtgggacacatttgactgcatgccgaccgccgtggagggatactcggagcaggagagagcgcagctggcactcatccagaggttcctcgccggggggttcagcctgggtgagaacccctgccagtcgccgccccgctgcgccgactcctacatcgtcgacaccatgaaggacctccaccagctcccatggctcgagcggttcgtgtcggtgatcagcgacacgtacaacgatgactacatgcagtgaagggagggagggagggagagacagttatagatagcagtaaaagaaacggcacatactgagtcctccattcagaataatttgtttccatgcccctgtaggcaattggcgcagggaaaaatgatatgctttcatcatgaatacactggtgttgtttcctccattgtatggtaaccttcggcttcggtgctagttgtgcatgggcacaagagttctccattttatatgattatgtccttatttctttaaagtgagtgtaatctctctctctatatgtatatcttcagagctttctgaaattactcgttttgaatcaaatcagcagcatgagcaactgcctggatgatgcctccgtttat

SEQ ID NO: 3111 - DNA, 2438 bp, Zea Mays
ctcttgcctgcctggtgctctgcagaggagagagaggaggaagaggaggaaagggagctatagattagctccttttttttctttctttctggagctgttattttatccggggaaggatctggttttgtcccccgtattgggaggatttattatctttctccttcttccccctcccctcgaccctctcagcctcaccaggatcagctttgttgctgcggaggcaatccctgtcgcctgctccctccccatgagagtaccacgccacgcacacccttcaggaacgccgtaagctgaagctttcagtcggctgctgaaacctcgttcatcagtcagtctccaaggcggttcgatcgtggtggccatcatcagccgagcggccagagctgcacgatggctacctactactcgagccagggcagtgaaagggagccgtcgcagaacatgtactccagagaccccggcaatggcaccgcgtcctaccctcctctgccgtcggctctggggaacttgctctacttgaacagcccggcttctggcgggccgtacacggatttcggcggcgtccagcaggactgcatcgagatgcctgaacctggacatccttcggtgatgtcccatgactcgtctgccagggagatcgagcccgacatgctggggcagcagcggcgctcgttcggcctagccagaggcatgaaggacgaggtgctgatgcgcatgatggatggatcaggatcacatagcagcgcagccgatgccatccatgacgacgccccgaatggcatacagctcgatttcggcgttctgggcagccacggcccgccggcgcagggcggccaaggctccttgtctctgagcctcaacacgcacatcatggcgcctgccttgccgtactggcctgtcgtcaaggcagacatgctgtcgccgcactcctacgaccatggctgcggcggcggcagcggcggccttggctcggagccgtcgcgggcgatccggaactcgaggtatctgaaggcggcacaggagctgcttgacgaggtcgtcaacgtctggaacagcatcaagcagaaggcccagaaagagcaggtggaggcagggaagacggaagggaaggagaacgagggaggagggcccaagagtgagggtccgcaggagtctggcgccaacgctgcaccggagctttctactgccgagaagcaggagcttcagaacaagatggcgaagctgatggcgatgctggacgaggtggaccggaagtacaagcactactaccaccaaatgcagagcgtggtctcgtccttcgacatggtagcgggggctggagccgccaagccatacaccgcggtggctctgcagacgatctcgcgccacttccggtgcctcaaggacgccatcaacgaccagatcagcgtcatcaggaagaagctcggggaggaggagagctcgtccggcagggagggcaggctgacccgtctccgctacatcgaccagcagctcaggcagcagcgggcgttccagcagtacggcatgatcccgcagaacgcttggcggccacagaggggccttcctgagaactccgtcaccattcttcgtgcttggctcttcgagcacttccttcacccgtaccctaaggattctgaaaagctgatgctggcaaggcaaacaggcctgacgaggagtcagatttcgaactggttcatcaacgcccgcgtccgcctctggaaacccatgatcgaggacatgtacaaggaagagaccggagacatcgagcaagactccaactcctcctccgacaacgcgccagcaggaagcaaggccaagacggcgtcttcgcgagacaaggaggaccacctggcgagaagctgctgcacgccgcgggccgtctgcgagagcagcagccagctgagcgagccaccaggaggagccagcatgagggccatgagcgtcgccgccgccgccgctggagcgcccatggggttattccagaacgagcctggccacgaccacgaccacgacgacagcttcatgagcctgatgctcaaggagcagcgaccgaacgacggcggcggcggcctcctcctccaccacagcgccgtggcgcagcaccaggacgagaacgcccggttcatggcgtaccacctggcggagctgggcaggtacggcaacggcaacgtgtcgctcaccctggggctgcagcgctccagcagcagcctctcggttccgcacgctcagcagagcttccccggtgtcggaatcggtgtcggagacgacgacatctacaatgccaccgccgctcctctcggtgtcagcgtggcgtcgccggactacgagtccatgagccagatggatcagcggcaacggtcagttctgtcatatcacctcagcaatagaaggaagatatgctacgaccttggcacacttcctactttgtaagtactttg

SEQ ID NO: 3112 - DNA, 1007 bp, Zea Mays
ctcgcacagacgacgacgacgaccaagcctaggaaatatatagtctatcgtatatatattggcaggcactccacacgcgtacgctctcatccgatccactctcccacctgcgctgcgcctcctcggtctctccttccacctccacacctaccgcggctcctctcggttcttccaatccaattaagaaacaaactacaaccaagcagatacagcatctacgaacgaaatggagctgccgcagggccacgagaagccgccgcccgccgccaacggccggggggcgtggcgcggcggcgcgtcgtcgtcgtcgtcctcctccgcggcgaccccgcccaaggtgtaccgcgtggagccccgcgagttccgggacctggtgcagaggctgaccggcgcgccgccgcccacggccttgcggcggccgcagcagcagcaccagcaccgcgcggccgtcgtggcgccggtggtgcatccgcagcccgtggtggcgtggtgctgtgctactgcgctactcatgcatgcacggtggacgctgcatcgtcgtcacaaagagatgacctgatcaatctctccttttgtaataattacaataattaccctgcatgtacgtacgtacggccggcgatgggatgacctgctcccggtaaggtaacatcgcatcgcatgcaatgcaagtacgtgttgtgttaactacagcagttaattagcgcgagggagtatatagtgaactagtgacacatactgtactagataggcgcggcgtacacagctgtactgtatatgttcaataatattaccccaacgacatgtcgtattattactgaacaatagtatttagttgtcgatcgtgtgatgtttctgtttaattacgagtagtatcgtaagtgcacacgtatttggttggtttctttgcattccaaaaacaggcgtgtatgacaagaaataagctgcacaggacgactttggtttggtttggtttgggtaaagcaccatttgtgtcactacgtttt

SEQ ID NO: 3113 - DNA, 897 bp, Zea Mays
caacaagcaccaagaataatgggccaccgccggatggacctaatataatgcaaacaagtctgcaatgcagtggagtactttattactactagtagtgcagttgtgtgcagggaggcctcccgtaggcgcaggcagatttgctctgcgggcactcgggcagcactagcgagctgaggggcgcgcctgaggctgaggccgagcagcagaggtctcgctcttcgcctggacttggaccacaccaccacacacttccattccctccgtcaggtccgaataatgggccaccgccgtctcttcgttctctcgctggggctggctcatcttctcctcatcgccaccgcgcacgccggaggcggccatgctcgaggcgccgccaccgacgatgctgtcgcccaccagggcatgagcatggtcgggtcgaggccgccgagctgcgcggggcggtgctggtggtgcggcgcccgccgctgcgaggccgtgcaggtgcccatcacgccgcagcagcaggacaagagccgccgccacgggaagagcggcggcggcggcggcggatcgataccgtcgtcaacaagagatggcggccgaggaggagcgtcgtcgtcctacgacgaccgctccaactacaagccgctcagctggagatgcaggtgcggcggtggataggatagctgatgtatatatatggatgaaccttgcagcttaattagtcgtatgagcttgatgggcatgcatggacgacggatcgtcatcagagcgcgtcttggcttgcagtgtggtgtgttgatcttgcatcgatcaatccattttctttcctgttgcggtgtgaatatagtagaagtcgctgctaaatatgcgtcttcaaaaataaattaaagaaaaggaaaaacccgtttatcg

SEQ ID NO: 3114 - DNA, 550 bp, Zea Mays
gggcagcactagcgagctgaggggcgcgcctgaggctgaggccgagcagcagaggtctcgctcttcgcctggacttggaccacaccaccacacacttccattccctccgtcaggtccgaataatgggccaccgccgtctcttcgttctctcgctggggctggctcatcttctcctcatcgccaccgcgcacgccggaggcggccatgctcgaggcgccgccaccgacgatgctgtcgcccaccagggcttcaaggctagatatgctagcgatgtgacatggcagcatgagcagggcatgagcatggtcgggtcgaggccgccgagctgcgcggggcggtgctggtggtgcggcgcccgccgctgcgaggccgtgcaggcatgcatggacgacggatcgtcatcagagcgcgtcttggcttgcagtgtggtgtgttgatcttgcatcgatcaatccattttctttcctgttgcggtgtgaatatagtagaagtcgctgctaaatatgcgtcttcaaaaataaattaaagaaaaggaaaaacccgtttatcg

SEQ ID NO: 3115 - DNA, 549 bp, Zea Mays
ggatttggatccactttgccatcaggcgcgcctcgttctttcttctccgccggctgcatccacaccagacaccacaccacgttgctctcaccggtggaaggaagtggaagtagaaggctggaagcggaagcattcgatttccatcgtggggcatggcggcggaggggaagaggaagggcgtcccggcgctagggtggtggctgatgctagtcggctccctccgcctcgcctccgtttggttcggcttcttcgacatctgggcgctccgcgttgccgtcttctcgcagacggagatgactgatgttcatggccgtacttttggtgtctggactcttttgacctgcaccctgtgcttcctttgcgcactgaacctggaaaataggcctctgtacctggccaccttcctatcattcatctacgctctcggtcatttcctcacggaatacttgatataccacaccatggctgcagcaaatctgagcacagttggcttctttgcaggcttgtcatttaaaccttttcaggatcttatcagtaccttacttttgc

SEQ ID NO: 3116 - DNA, 873 bp, Zea Mays
ctgattcgtgaggctcagatgcttagtatttattacttatactgagtcttcatgtcctcagagagtcagagtgactgatgttcatggccgtacttttggtgtctggactcttttgacctgcaccctgtgcttcctttgcgcactgaacctggaaaataggcctctgtacctggccaccttcctatcattcatctacgctctcggtcatttcctcacggaatacttgatataccacaccatggctgcagcaaatctgagcacagttggcttctttgcaggaacgtcgataatatggatgcttctgcagtggaattctcatgggaacccccggggttcctatgctgggaagcagtcatgactgatgctcgggttgttcgcttgatgtggtctgggcccgctaggggaagaaggatggttgaagaaagctcgctggaaagccgcctgatgatggctctgcgtcatttgtacttcagttttcaacttttcatcatgttatttcgttgcatgagacgttcgtccgactgagcagggagatttccgaacagttatgccactggctgggaatgagaatttttgaacactgaactccggctgaatcatgtagtcaggagctgtaatagcattcagatagtcaccggttgggagctgagatgccaataaggcggcgggtatagaaaagaggtgggcgtatcatgtgctttcgttgcagccaaagggtgtatgtactctgaaacttttgttgtactgatgctgcatcttttgttcttgaaataaaccgtacattagtacagtagagtcgataaagtttttatgtattgcgatgattgttcaatcactttatttttttttacctcatgttcagttacttttttt

SEQ ID NO: 3117 - DNA, 516 bp, Zea Mays
atggcaagcgggctacgcagcggcgaggccaagcctcggcggtttgatctcaccatgtcaaggaggacgaggcggccagcggcagcaaccgtggagcgactgggattcctccagccggtggtgcggccggaggagcgacggagtccagatggccgcccgttctgcttgccgggtcatccgcagcccgaggatgctcaccaagagcacgaggcgtcagaaccctcgacggaggaagagtgtcaggaccgtcgtttctcgctgcaggagctgatcgaggacgaggccgtcgacggcgccgccaccggaggcaccacggaagggaacactcctgctgctggtgttcgtgaatttgcacaactacaaggagctgcagcaggcgaggcaacgcggcgggctggacaggtgccggcgggacggagggtgatcggaatggtgcgccgctacgtgaaggtccggtccatcaagcccaagcgtgcgtcgccgtcggcggagaagtgcgcttcacctgtatgctga

SEQ ID NO: 3118 - DNA, 717 bp, Zea Mays
gtcccacgatcgtgaggtgagaaacaagagcacggcagggaaaaaaggcggcacctttgtgagttggaacttggaggtggtcaaggagcgcgacgatgtcgccaacgatgtggaagatggtgtaggcggcggggtcggacggcacggaggagtcgccgtagccgcggagatcgggagccagcgcgcggaacccgcgggcggcgagcgcggccatctggtggcgccacgagagccagagctccgggaagccgtggattaggagcaccgcgggcccatcctcggggccccgctcggcgacgtggatggagacgccgttgacgtccgcgttccagtgccgcacctctcccgcgtccatgctctgctgcttgcttggctcgtcggtcgccgctttgtgttcctctggttgctatggcggtcagtcaaatgtgctcactatccacgttgagaaatttgggttgaactcttgagcaagaagagaaatggccaaaagcaaatgaatgagtatttagattattccgtgaaattcgttcttctgcaccatgggagaccatgtcatcctttacaagtcaactctagcattggattaaagccaattgtttggattaaggctagtcatttgattgttgtagctgctattttatgagaatatatctgatgtacaagaaagtttggtgtacatgatgtatatattaaatcatcatcactcatcttagatct

SEQ ID NO: 3119 - DNA, 1064 bp, Zea Mays
acctgcaccagcctcgcccgcccttcgctcgccgccgccatggggaggggaaagttcaagggaaagcccaccggccgccgcaacttctccacactagaggagatcggtgacgagccgtgcgatccaggagacgatgcgggtggcgtccatcctgtccttcaccttccgggaggccgtggaggacgtggagtaccaagggtacctgatccccaagggctggaaggtgttgcccctgttccggaacagccaccacaaccccgaccacttcccctgcccggacaagttcgacccttcccgattcgaggttgctcccaagcccaacacgttcatgccgttcatgccaaaatgcttctgaatagtgggattctttcttgactagtgaagacaaaagctctactagcgcttattctgacttcagattgaacatgagagagactgcaaatttgtctaatgcaaaaaaatcattgataagtcaaaccttcagataaagtcagttgtggcattggatcatctaaaaattatatttatgttgaagctgagaaggaggctcatgtcaaagaaattatctaatgcaaaaaaatcattgataatttcttggatgtatattgattggcttattagatggatatcggcccagtttatttttcattttttctatagctgttagaaatttactttgctcatagttcatactataattaatatgagactcttgttttgtggtccaagtgttcaacgctcagggtgccttggaagtacgctagcttgttgtcatgaagaagtcattcaagttccttccaggtgttctggacaaagaaagcttgtaccttaaaacaggaggatacaagaagctggagtggttgtctgaaggcttttgaactgcttgaagcattagtgtagctttggtgcttttgtgactgatcggctctggagcagctagagtgatatagttgtgggcttttgaacaatagttggagtgatatgaaacattagtgatctagttatgaatgatattataattgtgatgcttttgtgaatatataattgtggttcttttgtgttta

SEQ ID NO: 3120 - DNA, 1037 bp, Zea Mays
acctgcaccagcctcgcccgcccttcgctcgccgccgccatggggaggggaaagttcaagggaaagcccaccggccgccgcaacttctccacactagaggagatcggtgacgagccgtgcgatccaggagacgatgcgggtggcgtccatcctgtccttcaccttccgggaggccgtggaggacgtggagtaccaagggtacctgatccccaagggctggaaggtgttgcccctgttccggaacagccaccacaaccccgaccacttcccctgcccggacaagttcgacccttcccgattcgaggttgctcccaagcccaacacgttcatgccgttcatgccaaaatgcttctgaatagtgggattctttcttgactagtgaagacaaaagattgaacatgagagagactgcaaatttgtctaatgcaaaaaaatcattgataagtcaaaccttcagataaagtcagttgtggcattggatcatctaaaaattatatttatgttgaagctgagaaggaggctcatgtcaaagaaattatctaatgcaaaaaaatcattgataatttcttggatgtatattgattggcttattagatggatatcggcccagtttatttttcattttttctatagctgttagaaatttactttgctcatagttcatactataattaatatgagactcttgttttgtggtccaagtgttcaacgctcagggtgccttggaagtacgctagcttgttgtcatgaagaagtcattcaagttccttccaggtgttctggacaaagaaagcttgtaccttaaaacaggaggatacaagaagctggagtggttgtctgaaggcttttgaactgcttgaagcattagtgtagctttggtgcttttgtgactgatcggctctggagcagctagagtgatatagttgtgggcttttgaacaatagttggagtgatatgaaacattagtgatctagttatgaatgatattataattgtgatgcttttgtgaatatataattgtggttcttttgtgttta

SEQ ID NO: 3121 - DNA, 3851 bp, Zea Mays
ctgccatacacccgctaacaccaaccaaccaaactttacatcactgatcactgtgacagtttcagcctttcggtcccggcgacagccatggcggacgcgggggtgacgggggtgctggccaagctgggtgagctggcggcggaggaggcgacggcgctgctgcgcgtggacgccgagatccgggcgttgcggcggaagctggcctacctgcaggcgctcgtacgcggggccgaccgccagcgccgcggccgcgcaagcgagctgctcctgctctggctgcgcgagaccagagaggttgctttcgaggttgaggacgccgtcgatgagttccacctccgcgtcgaggcctgccgccccggggcccggtggcgccggcgccgcagatggtggtggggctggcaccgcgacgccgtcagcctcgtccaggacctcgccacgcagttttttgtacgtcatgggctgtcaaatcaaatatctaagatcaatgaaaggattgatgagcttaaccagaacaaggaaacatatcaaattgaaagttctccttctgaaatttggagttcttcatcggttgaaatggatcctgagtggtacgaagataaatatgttataggctctagagaacgtgaatttgctatccttaaggacctaatcatcaacaaagagggagatatgcctcaccgggctgtcatctctatttttggggagcgtggcattggaaagactacacttgcaaaacaactgtacaatgacccagatatcataaaacactttgaggtccatgcatgggtatgtcttccaccacatgtcaggttcagggactatgttgagattatgcacatgcaggtcaacccacagattccagaagcttctgagaaaaatgataatacaacatttgcactcggtaacgaagaaaccactgatatggaattcaaccttcggcagaaccttgagaacaggaggtacctagttgttcttgatggtttagtcagcattagtgactggaactcattatttgctgtgctgccacataccaatgccaatggcagccggatcttacttaccacacatctcaatgtgaaggaaatcaatcacatcgacccacagatagctcctgtcaagcttccttatcttgacgaaaaacatggagaggagttattttgtcaaagagtttttgggacaatagaacctccacaaatttataggagcaaggtttactataaaaaagttcacaatatatcaacaggtctacccctggcaattactgtgcttgcaggaatattacgatcaaagtttatccccatggagtgggatgtcatattcgaacaactcgagtccaatggccagccaaaaccggttagaagcatatggtctttggcttttgatgacttgccacactacctcaagtcatgtttcctatacttggcgtccgtttcagaaaatgttattctttacccagatcgtttggtgcgtctgtggattgctgaaggttttgttatgcccaagaaagcagaaacactggaggacgttgggtttgactatctaaaagaactggtcgcgagagggttagtccaggtcgtgcagaaggatgctggtggatccatcaagctggtagccatccacaatctgctccatgcttttgtggagtctgaagcacaggactctagtttccttgaaatccaccatcatgctaatgttgtaaacccaaatgcagtgcggcgccttgccatacaaaactatgtggatgcatatgtccacattcctaatgtgttccccaagctgcgttcgcttctctgtgattttgcagaagaccaacaacgcggtagctcaagctctggagagctgcaacctcagtcgttatggggcaatcttgcagagttgtgttcaagagcctgtggcacttcggagaatgttggctcaagcacattgcatgggctccacttcttacagggctccaggtacctacgagttgttgacctgtatggtcttaagacgcgaaagctgccagatgagatcggcagcataatccacttgaggtaccttggcatcaggaacagcaacctggtggaactcccctcatccatctacaagcttgacagtctccagacgttggatgtaaggaaaacaaacgtggcgaaagccgtcgatgagttctgggacatcgaagcactacggcatgtgctcgccgagaaaatgattttgcccgattgctcagtagttcccttgaataatttgatgacactcaacggtgtggtgccttgtggtccgtgggatgaaaagagctgccccttgaacagtatgatttatctccgatccttgtccctgtctgacatttcagcagcccataccgccgcgctttcagcagctctgaggaaaatggaattccttttgtacctgaacctgtcaggtgaatttctcccgtccagcatgttcaccagctcaagcatgcgccgtctccagaccctcatcctgcatggtaagttacaagggattaatgatctgccgagcgacgaccgctatgtcctaccaaaccttaccatgctctatttgcatggatctgaggtgtctcagcagtttgtgcacaagcttggtacgcttccgtgccttgttgagatggagctgtcagctgtttcgtacagtgagggtgagatgaaactgttcttggacggattcccaagcctagcaaggctgaagctcaagaacgtgtctatgttacaggaggtagagatacgtggaggggccatgccaatgctttccatcctagccatgtatgattgcgacagcttgaagaccttcaagaacctgaatagcttggaacaccttcaagaagtggcgatctacaatacgccgccggagattgttgataacataaagcttgaggacgagaagcttttcagcaagatcaaactcctgactaaccccatgatgacagcagaccgagactttccaggtcatgttgtcagaatgagaattaaaatgttggatgaaccggctcatgatctacgtgtcgcagtggcctctgaaccacattgcagtgacatggagggtgattatcatggtgaaaggaaagcaacagaccaagtacactacggccctggtctgttataaataaatattggagttggtcaataattcaggaaaaatctgcagtgttttgcagcacataataattgtttgtgagtagcagccagtgatcggcggccgggagagcagcgaccccccgaaaaaaaaagtcactagtaagaaatgttatgctatcgtggcataacatgttgttatcattttccttttcgttctgaacttgttaaatgtttcctgccctcaagtttgtttcgaataagatcactggtggtgccctgtatcccagttttcaggttctagtttggatattacagtcttaattatcttttcagtttggacattgtaataagaatcatgaacttgtcaactttgaaaggctctgatcactggtggtgctctgtatcccatgttgaactattagacattttctagattaattttcgaatataaatcatgaccgtcaaatcatatgatgcgtactgatcagacatactggtagacgacgtgggtgggtggttcttcacactttctcctctcttccatgacttggtaagtgagtgcaacctccatatttaaactagttccactccacttagactagcaatatagcactatttgttccaccatttcctagtcatacccatacataggcttttagagatttttataggatttaattgaatttcttaattgggcctagcctataaatccaacatctcagttctcaggctctagtttggatactgcagtcttaattatcttttcagtttgga

SEQ ID NO: 3122 - DNA, 3694 bp, Zea Mays
ccgctaacaccaaccaaccaaactttacatcactgatcactgtgacagtttcagcctttcggtcccggcgacagccatggcggacgcgggggtgacgggggtgctggccaagctgggtgagctggcggcggaggaggcgacggcgctgctgcgcgtggacgccgagatccgggcgttgcggcggaagctggcctacctgcaggcgctcgtacgcggggccgaccgccagcgccgcggccgcgcaagcgagctgctcctgctctggctgcgcgagaccagagaggttgctttcgaggttgaggacgccgtcgatgagttccacctccgcgtcgaggcctgccgccccggggcccggtggcgccggcgccgcagatggtggtggggctggcaccgcgacgccgtcagcctcgtccaggacctcgccacgcaggtacgaagataaatatgttataggctctagagaacgtgaatttgctatccttaaggacctaatcatcaacaaagagggagatatgcctcaccgggctgtcatctctatttttggggagcgtggcattggaaagactacacttgcaaaacaactgtacaatgacccagatatcataaaacactttgaggtccatgcatgggtatgtcttccaccacatgtcaggttcagggactatgttgagattatgcacatgcaggtcaacccacagattccagaagcttctgagaaaaatgataatacaacatttgcactcggtaacgaagaaaccactgatatggaattcaaccttcggcagaaccttgagaacaggaggtacctagttgttcttgatggtttagtcagcattagtgactggaactcattatttgctgtgctgccacataccaatgccaatggcagccggatcttacttaccacacatctcaatgtgaaggaaatcaatcacatcgacccacagatagctcctgtcaagcttccttatcttgacgaaaaacatggagaggagttattttgtcaaagagtttttgggacaatagaacctccacaaatttataggagcaaggtttactataaaaaagttcacaatatatcaacaggtctacccctggcaattactgtgcttgcaggaatattacgatcaaagtttatccccatggagtgggatgtcatattcgaacaactcgagtccaatggccagccaaaaccggttagaagcatatggtctttggcttttgatgacttgccacactacctcaagtcatgtttcctatacttggcgtccgtttcagaaaatgttattctttacccagatcgtttggtgcgtctgtggattgctgaaggttttgttatgcccaagaaagcagaaacactggaggacgttgggtttgactatctaaaagaactggtcgcgagagggttagtccaggtcgtgcagaaggatgctggtggatccatcaagctggtagccatccacaatctgctccatgcttttgtggagtctgaagcacaggactctagtttccttgaaatccaccatcatgctaatgttgtaaacccaaatgcagtgcggcgccttgccatacaaaactatgtggatgcatatgtccacattcctaatgtgttccccaagctgcgttcgcttctctgtgattttgcagaagaccaacaacgcggtagctcaagctctggagagctgcaacctcagtcgttatggggcaatcttgcagagttgtgttcaagagcctgtggcacttcggagaatgttggctcaagcacattgcatgggctccacttcttacagggctccaggtacctacgagttgttgacctgtatggtcttaagacgcgaaagctgccagatgagatcggcagcataatccacttgaggtaccttggcatcaggaacagcaacctggtggaactcccctcatccatctacaagcttgacagtctccagacgttggatgtaaggaaaacaaacgtggcgaaagccgtcgatgagttctgggacatcgaagcactacggcatgtgctcgccgagaaaatgattttgcccgattgctcagtagttcccttgaataatttgatgacactcaacggtgtggtgccttgtggtccgtgggatgaaaagagctgccccttgaacagtatgatttatctccgatccttgtccctgtctgacatttcagcagcccataccgccgcgctttcagcagctctgaggaaaatggaattccttttgtacctgaacctgtcaggtgaatttctcccgtccagcatgttcaccagctcaagcatgcgccgtctccagaccctcatcctgcatggtaagttacaagggattaatgatctgccgagcgacgaccgctatgtcctaccaaaccttaccatgctctatttgcatggatctgaggtgtctcagcagtttgtgcacaagcttggtacgcttccgtgccttgttgagatggagctgtcagctgtttcgtacagtgagggtgagatgaaactgttcttggacggattcccaagcctagcaaggctgaagctcaagaacgtgtctatgttacaggaggtagagatacgtggaggggccatgccaatgctttccatcctagccatgtatgattgcgacagcttgaagaccttcaagaacctgaatagcttggaacaccttcaagaagtggcgatctacaatacgccgccggagattgttgataacataaagcttgaggacgagaagcttttcagcaagatcaaactcctgactaaccccatgatgacagcagaccgagactttccaggtcatgttgtcagaatgagaattaaaatgttggatgaaccggctcatgatctacgtgtcgcagtggcctctgaaccacattgcagtgacatggagggtgattatcatggtgaaaggaaagcaacagaccaagtacactacggccctggtctgttataaataaatattggagttggtcaataattcaggaaaaatctgcagtgttttgcagcacataataattgtttgtgagtagcagccagtgatcggcggccgggagagcagcgaccccccgaaaaaaaaagtcactagtaagaaatgttatgctatcgtggcataacatgttgttatcattttccttttcgttctgaacttgttaaatgtttcctgccctcaagtttgtttcgaataagatcactggtggtgccctgtatcccagttttcaggttctagtttggatattacagtcttaattatcttttcagtttggacattgtaataagaatcatgaacttgtcaactttgaaaggctctgatcactggtggtgctctgtatcccatgttgaactattagacattttctagattaattttcgaatataaatcatgaccgtcaaatcatatgatgcgtactgatcagacatactggtagacgacgtgggtgggtggttcttcacactttctcctctcttccatgacttggtaagtgagtgcaacctccatatttaaactagttccactccacttagactagcaatatagcactatttgttccaccatttcctagtcatacccatacataggcttttagagatttttataggatttaattgaatttcttaattgggcctagcctataaatccaacatctcagttctcaggctctagtttggatactgcagtcttaattatcttttcagtttgga

SEQ ID NO: 3123 - DNA, 2085 bp, Zea Mays
cttatttatacggccgacccggagcggccgaccataagcggcaggtggacgacaagccgccgtacgccgccgtggacgacaccatgaccaccaccacgaagaagatggtggaggagcagctctcagacgacgccggcggcggcggcgagctgccagagcagaactaccgtggatggaaggccatgccctacgtcatagggaacgagacgtgcgagaagctgggcaccatcggcaccacggccaacctgctggtgtacctcaccaccgtgtacggcatgtcgggcgccagcgccgccaccctgctcagcctctggtcgggcaccgtcaacctggcgccgctcctgggcgccttcctcagcgacacctacatgggccgctacgccaccatcgccttcgcctccatggcctccttcctcggcatgatcgtcctcaccctcaccgccgccgtgccgtcgctccaccctgccgccaacagcagcaccaccggcggcccctcgtccctccagatggccgtgctcctcgcctccttcgcgctgctggccgtcggcgccggcggcatccggccctgcaacctggccttcggcgccgaccagttcgacccgcgcaccccagccggccgccggggcatcaacagcttcttcaactggtactacttcaccttcaccatcgccatgatggtctccgccaccgtcatcatctacctccagagcgacgtcagctgggcgctggggctggccgtgccggccacgctcatgggcctctcctgcgcgctcttcttcatgggcacgcgcctctacgtccgcgtcccgcccgagggcagccccttcaccagcttcgcgcaggtgctcgtcgccgccgcgcgcaagcgacgcctgcccgcgccccgcgccgacctctacgacccgccgcaccggagcagcctcatctccaagatcgcgtacaccgaccagttcctgtgcctcgacaaggcggccgtgcgcacccctgaggacggccccgcccccaacccctggcgcctctgcacgctgcagcaggtggaggaggtcaagtgcctggcgcgcctgctccccgtctggtcctccggcatcgtctactacatcgtgctcaccaacctcggcaactacaacgtgctccaggccatgcagaccgaccgccgcgtcggccgcgggggcttccacatccccgcgggctccttcgtcgtcttcaacatgctggcgctcaccctctggctccccttctacgacggcgtgctcgtgccggccatgcagcgcctcaccgggcgcgagggcggcatcacccagctgcagcggatcggcacggggatcgtcctctccatcgtcaccatgctcgtcgccgccgccgtcgagcgccaccgccgcaggctcggcgactccgcctcctgcttcctgctcgtgccgcagcagatgctggccggcctgtccgaggccttcggcatcatcggacaggtcgacttctactacaaacagttcccggagaacatgcgcagcgtcgcgggggccatgctcttcctggcattcgccatcgccagctacgccagcggcctcatggtcagcgtcgtgcaccggaccaccggaggccccgacggccgccccgactggctggcgcaggacctcaaccagggccacgtcgacctctactacctgctcatagccgccatggcggcggtcaacctagtctacttcgtcgcctgcgcgcgctggtacaggttcaagaacccggccgccgccgacgtcgagcagctggagctggagttagagggaaaggccgcagcgcctcctgtctgaatactgaagagctattttcttttcttcctcctcatcaatcaaaaaggaaaaaaaaggagaaaaaaacgaacttgccgtgcggtgcagggtgcgaagaaaggtactactacttgtagtaaagactaaagagtactaggtagaatagacgcataattaaacgccataaagggagggagggagggagacagtacacagtacaggttgcaatccaaattcaaaatcatgtactatattattgcttgatgactcctccatccatatgatatcaacatgattagca

SEQ ID NO: 3124 - DNA, 3492 bp, Zea Mays
gggcccagttatcaaggtgattgtgtgaagtgtagagcgcccacctccgtcagctgggcacacgtagatatagcagtagcagcagcggagctgttcgacgaaatgccgccatggccgccgtgtctccagcctaccctcaccaccgctcgccgcgccaccgtattctccaggacgagatgtctctcttctacccccgcctctcctacctacgagcaggggcagcacgaggaggagccatcgttggtcgttgtggggggcggcgcggcgggcgtgtacgcctccataagggccaagacccttgctccgcacctcaacgtcgcggttgtggagaaaggcaggttcttgtccaaggtcaagatctccggcggtggccgctgcaacgtaaccaatggccatcaccttgagcccatgggactggcgagaaattatccaagggggaacaaggagctccgaggatccttctttaccgctcacggtccgcaggataccatgcgctggttcacagatcacggtgtaaagcttaagacggaggacgatggcagagtcttccctgtcactgacaattcagcttcagttgtagactgtctactgaacgaagcaagaaggcttggggtttctctgcaggccggcaaaactgtgtctagtgcatctgttgctcaagacgggaagtttgttctcaaggtggagaagcgtactgccgatcttgttgattatatcaacgctaattacatcttggttgctacaggtagcagccaacatggctattcaatcgctgcacaactcggtcattccattattgcaccagttcccagcttgttcacatttaaaatcgcagacaagcggctggctgatctcgccggggttacatttccaatagtcaaagcaaaactgaagctagatggtgttcaaaaaagtgttcccgagttaactcagactgggcctatgttagtaacacactgggggcttagtgggcctgttgtgctgcgattgtcggcatggggagcacgtgagctacatcagtgcaactaccaaggaaatcttatggttgactttgtacctgatattcatatcgaggacgtgaagcgcgtcctattccactacaaagatcagcatgcggtccatttctttctttgtagcttttcctttacccactaaagtttgtgccataaatcttcaaaagaatctaaatctgtcgccggtttaactactcttgatttgccttttctttaatgagctgaaaaaagtgttctcgagtctgcaatagttatgtgtcttactactaattatttggcttgctgagatgatctttgactttgccagcaggaataataattgcagcttcctggtctatcacattcgaatacttttaccaaagttttaaacgcccttcaaaatcatgagagaaatattctaacagttaaatgaataaataatgatgaatttgaactgcagaagcacaaagtgagtaacacgttccccacggagtttggcctggtgaagagattttggagattcctgctagaacaggagagtttaaatggtgatacacactgggcctccatgccaaataatcatctaaacgcagtggccttccggttgaaacaatggacgtttgaggttgttggaaagggccaatttaaagatgaatttgtgactgcaggaggtgttccaattacagagatatcgcttggcactatggaaagcaagaaacagccaaacctgttctttgcaggagaggttcttaatgttgatggggtcacaggcggattcaattttcagaatgcatggaccggtgggtatatagctgggacaagcataggcacattggcatcgactagcaatctcccagagcagcagtcatgtttccagttgtaactgggagtttcagagaaggaaatggattgagttatgaaagagactcctcagatcatctgggaatgattcagggataccaacaagtttgcaatcaagataaggatattccaagatgaccaggatcagggagctacaattgctactgaattgtaacactaacctaagatggggtacatatgacaagaccgcacgattttggttacaatctaggtgtacaaagtgcaatctggaacgataatagttacaatcgagttaaacaagttgtgatttgtacttgaccgatcagagtgtgcatccagctatgattcttctgtctcaattaataatcatcaatttttttcaacaacattacctgtcagcactcagcagcgactgtcactggctaattgagagaaaatttatcttgagagaaaatttatctcaagctaaacgaaaaaatccatctctaaatgttatcacaatcacaataaatagtttccaagcatagactatccggctaccaaactacacctggcctgactaaatcagagcgaactatatatggtgcgcatcttatattcattccaagctgattcttccacaaaactgtgcaagcttacaataaatgcatgcgctcaacataaggattgtgcaaccacttgttgagtggctccccgcagccgacaaagcagccagtatttccacgggtggtgaagaatggggattcaaagaggtttagaagcttttgaatcgattgcctaaccagcgaagatccagttaccctgctcctcctgccccagccagtgacaatgtcaattctttcaggaccagtgcccaatgtcagaacctgcctatggaaccaggcaagcgtcctggacagtgcagtcactgctgtgccctcagacatcagatgaaggttgatgagccaatacgacgagctcttctcccttacagaatctgggtacacgttcttctgtgcagcaacctcccatataaagcctgcttcctccttgagaccggacttgtgcaagaagtctatgacagcatccattagaccccttttactctctctgtcctcactgtgcatcatgtccaagaaataaccagtgtgatccctgacgttctggccaccagcttctgcatcaggcaagtacagcaggaacatgtgagctggatgtccagtgatggccatgagctggcagcacaaacccatctgtgcctgacccacggtgcagcagctgagtagcagggtgtaagtctgcacagatggaacaagcccccgagcaagcatgttctggagcacgatgtaggcatcttgaaatctgttcatcttcaggaaagcactcaagagcgaattgcaggtcggcacgttaggctgcaaaccatcctgaagcatcgcttggtaccatcctagcgctttgtcaacattgccagctttgccccagagatcgaccaaaagtccatataccggctcatcaggagcccaatcacgcctcatctcaataaaaaccgcctcagcctcatccagatggccgcaatgaccaagaacttccataacgatgctaaacatgtgatgaaggtgaacatacactgacgggtgcaagcacaaggtcaagaagcttcttcggaagatcgaag

SEQ ID NO: 3125 - DNA, 1831 bp, Zea Mays
catttaataccccgaacggaggttcaaacattcgatgtgatagaggctaaattttagcaggggcaaaccaaacaccccctaagtttattcggcaggccttccatgctcaccaatgcattgcctgctacaactacaagtttattcgacaggaatttgatttcaaacaacggcaaaatgaaatcaataaaaggaggaggagaagaaaataatgcaggacgtggagagtggagcaggtcaaccacccagaccactgcaccgcaggctccatcccaaagtactccaaatcaaaagagccgcccggcacaacaagctgccacctggggcccccaccacatccacctccggcgaggcgatgaagcccatcgcccactcactccacgccgccgtcgaccgccgctggctgctccctctggccgttggctccgcgctctcgctcctcctcctcgtcgccctcaccaccttcccctcgccctccgcgccctcctcctcctcagcgctcttcgtggagcacaagctcgccccctccccgccgtcccccgccgcctcgctgccccgcatcgccttcctcatctccggatccgcgggggacgcctccgcgctccgccgcgtcctcctcgcgctctaccacccgaggaaccgctacatcctgcacctcgatgccgaggcgcccgactccgaccgcagcaacctcgccgccgacctcgcctcccaccccgccatcgccgccgcggccaacgtgcgcgtcgtcgaccgcgccaacctcgtcacctaccgcgggcccaccatggtcgccaacacgctccacgccgccgccgccttcttgtggggcgacggcgcctcgcactgggattggttcatcaacctctccgcctccgattacccgctcgtcacgcaggatgatctgatacacgtattctccaagctgccgcgcgatctcaacttcatcgaccacaccagcgacattggatggaaggagtttcaaagggcaaagccggtcatcattgatccagggctctacatgaagaagaaagccgatgtgttctggattccgcagaggcggagtgtgcctacagcattcaagctcttcactggttctgcctggatggcactgtccaggccctttgtggaatactgcatatggggctgggacaacctacctcgcacagtgctcatgtactactcaaacttcatctcgtcgccggaaggatacttccacaccgttgtgtgcaacgcggaggagttcaagaacacgacggtgaaccacgacctgcactacatctcgtgggacaaccctccgaagcagcacccgcactacttgacggcggaggacctggaccgcatggtcgccagcgacgcgccgttcgcccgcaagttccacgaggacgacccggtgctggacaggatagacgaggagatcctgggccgcggcgcggacgtgccgactcccgggggctggtgcgctgggacgcgggagaacgggagcgacccttgctcggtggtcggagacaccgggcttgttgtgcctggccgtggagccgcgcggctgcagcggctggtcacgtcgttgctgtcggaggagaagttccacccaaggcagtgcaaatagcaagtggtagactggagatagcaacatttggaatggaaggatatgcatgcatgggtgagattgaatcttaggacagaaggagggattgtcgcctcaacaaggcaagtcgttatccaacgaactaatcaaagggggatttggtggtgggattgcgacttgttcgtcgtccaacccatctctctctctagaacccttgacgacaagttgggagtccttccaacgcgg

SEQ ID NO: 3126 - DNA, 3052 bp, Zea Mays
catttaataccccgaacggaggttcaaacattcgatgtgatagaggctaaattttagcaggggcaaaccaaacaccccctaagtttattcggcaggccttccatgctcaccaatgcattgcctgctacaactacaagtttattcgacaggaatttgatttcaaacaacggcaaaatgaaatcaataaaaggaggaggagaagaaaataatgcaggacgtggagagtggagcaggtcaaccacccagaccactgcaccgcaggctccatcccaaagtactccaaatcaaaagagccgcccggcacaacaagctgccacctggggcccccaccacatccacctccggcgaggcgatgaagcccatcgcccactcactccacgccgccgtcgaccgccgctggctgctccctctggccgttggctccgcgctctcgctcctcctcctcgtcgccctcaccaccttcccctcgccctccgcgccctcctcctcctcagcgctcttcgtggagcacaagctcgccccctccccgccgtcccccgccgcctcgctgccccgcatcgccttcctcatctccggatccgcgggggacgcctccgcgctccgccgcgtcctcctcgcgctctaccacccgaggaaccgctacatcctgcacctcgatgccgaggcgcccgactccgaccgcagcaacctcgccgccgacctcgcctcccaccccgccatcgccgccgcggccaacgtgcgcgtcgtcgaccgcgccaacctcgtcacctaccgcgggcccaccatggtcgccaacacgctccacgccgccgccgccttcttgtggggcgacggcgcctcgcactgggattggttcatcaacctctccgcctccgattacccgctcgtcacgcaggatgatctgatacacgtattctccaagctgccgcgcgatctcaacttcatcgaccacaccagcgacattggatggaaggagtttcaaagggcaaagccggtcatcattgatccagggctctacatgaagaagaaagccgatgtgttctggattccgcagaggcggagtgtgcctacagcattcaagctcttcactggttctgcctggatggcactgtccaggccctttgtggaatactgcatatggggctgggacaacctacctcgcacagtgctcatgtactactcaaacttcatctcgtcgccggaaggatacttccacaccgttgtgtgcaacgcggaggagttcaagaacacgacggtgaaccacgacctgcactacatctcgtgggacaaccctccgaagcagcacccgcactacttgacggcggaggacctggaccgcatggtcgccagcgacgcgccgttcgcccgcaagttccacgaggacgacccggtgctggacaggatagacgaggagatcctgggccgcggcgcggacgtgccgactcccgggggctggtgcgctgggacgcgggagaacgggagcgacccttgctcggtggtcggagacaccgggcttgttgtgcctggccgtggagccgcgcggctgcagcggctggtcacgtcgttgctgtcggaggagaagttccacccaaggcagtgcaagtaaacctgtgcttctacgttgctgttgtactaccacacccacactagtcgtctgtctgtagagccctccctccctccgcattacatgtacttgatcgtccggccatgttgtgatcaatatattttagcttagtttgagctgtccatgttgtgatggacgccgtcgcagcttgataggaattgctgacgacttatttgttcagacatctgaatatctgaacatctgaatgttcagatagcaagtggtagactggagatagcaacatttggaatggaaggatatgcatgcatgggtgagattgaatcttaggacagaaggagggattgtcgcctcaacaaggcaagtcgttatccaacgaactaatcaaagggggatttggtggtgggattgcgacttgttcgtcgtccaacccatctctctctctagaacccttgacgacaagttgggagtccttccaacgcggcggctcctttcgaccaccattgactacatcagacatacatagcttccttgcgtccgtcgatgggggtggatggcgcagccgccgccgccgccggagatggagagacctgctgcttccggggcgctcatctacgccatggtggcgcggggcacggtggcggtggcggagcacacgtcctacacgggcaacttccgggacatcgccgcgcagtgcctgcacaagctgccggcggggaacaaccggttcacctacacctgcgacgcccacaccttcaacttcctcgtcagcgacggatacgcatactgcgtcgttgccaccgagtcggctgggcggcagatccctatggccttcctggagatgataaaggaggaattcaacaggagatattcaggtggcgaagcaggaacggctacagccaacagtctcacccgagatttcgggcccaggcttagagaccagatgcagtactgcacggatcacccagaggaagtgagcaagctgtccagagtgaaggcccaggtggatcaggtgaaaagcatcatgatggaaaacatcgacaaggcctttgatcgcggacagcagatcgacgggcttgtcacaaggacggagcagctccacgacgaggcggcaaggcgtgcagctgcggcgcaggatgtggtaccagaacatgaaggtgaagctcatcgtcctcggcgtcgtggtcgcgctcatccttatcatagtcctctcaatttgccatggcggatgcagcaagtgattatttttttttttaaaaaatgtgctggtgctggtcttttgctcgctacctataaacatatctaatttagagattctacttttttactatatatcatcagagtcactttcttgctcccctctaacctagagaacttttctcggcaagatgtatttacttaaaaaaaagatcatagtagaaactactaaagaccgtgttttatttgcaccttctcattccccatactcag

SEQ ID NO: 3127 - DNA, 931 bp, Zea Mays
atggcgcagccgccgccgccgccggagatggagagacctgctgcttccggggcgctcatctacgccatggtggcgcggggcacggtggcggtggcggagcacacgtcctacacgggcaacttccgggacatcgccgcgcagtgcctgcacaagctgccggcggggaacaaccggttcacctacacctgcgacgcccacaccttcaacttcctcgtcagcgacggatacgcatactgcgtcgttgccaccgagtcggctgggcggcagatccctatggccttcctggagatgataaaggaggaattcaacaggagatattcaggtggcgaagcaggaacggctacagccaacagtctcacccgagatttcgggcccaggcttagagaccagatgcagtactgcacggatcacccagaggaagtgagcaagctgtccagagtgaaggcccaggtggatcaggtgaaaagcatcatgatggaaaacatcgacaaggcctttgatcgcggacagcagatcgacgggcttgtcacaaggacggagcagctccacgacgaggccgttgatttcaggcggcaaggcgtgcagctgcggcgcaggatgtggtaccagaacatgaaggtgaagctcatcgtcctcggcgtcgtggtcgcgctcatccttatcatagtcctctcaatttgccatggcggatgcagcaagtgattatttttttttttaaaaaatgtgctggtgctggtcttttgctcgctacctataaacatatctaatttagagattctacttttttactatatatcatcagagtcactttcttgctcccctctaacctagagaacttttctcggcaagatgtatttacttaaaaaaaagatcatagtagaaactactaaagaccgtgttttatttgcaccttctcattccccatactcag

SEQ ID NO: 3128 - DNA, 311 bp, Zea Mays
gtcgatacatcagcaacacacagctacgatacaatacctggcgccggccgcggcccgccaaggaggtgctggaggaggcgcaggccaaaggaagcctcatcgaccgcatagcctctctggaacaccgtgtgctcaagatggaagaggacatggaggtcacaccagctaacacggacaaggctagccaacagccgagagcgacgatgatgatgagcaagaacgacgatccaagcaggaagaagaagaagaaggggctcaagagcttggtcaagtcctgcctgcgtcatcagaggcaacctcaaaccttttag

SEQ ID NO: 3129 - DNA, 629 bp, Zea Mays
ctggtggagtaggagtgatatatagtactccctctgtttctttttattagtcgctagatagtacaaaattgcactatccagcgactaataaaaagaaacggagggagtaattaattagcacaagcaacagaaataaacaaaacatgtcgctgtcacctgctccgatgcctttgattgcagtgggtggtgtggatcatcagaagcgcatccaaggtcaggtcaggtgtgtgggggcatggcatggcaggtatggaggagttgctgacgctgctgttcaacgcgctgctgctggtgttcgtggtgaagctcttgctggccttgttccacaccaagatcatcgtcatcctcctctacatcctcgtcctcctcttcgccatgctcctctccggcagattccccggttggcgaagtaatccgattccaatgcagacatttttccagtcagcaatgggcactgcatctagtttcatctgcgctatctcctggttcttttcagtcagcagccattggtggcgaaatcaggatccgaatagcttgctgttctgtatgtattgaactgctgatcacgctaatcagtgtacgtcgtggcaagaactcaattcatagaaaaaaaagaaaaagtgtcaatc

SEQ ID NO: 3130 - DNA, 1470 bp, Zea Mays
aaaacatgtcgctgtcacctgctccgatgcctttgattgcagtgggtggtgtggatcatcagaagcgcatccaaggtcaggtcaggtgtgtgggggcatggcatggcaggtatggaggagttgctgacgctgctgttcaacgcgctgctgctggtgttcgtggtgaagctcttgctggccttgttccacaccaagatcatcgtcatcctcctctacatcctcgtcctcctcttcgccatgctcctctccggcagattccccgattgtcttcgattgattgatctgttggattggattggatctgaaaggagccggaaatggggaaaaatgaggagtaagaagagaaaagggagcgccgccgcgagggaaagggccaaggaaagggaaggctcttcttttgccctcccagcgaaaccaagccccgttctggaagggaggcggagacctttcgttgcacagcacagcacagccaccgtgtaactgccggaacacggatggggatccgccgttgcattctctcttctccacaccataagcaggacaccgatgctatttccactacaccataagcagtgatggtatcatagtttctcattcagccgcacccctttcactctactggttatctttttttcctcctataagccgcgatgttaatgttgtgaggtaatgagaatcagaatcaaacatgcagctataaacggtaaaaggagagaaatcataatcaaagcatggccaattcccactagtccttaggcatacataatgcatagccataaactgaactagttttttttccctggcatccacagctttatttagcaacaattaaaatctctaaactaagatttgcttaagaaaagcagccatactcaaaaagcttaacaaaagacagtatgccattattttttcacatcttcatgtacaaaagcttgtatcatccattagttaagtttaccatgtgtttagaatataggctgcattgctgcaatattaagagagagagagagaaggcgacgatgtaccttaatgagttgggtaaagctattaagtgattcatatgcttgagagtctggtacagagctttcattttcttttgtactgtataggatagtttgttttattcttgtttgctttcttcttcttctgcaatttttcagcctaacttttttttttgttttgatccactcttttgcttttctttctccttcagtccagctacatgtttgaatggttcagttaaactaaatgattcttcaacgctaggcttgctagcatccacattaggagttcctcgggtttcttcttcttccccttgcttactcactctatgaagtgcctcttccacaagcaagtagcagtcttcatattcagcagctcttgaagctagtggaagaagtctttggcaaggatttttttttacccaagtgtggcatctaaattctaaattaggattttccactatatccg

SEQ ID NO: 3131 - DNA, 807 bp, Zea Mays
aaaacatgtcgctgtcacctgctccgatgcctttgattgcagtgggtggtgtggatcatcagaagcgcatccaaggtcaggtcaggtgtgtgggggcatggcatggcaggtatggaggagttgctgacgctgctgttcaacgcgctgctgctggtgttcgtggtgaagctcttgctggccttgttccacaccaagatcatcgtcatcctcctctacatcctcgtcctcctcttcgccatgctcctctccggcagattccccgattgtcttcgattgattgatctgttggattggattggatctgaaaggagccggaaatggggaaaaatgaggagtaagaagagaaaagggagcgccgccgcgagggaaagggccaaggaaagggaaggctcttcttttgccctcccagcgaaaccaagccccgttctggaagggaggcggagacctttcgttgcacagcacagcacagccaccgtgtaactgccggaacacggatggggatccgccgttgcattctctcttctccacaccataagcaggacaccgatgctatttccactacaccataagcagtgatggttggcgaagtaatccgattccaatgcagacatttttccagtcagcaatgggcactgcatctagtttcatctgcgctatctcctggttcttttcagtcagcagccattggtggcgaaatcaggatccgaatagcttgctgttctgtatgtattgaactgctgatcacgctaatcagtgtacgtcgtggcaagaactcaattcatagaaaaaaaagaaaaagtgtcaatc

SEQ ID NO: 3132 - DNA, 530 bp, Zea Mays
aacaagtactaatcaagtacatcatatagatgatcttttttgtctcatgtttatgaagctaacgacgcatcagtcacatgaaggacgcagtttggtagagcttctgcttattggaaaagcagcttatctgagaagctggtaaaaatcaaatcagcttctacttattacatgcttttagttcatttcgagaagcagctgaactgataagctgctaagcctactatttggtacaacttctgcttaaatctgtgaaaaaactgttgcgaaataagctatgaaataaggggtgtttggttacagggactaaagtttagtacgtgtcacattaaatgtttgaatagttattacaagtattaaatataatctaattataaagctaattatacaactagagactaaacgacgagacaaatttattaagtctaataaatgtgtaattaacaaatgtttactacaacatcgcatgatcgactcaaacaaattagatttaatagaatcgtatcgtttaatcctcatatgtgtaattgatt

SEQ ID NO: 3133 - DNA, 1364 bp, Zea Mays
cgggactgcatgcctctgcctgccgccgagtcccccacaccaccgcacccatgtcgagcaatccatgcccatcccggtctcttcttgattttcgtccctacccgcctctggctcgctcttctcaattcctgctgcatgtccgtcgtgtcgccgttgcgcgggcatagggccaagcgccgccaaaaggcatcagcagagaagaaggcggccgtggccgcaaggggtaagcaacatcgacggtcagcgggcgtagctcatctatgtagtagccatcgaaagcatctgttttgtctccatgccgttggagacttccggatagtaagcgaagggaccaggaccgcatgcctctgcttgccgctgagtcccccacgccaccgcacccacgccgagcaatccatgcccatcccggcctcttcttgattttcatccctacccgcctctggctcgctcttctcaattcctgccgcatgtccatcgtgtcgtcgttgcgcgggcgcagggccaagcgccgccaaaaggcatcaatagagaataaggcgaccgtgggcgcaaggggtaagcagaagctccctccgaccctagacgaggggaagcaagctacataaggaatagatccggccttcaagtgtttatttcaacttcaatcaggccttgaaatttgaacgtgtaaggatctgctgctaaaccattttactgctagcaagaccacaaattgtgaatgtcatttagaacagaaggtgcattgtgcattctaacagtttgcaactttcattcagaacaggaggcttcagcttcggaatagagatattcttctgtgacaagagtagaggtgtaacttgaaggtgacaaaaatgggcgacgaagctataatcaagggactttggctcaggttgatgacgaagaccaaatacaacagtgaccaaaaaaggataaagactatttagtccttaatgtttcgtattataattgaagacggatgacaaggacataaatgtacttttactcgggctacatctcgtgcctataaatacttgaacagtagcaccgtactgttcacgctggattgtaatcgctctcccgcatcttcaccttcgagcaagccgaaggtatcattgtaatgtgaaatctgttaatattcatacatgttttctgggatgaaaatatagataaatcaatgatatacaattattgtctacatccttttgcattcttattcatacaataaatgataaaggtatgtccttctcgaccttcgtctgattagtattatacccatgaggagataatactttggaggatgaaggtctattataattaacaattgtgttgccttgttcttgactcagcatttgagaacaagtgac

SEQ ID NO: 3134 - DNA, 1972 bp, Zea Mays
agcgggcgtagctcatctatgtagtagccatcgaaagcatctgttttgtctccatgccgttggagacttccggatagtaagcgaagggaccaggaccgcatgcctctgcttgccgctgagtcccccacgccaccgcacccacgccgagcaatccatgcccatcccggcctcttcttgattttcatccctacccgcctctggctcgctcttctcaattcctgccgcatgtccatcgtgtcgtcgttgcgcgggcgcagggccaagcgccgccaaaaggcatcaatagagaataaggcgaccgtgggcgcaaggggtaagcagaagctccctccgaccctagacgaggggaagcaagctacataaagaacagatccgaccttcaagtgtttatttcaacctcaatcaggccttgaaatttgaatacgtaaggatcttctgctaaaccattttactgctagcaagaccacaaattgtgaatttcattcagaacaggtatgtttttccaagaaaacaaaattgttacctatctatttctatagtcatgagataataactttggataccattaatcaggacaatattggttatatttgcataaacatcatgcatattatcttccatgtatagctcgacatgatgtcccttcatacatacttatgtaccaatgcatcattcttctagcttcaactaatctgtattcctaactagaagctccctccgaccctagacgaggggaagcaagctacataaggaatagatccggccttcaagtgtttatttcaacttcaatcaggccttgaaatttgaacgtgtaaggatctgctgctaaaccattttactgctagcaagaccacaaattgtgaatgtcatttagaacaggtatgtttttccaagaaaacaaaattgttacctatctatttccatagtcacgagataatagctttggataccattaatcaggacgatattggttatattcgcataaacatcatgcacattatcttccatgtatagctcgacatgatgtcccttcatacgtacttatgtatcaatgcatcgttgtacaccaatgcatcattcttttactattatttacattcttaatcagcttacgtaccacaaaatctcatttgttctctactccatttgtgcatgttcacattccaatttgaatcttcgacaacttatttcaataatttcagactttcattcagaacaagtatgtttttcaagtaaacaaaattgttacctatcgtcgtaaacctctatgttataaatctcatttgttgtttgctgttttttcgcatcatcacctaatgacctactattttggaatcgaaagaaggtgcattgtgcattctaacagtttgcaactttcattcagaacaggaggcttcagcttcggaatagagatattcttctgtgacaagagtagaggtgtaacttgaaggtgacaaaaatgggcgacgaagctataatcaagggactttggctcaggttgatgacgaagaccaaatacaacagtgaccaaaaaaggataaagactatttagtccttaatgtttcgtattataattgaagacggatgacaaggacataaatgtacttttactcgggctacatctcgtgcctataaatacttgaacagtagcaccgtactgttcacgctggattgtaatcgctctcccgcatcttcaccttcgagcaagccgaaggtatcattgtaatgtgaaatctgttaatattcatacatgttttctgggatgaaaatatagataaatcaatgatatacaattattgtctacatccttttgcattcttattcatacaataaatgataaaggtatgtccttctcgaccttcgtctgattagtattatacccatgaggagataatactttggaggatgaaggtctattataattaacaattgtgttgccttgttcttgactcagcatttgagaacaagtgac

SEQ ID NO: 3135 - DNA, 3614 bp, Zea Mays
agcgggcgtagctcatctatgtagtagccatcgaaagcatctgttttgtctccatgccgttggagacttccggatagtaagcgaagggaccaggaccgcatgcctctgcttgccgctgagtcccccacgccaccgcacccacgccgagcaatccatgcccatcccggcctcttcttgattttcatccctacccgcctctggctcgctcttctcaattcctgccgcatgtccatcgtgtcgtcgttgcgcgggcgcagggccaagcgccgccaaaaggcatcaatagagaataaggcgaccgtgggcgcaaggggtaagcagaagctccctccgaccctagacgaggggaagcaagctacataaagaacagatccgaccttcaagtgtttatttcaacctcaatcaggccttgaaatttgaatacgtaaggatcttctgctaaaccattttactgctagcaagaccacaaattgtgaatttcattcagaacagaagctccctccgaccctagacgaggggaagcaagctacataaggaatagatccggccttcaagtgtttatttcaacttcaatcaggccttgaaatttgaacgtgtaaggatctgctgctaaaccattttactgctagcaagaccacaaattgtgaatgtcatttagaacaggtatgtttttccaagaaaacaaaattgttacctatctatttccatagtcacgagataatagctttggataccattaatcaggacgatattggttatattcgcataaacatcatgcacattatcttccatgtatagctcgacatgatgtcccttcatacgtacttatgtatcaatgcatcgttgtacaccaatgcatcattcttttactattatttacattcttaatcagcttacgtaccacaaaatctcatttgttctctactccatttgtgcatgttcacattccaatttgaatcttcgacaacttatttcaataatttcagactttcattcagaacaaaaggtgcattgtgcattctaacagtttgcaactttcattcagaacaggtatggttttacctctatttttggacatgtatatgttcacgcaacgccttcaaacacattgttgttagctcttgatgcatggtggtttaatgctatttagtatgtattgtaatctcagttcactctacaattgatataagttgtttgaaaacgtcctacgtacttatttgcccttaatatgcttaaatttgctttcatacttacatacttatgtgaccaaaaaacgattactccatgcatgtacacatgttcatgacataatacaagattatacatgcttattataataaaaaagcttacaacacagctgaacatgcatgcatgggcgcgcaccaaacactagttctttacaataccactcgacatgtgttttatctaatgactttaaactgggatttagaaaccttttagataacaattatctaatgactctttaaactgggatttagaaaccttttagataacaattggacatgctcttaggttgtttttttaactatgctaatttgatataaatttattattttcataccttaaatcatttaaagtgcataacttatacacgagtgcgaaatcaatgtcaaacaagtgattttatggtgtgattgatgagtaaaagagaccattgggagtatgaaacaactttccaagtttgggactaaatatgaatatttaagaagttactatttttagcgacctcatttaagaaactgctgaagcatgaattttggttactaacactctaaaataaatttatggagtttttggaactagtggagatgctctaaggctgtttggttctctaactaaattttatttcatgtcacatcatatattaaaagtctaattataagtagtaaatatagtttaattataaaattaattacattgatgaagactaatgataagaaaattttattatgcctaataaatcaataattagcaaatagtaacatgtgtgcgaatcacatactgattgagcttagtagattcatcttcttgtttaattcttatctggataattagttttataataactatattatatttaatattatattgtatttaatatttctaactaacatttaaatatatgatgtgatgggactaaaatttagtctaaaaaccaaacatcccctagattactcttctctaatctaacaaacaaaatagggggaaagagggggaagggagcaattttaggcctcatggctaactgcgccacaacatacctaagattactaggccaaattaatggtgtgcttggtttgtggagtcacccaatgcttcatgaggtgatgcatcataagttcattccatcaattttggtggaatcaacccactcctcatgtatatactaattattagcttataaggaatgaggtggtgatggatcaactcattctattcaacaaaccaaataaaaatgtgaggagtgagaagaagatagatcacttcattcctcaaaccaaacacaccctaaaaaactaacttaaacagaaaaagttacgcagcctgtgactaggatgggggcggggctggagaccagctccccccttccgtgaaacccatttctcatcccactttgtttagcttaacaaggacaaactcatctctattcctgttcccgtgatccctatttcttatttgaggcttcgtggggaatactttagcattagcacaaaaatcatacctgtcgagtggtgatgtcggcagatggctaaacctggaggtcgtgggggacctggacttaagggctattggttagggggctaggggcagggccatgagggacgactaggggggctaggtgtcacactcggttttaaaaggcaaaccgaatgtgaaccatgtacgtgctaggatcaaaacccacgtacacaacgattacataaatgaatattattgggggccttcctcctccgaaggtcctaaaaaagtaactaaccatatgtctccagcatgacatagattattgcaggaggcttcagcttcggaatagagatattcttctgtgacaagagtagaggtgtaacttgaaggtgacaaaaatgggcgacgaagctataatcaagggactttggctcaggttgatgacgaagaccaaatacaacagtgaccaaaaaaggataaagactatttagtccttaatgtttcgtattataattgaagacggatgacaaggacataaatgtacttttactcgggctacatctcgtgcctataaatacttgaacagtagcaccgtactgttcacgctggattgtaatcgctctcccgcatcttcaccttcgagcaagccgaaggtatcattgtaatgtgaaatctgttaatattcatacatgttttctgggatgaaaatatagataaatcaatgatatacaattattgtctacatccttttgcattcttattcatacaataaatgataaaggtatgtccttctcgaccttcgtctgattagtattatacccatgaggagataatactttggaggatgaaggtctattataattaacaattgtgttgccttgttcttgactcagcatttgagaacaagtgac

SEQ ID NO: 3136 - DNA, 3490 bp, Zea Mays
agcgggcgtagctcatctatgtagtagccatcgaaagcatctgttttgtctccatgccgttggagacttccggatagtaagcgaagggaccaggaccgcatgcctctgcttgccgctgagtcccccacgccaccgcacccacgccgagcaatccatgcccatcccggcctcttcttgattttcatccctacccgcctctggctcgctcttctcaattcctgccgcatgtccatcgtgtcgtcgttgcgcgggcgcagggccaagcgccgccaaaaggcatcaatagagaataaggcgaccgtgggcgcaaggggtaagcagaagctccctccgaccctagacgaggggaagcaagctacataaagaacagatccgaccttcaagtgtttatttcaacctcaatcaggccttgaaatttgaatacgtaaggatcttctgctaaaccattttactgctagcaagaccacaaattgtgaatttcattcagaacaggtatgtttttccaagaaaacaaaattgttacctatctatttctatagtcatgagataataactttggataccattaatcaggacaatattggttatatttgcataaacatcatgcatattatcttccatgtatagctcgacatgatgtcccttcatacatacttatgtaccaatgcatcattcttctagcttcaactaatctgtattcctaactagaagctccctccgaccctagacgaggggaagcaagctacataaggaatagatccggccttcaagtgtttatttcaacttcaatcaggccttgaaatttgaacgtgtaaggatctgctgctaaaccattttactgctagcaagaccacaaattgtgaatgtcatttagaacagaaggtgcattgtgcattctaacagtttgcaactttcattcagaacaggtatggttttacctctatttttggacatgtatatgttcacgcaacgccttcaaacacattgttgttagctcttgatgcatggtggtttaatgctatttagtatgtattgtaatctcagttcactctacaattgatataagttgtttgaaaacgtcctacgtacttatttgcccttaatatgcttaaatttgctttcatacttacatacttatgtgaccaaaaaacgattactccatgcatgtacacatgttcatgacataatacaagattatacatgcttattataataaaaaagcttacaacacagctgaacatgcatgcatgggcgcgcaccaaacactagttctttacaataccactcgacatgtgttttatctaatgactttaaactgggatttagaaaccttttagataacaattatctaatgactctttaaactgggatttagaaaccttttagataacaattggacatgctcttaggttgtttttttaactatgctaatttgatataaatttattattttcataccttaaatcatttaaagtgcataacttatacacgagtgcgaaatcaatgtcaaacaagtgattttatggtgtgattgatgagtaaaagagaccattgggagtatgaaacaactttccaagtttgggactaaatatgaatatttaagaagttactatttttagcgacctcatttaagaaactgctgaagcatgaattttggttactaacactctaaaataaatttatggagtttttggaactagtggagatgctctaaggctgtttggttctctaactaaattttatttcatgtcacatcatatattaaaagtctaattataagtagtaaatatagtttaattataaaattaattacattgatgaagactaatgataagaaaattttattatgcctaataaatcaataattagcaaatagtaacatgtgtgcgaatcacatactgattgagcttagtagattcatcttcttgtttaattcttatctggataattagttttataataactatattatatttaatattatattgtatttaatatttctaactaacatttaaatatatgatgtgatgggactaaaatttagtctaaaaaccaaacatcccctagattactcttctctaatctaacaaacaaaatagggggaaagagggggaagggagcaattttaggcctcatggctaactgcgccacaacatacctaagattactaggccaaattaatggtgtgcttggtttgtggagtcacccaatgcttcatgaggtgatgcatcataagttcattccatcaattttggtggaatcaacccactcctcatgtatatactaattattagcttataaggaatgaggtggtgatggatcaactcattctattcaacaaaccaaataaaaatgtgaggagtgagaagaagatagatcacttcattcctcaaaccaaacacaccctaaaaaactaacttaaacagaaaaagttacgcagcctgtgactaggatgggggcggggctggagaccagctccccccttccgtgaaacccatttctcatcccactttgtttagcttaacaaggacaaactcatctctattcctgttcccgtgatccctatttcttatttgaggcttcgtggggaatactttagcattagcacaaaaatcatacctgtcgagtggtgatgtcggcagatggctaaacctggaggtcgtgggggacctggacttaagggctattggttagggggctaggggcagggccatgagggacgactaggggggctaggtgtcacactcggttttaaaaggcaaaccgaatgtgaaccatgtacgtgctaggatcaaaacccacgtacacaacgattacataaatgaatattattgggggccttcctcctccgaaggtcctaaaaaagtaactaaccatatgtctccagcatgacatagattattgcaggaggcttcagcttcggaatagagatattcttctgtgacaagagtagaggtgtaacttgaaggtgacaaaaatgggcgacgaagctataatcaagggactttggctcaggttgatgacgaagaccaaatacaacagtgaccaaaaaaggataaagactatttagtccttaatgtttcgtattataattgaagacggatgacaaggacataaatgtacttttactcgggctacatctcgtgcctataaatacttgaacagtagcaccgtactgttcacgctggattgtaatcgctctcccgcatcttcaccttcgagcaagccgaaggtatcattgtaatgtgaaatctgttaatattcatacatgttttctgggatgaaaatatagataaatcaatgatatacaattattgtctacatccttttgcattcttattcatacaataaatgataaaggtatgtccttctcgaccttcgtctgattagtattatacccatgaggagataatactttggaggatgaaggtctattataattaacaattgtgttgccttgttcttgactcagcatttgagaacaagtgac

SEQ ID NO: 3137 - DNA, 4275 bp, Zea Mays
tagctcatctatgtagtagccatcgaaagcatctgttttgtctccatgccgttggagacttccggatagtaagcgaagggaccaggaccgcatgcctctgcttgccgctgagtcccccacgccaccgcacccacgccgagcaatccatgcccatcccggcctcttcttgattttcatccctacccgcctctggctcgctcttctcaattcctgccgcatgtccatcgtgtcgtcgttgcgcgggcgcagggccaagcgccgccaaaaggcatcaatagagaataaggcgaccgtgggcgcaaggggtaagcaggtatgacatccacgctcatcctttcttttttttcttagtttgctgctattgttctactagatccggatatgattatgtctttgaattatcaccatccgcttgcatcccccgtattttgattcatgttcattggaccgacctgcgatctatttttttcctctttatttcttagtttgctgctattgttctgttatattaggatatgattaggtgttggaataaccagcatatacacatgcaacccctcgcagttcagttcgtgttcgtttgatgagcctcagctacctgttgcttggacttcattgttcagattgcacaaatcagcacctaacccgctaatgttcagttacatttaggcgtattttaagctcgagactttgaagcaagaccttaaatttgagtctgaaaattctcaaactaatctagcttcaactaatctgcattcctaactagaagctccctccgaccctagacgaggggaagcaagctacataaagaacagatccgaccttcaagtgtttatttcaacctcaatcaggccttgaaatttgaatacgtaaggatcttctgctaaaccattttactgctagcaagaccacaaattgtgaatttcattcagaacaggtatgtttttccaagaaaacaaaattgttacctatctatttctatagtcatgagataataactttggataccattaatcaggacaatattggttatatttgcataaacatcatgcatattatcttccatgtatagctcgacatgatgtcccttcatacatacttatgtaccaatgcatcattcttctagcttcaactaatctgtattcctaactagaagctccctccgaccctagacgaggggaagcaagctacataaggaatagatccggccttcaagtgtttatttcaacttcaatcaggccttgaaatttgaacgtgtaaggatctgctgctaaaccattttactgctagcaagaccacaaattgtgaatgtcatttagaacaggtatgtttttccaagaaaacaaaattgttacctatctatttccatagtcacgagataatagctttggataccattaatcaggacgatattggttatattcgcataaacatcatgcacattatcttccatgtatagctcgacatgatgtcccttcatacgtacttatgtatcaatgcatcgttgtacaccaatgcatcattcttttactattatttacattcttaatcagcttacgtaccacaaaatctcatttgttctctactccatttgtgcatgttcacattccaatttgaatcttcgacaacttatttcaataatttcagactttcattcagaacaaaaggtgcattgtgcattctaacagtttgcaactttcattcagaacaggtatggttttacctctatttttggacatgtatatgttcacgcaacgccttcaaacacattgttgttagctcttgatgcatggtggtttaatgctatttagtatgtattgtaatctcagttcactctacaattgatataagttgtttgaaaacgtcctacgtacttatttgcccttaatatgcttaaatttgctttcatacttacatacttatgtgaccaaaaaacgattactccatgcatgtacacatgttcatgacataatacaagattatacatgcttattataataaaaaagcttacaacacagctgaacatgcatgcatgggcgcgcaccaaacactagttctttacaataccactcgacatgtgttttatctaatgactttaaactgggatttagaaaccttttagataacaattatctaatgactctttaaactgggatttagaaaccttttagataacaattggacatgctcttaggttgtttttttaactatgctaatttgatataaatttattattttcataccttaaatcatttaaagtgcataacttatacacgagtgcgaaatcaatgtcaaacaagtgattttatggtgtgattgatgagtaaaagagaccattgggagtatgaaacaactttccaagtttgggactaaatatgaatatttaagaagttactatttttagcgacctcatttaagaaactgctgaagcatgaattttggttactaacactctaaaataaatttatggagtttttggaactagtggagatgctctaaggctgtttggttctctaactaaattttatttcatgtcacatcatatattaaaagtctaattataagtagtaaatatagtttaattataaaattaattacattgatgaagactaatgataagaaaattttattatgcctaataaatcaataattagcaaatagtaacatgtgtgcgaatcacatactgattgagcttagtagattcatcttcttgtttaattcttatctggataattagttttataataactatattatatttaatattatattgtatttaatatttctaactaacatttaaatatatgatgtgatgggactaaaatttagtctaaaaaccaaacatcccctagattactcttctctaatctaacaaacaaaatagggggaaagagggggaagggagcaattttaggcctcatggctaactgcgccacaacatacctaagattactaggccaaattaatggtgtgcttggtttgtggagtcacccaatgcttcatgaggtgatgcatcataagttcattccatcaattttggtggaatcaacccactcctcatgtatatactaattattagcttataaggaatgaggtggtgatggatcaactcattctattcaacaaaccaaataaaaatgtgaggagtgagaagaagatagatcacttcattcctcaaaccaaacacaccctaaaaaactaacttaaacagaaaaagttacgcagcctgtgactaggatgggggcggggctggagaccagctccccccttccgtgaaacccatttctcatcccactttgtttagcttaacaaggacaaactcatctctattcctgttcccgtgatccctatttcttatttgaggcttcgtggggaatactttagcattagcacaaaaatcatacctgtcgagtggtgatgtcggcagatggctaaacctggaggtcgtgggggacctggacttaagggctattggttagggggctaggggcagggccatgagggacgactaggggggctaggtgtcacactcggttttaaaaggcaaaccgaatgtgaaccatgtacgtgctaggatcaaaacccacgtacacaacgattacataaatgaatattattgggggccttcctcctccgaaggtcctaaaaaagtaactaaccatatgtctccagcatgacatagattattgcaggaggcttcagcttcggaatagagatattcttctgtgacaagagtagaggtgtaacttgaaggtgacaaaaatgggcgacgaagctataatcaagggactttggctcaggttgatgacgaagaccaaatacaacagtgaccaaaaaaggataaagactatttagtccttaatgtttcgtattataattgaagacggatgacaaggacataaatgtacttttactcgggctacatctcgtgcctataaatacttgaacagtagcaccgtactgttcacgctggattgtaatcgctctcccgcatcttcaccttcgagcaagccgaaggtatcattgtaatgtgaaatctgttaatattcatacatgttttctgggatgaaaatatagataaatcaatgatatacaattattgtctacatccttttgcattcttattcatacaataaatgataaaggtatgtccttctcgaccttcgtctgattagtattatacccatgaggagataatactttggaggatgaaggtctattataattaacaattgtgttgccttgttcttgactcagcatttgagaacaagtgac

SEQ ID NO: 3138 - DNA, 1443 bp, Zea Mays
tgtagtagccatcgaaagcatctgttttgtctccatgccgttggagacttccggatagtaagcgaagggaccaggaccgcatgcctctgcttgccgctgagtcccccacgccaccgcacccacgccgagcaatccatgcccatcccggcctcttcttgattttcatccctacccgcctctggctcgctcttctcaattcctgccgcatgtccatcgtgtcgtcgttgcgcgggcgcagggccaagcgccgccaaaaggcatcaatagagaataaggcgaccgtgggcgcaaggggtaagcagaagctccctccgaccctagacgaggggaagcaagctacataaggaatagatccggccttcaagtgtttatttcaacttcaatcaggccttgaaatttgaacgtgtaaggatctgctgctaaaccattttactgctagcaagaccacaaattgtgaatgtcatttagaacaggtatgtttttccaagaaaacaaaattgttacctatctatttccatagtcacgagataatagctttggataccattaatcaggacgatattggttatattcgcataaacatcatgcacattatcttccatgtatagctcgacatgatgtcccttcatacgtacttatgtatcaatgcatcgttgtacaccaatgcatcattcttttactattatttacattcttaatcagcttacgtaccacaaaatctcatttgttctctactccatttgtgcatgttcacattccaatttgaatcttcgacaacttatttcaataatttcagactttcattcagaacaaaaggtgcattgtgcattctaacagtttgcaactttcattcagaacaggaggcttcagcttcggaatagagatattcttctgtgacaagagtagaggtgtaacttgaaggtgacaaaaatgggcgacgaagctataatcaagggactttggctcaggttgatgacgaagaccaaatacaacagtgaccaaaaaaggataaagactatttagtccttaatgtttcgtattataattgaagacggatgacaaggacataaatgtacttttactcgggctacatctcgtgcctataaatacttgaacagtagcaccgtactgttcacgctggattgtaatcgctctcccgcatcttcaccttcgagcaagccgaaggtatcattgtaatgtgaaatctgttaatattcatacatgttttctgggatgaaaatatagataaatcaatgatatacaattattgtctacatccttttgcattcttattcatacaataaatgataaaggtatgtccttctcgaccttcgtctgattagtattatacccatgaggagataatactttggaggatgaaggtctattataattaacaattgtgttgccttgttcttgactcagcatttgagaacaagtgac

SEQ ID NO: 3139 - DNA, 3377 bp, Zea Mays
cttccggatagtaagcgaagggaccaggaccgcatgcctctgcttgccgctgagtcccccacgccaccgcacccacgccgagcaatccatgcccatcccggcctcttcttgattttcatccctacccgcctctggctcgctcttctcaattcctgccgcatgtccatcgtgtcgtcgttgcgcgggcgcagggccaagcgccgccaaaaggcatcaatagagaataaggcgaccgtgggcgcaaggggtaagcagaagctccctccgaccctagacgaggggaagcaagctacataaggaatagatccggccttcaagtgtttatttcaacttcaatcaggccttgaaatttgaacgtgtaaggatctgctgctaaaccattttactgctagcaagaccacaaattgtgaatgtcatttagaacaggtatgtttttccaagaaaacaaaattgttacctatctatttccatagtcacgagataatagctttggataccattaatcaggacgatattggttatattcgcataaacatcatgcacattatcttccatgtatagctcgacatgatgtcccttcatacgtacttatgtatcaatgcatcgttgtacaccaatgcatcattcttttactattatttacattcttaatcagcttacgtaccacaaaatctcatttgttctctactccatttgtgcatgttcacattccaatttgaatcttcgacaacttatttcaataatttcagactttcattcagaacaaaaggtgcattgtgcattctaacagtttgcaactttcattcagaacaggtatggttttacctctatttttggacatgtatatgttcacgcaacgccttcaaacacattgttgttagctcttgatgcatggtggtttaatgctatttagtatgtattgtaatctcagttcactctacaattgatataagttgtttgaaaacgtcctacgtacttatttgcccttaatatgcttaaatttgctttcatacttacatacttatgtgaccaaaaaacgattactccatgcatgtacacatgttcatgacataatacaagattatacatgcttattataataaaaaagcttacaacacagctgaacatgcatgcatgggcgcgcaccaaacactagttctttacaataccactcgacatgtgttttatctaatgactttaaactgggatttagaaaccttttagataacaattatctaatgactctttaaactgggatttagaaaccttttagataacaattggacatgctcttaggttgtttttttaactatgctaatttgatataaatttattattttcataccttaaatcatttaaagtgcataacttatacacgagtgcgaaatcaatgtcaaacaagtgattttatggtgtgattgatgagtaaaagagaccattgggagtatgaaacaactttccaagtttgggactaaatatgaatatttaagaagttactatttttagcgacctcatttaagaaactgctgaagcatgaattttggttactaacactctaaaataaatttatggagtttttggaactagtggagatgctctaaggctgtttggttctctaactaaattttatttcatgtcacatcatatattaaaagtctaattataagtagtaaatatagtttaattataaaattaattacattgatgaagactaatgataagaaaattttattatgcctaataaatcaataattagcaaatagtaacatgtgtgcgaatcacatactgattgagcttagtagattcatcttcttgtttaattcttatctggataattagttttataataactatattatatttaatattatattgtatttaatatttctaactaacatttaaatatatgatgtgatgggactaaaatttagtctaaaaaccaaacatcccctagattactcttctctaatctaacaaacaaaatagggggaaagagggggaagggagcaattttaggcctcatggctaactgcgccacaacatacctaagattactaggccaaattaatggtgtgcttggtttgtggagtcacccaatgcttcatgaggtgatgcatcataagttcattccatcaattttggtggaatcaacccactcctcatgtatatactaattattagcttataaggaatgaggtggtgatggatcaactcattctattcaacaaaccaaataaaaatgtgaggagtgagaagaagatagatcacttcattcctcaaaccaaacacaccctaaaaaactaacttaaacagaaaaagttacgcagcctgtgactaggatgggggcggggctggagaccagctccccccttccgtgaaacccatttctcatcccactttgtttagcttaacaaggacaaactcatctctattcctgttcccgtgatccctatttcttatttgaggcttcgtggggaatactttagcattagcacaaaaatcatacctgtcgagtggtgatgtcggcagatggctaaacctggaggtcgtgggggacctggacttaagggctattggttagggggctaggggcagggccatgagggacgactaggggggctaggtgtcacactcggttttaaaaggcaaaccgaatgtgaaccatgtacgtgctaggatcaaaacccacgtacacaacgattacataaatgaatattattgggggccttcctcctccgaaggtcctaaaaaagtaactaaccatatgtctccagcatgacatagattattgcaggaggcttcagcttcggaatagagatattcttctgtgacaagagtagaggtgtaacttgaaggtgacaaaaatgggcgacgaagctataatcaagggactttggctcaggttgatgacgaagaccaaatacaacagtgaccaaaaaaggataaagactatttagtccttaatgtttcgtattataattgaagacggatgacaaggacataaatgtacttttactcgggctacatctcgtgcctataaatacttgaacagtagcaccgtactgttcacgctggattgtaatcgctctcccgcatcttcaccttcgagcaagccgaaggtatcattgtaatgtgaaatctgttaatattcatacatgttttctgggatgaaaatatagataaatcaatgatatacaattattgtctacatccttttgcattcttattcatacaataaatgataaaggtatgtccttctcgaccttcgtctgattagtattatacccatgaggagataatactttggaggatgaaggtctattataattaacaattgtgttgccttgttcttgactcagcatttgagaacaagtgac

SEQ ID NO: 3140 - DNA, 1777 bp, Zea Mays
ccggatagtaagcgaagggaccaggaccgcatgcctctgcttgccgctgagtcccccacgccaccgcacccacgccgagcaatccatgcccatcccggcctcttcttgattttcatccctacccgcctctggctcgctcttctcaattcctgccgcatgtccatcgtgtcgtcgttgcgcgggcgcagggccaagcgccgccaaaaggcatcaatagagaataaggcgaccgtgggcgcaaggggtaagcagctccctccgaccctagacgaggggaagcaagctacataaagaacagatccgaccttcaagtgtttatttcaacctcaatcaggccttgaaatttgaatacgtaaggatcttctgctaaaccattttactgctagcaagaccacaaattgtgaatttcattcagaacaggtatgtttttccaagaaaacaaaattgttacctatctatttctatagtcatgagataataactttggataccattaatcaggacaatattggttatatttgcataaacatcatgcatattatcttccatgtatagctcgacatgatgtcccttcatacatacttatgtaccaatgcatcattcttctagcttcaactaatctgtattcctaactagaagctccctccgaccctagacgaggggaagcaagctacataaggaatagatccggccttcaagtgtttatttcaacttcaatcaggccttgaaatttgaacgtgtaaggatctgctgctaaaccattttactgctagcaagaccacaaattgtgaatgtcatttagaacaggtatgtttttccaagaaaacaaaattgttacctatctatttccatagtcacgagataatagctttggataccattaatcaggacgatattggttatattcgcataaacatcatgcacattatcttccatgtatagctcgacatgatgtcccttcatacgtacttatgtatcaatgcatcgttgtacaccaatgcatcattcttttactattatttacattcttaatcagcttacgtaccacaaaatctcatttgttctctactccatttgtgcatgttcacattccaatttgaatcttcgacaacttatttcaataatttcagactttcattcagaacaaaaggtgcattgtgcattctaacagtttgcaactttcattcagaacaggaggcttcagcttcggaatagagatattcttctgtgacaagagtagaggtgtaacttgaaggtgacaaaaatgggcgacgaagctataatcaagggactttggctcaggttgatgacgaagaccaaatacaacagtgaccaaaaaaggataaagactatttagtccttaatgtttcgtattataattgaagacggatgacaaggacataaatgtacttttactcgggctacatctcgtgcctataaatacttgaacagtagcaccgtactgttcacgctggattgtaatcgctctcccgcatcttcaccttcgagcaagccgaaggtatcattgtaatgtgaaatctgttaatattcatacatgttttctgggatgaaaatatagataaatcaatgatatacaattattgtctacatccttttgcattcttattcatacaataaatgataaaggtatgtccttctcgaccttcgtctgattagtattatacccatgaggagataatactttggaggatgaaggtctattataattaacaattgtgttgccttgttcttgactcagcatttgagaacaagtgac

SEQ ID NO: 3141 - DNA, 1430 bp, Zea Mays
gtaagcgaagggaccaggaccgcatgcctctgcttgccgctgagtcccccacgccaccgcacccacgccgagcaatccatgcccatcccggcctcttcttgattttcatccctacccgcctctggctcgctcttctcaattcctgccgcatgtccatcgtgtcgtcgttgcgcgggcgcagggccaagcgccgccaaaaggcatcaatagagaataaggcgaccgtgggcgcaaggggtaagcagctccctccgaccctagacgaggggaagcaagctacataaagaacagatccgaccttcaagtgtttatttcaacctcaatcaggccttgaaatttgaatacgtaaggatcttctgctaaaccattttactgctagcaagaccacaaattgtgaatttcattcagaacaggtatgtttttccaagaaaacaaaattgttacctatctatttctatagtcatgagataataactttggataccattaatcaggacaatattggttatatttgcataaacatcatgcatattatcttccatgtatagctcgacatgatgtcccttcatacatacttatgtaccaatgcatcattcttctagcttcaactaatctgtattcctaactagaagctccctccgaccctagacgaggggaagcaagctacataaggaatagatccggccttcaagtgtttatttcaacttcaatcaggccttgaaatttgaacgtgtaaggatctgctgctaaaccattttactgctagcaagaccacaaattgtgaatgtcatttagaacagaaggtgcattgtgcattctaacagtttgcaactttcattcagaacaggaggcttcagcttcggaatagagatattcttctgtgacaagagtagaggtgtaacttgaaggtgacaaaaatgggcgacgaagctataatcaagggactttggctcaggttgatgacgaagaccaaatacaacagtgaccaaaaaaggataaagactatttagtccttaatgtttcgtattataattgaagacggatgacaaggacataaatgtacttttactcgggctacatctcgtgcctataaatacttgaacagtagcaccgtactgttcacgctggattgtaatcgctctcccgcatcttcaccttcgagcaagccgaaggtatcattgtaatgtgaaatctgttaatattcatacatgttttctgggatgaaaatatagataaatcaatgatatacaattattgtctacatccttttgcattcttattcatacaataaatgataaaggtatgtccttctcgaccttcgtctgattagtattatacccatgaggagataatactttggaggatgaaggtctattataattaacaattgtgttgccttgttcttgactcagcatttgagaacaagtgac

SEQ ID NO: 3142 - DNA, 2210 bp, Zea Mays
ggaccgcatgcctctgcttgccgctgagtcccccacgccaccgcacccacgccgagcaatccatgcccatcccggcctcttcttgattttcatccctacccgcctctggctcgctcttctcaattcctgccgcatgtccatcgtgtcgtcgttgcgcgggcgcagggccaagcgccgccaaaaggcatcaatagagaataaggcgaccgtgggcgcaaggggtaagcaggtatgacatccacgctcatcctttcttttttttcttagtttgctgctattgttctactagatccggatatgattatgtctttgaattatcaccatccgcttgcatcccccgtattttgattcatgttcattggaccgacctgcgatctatttttttcctctttatttcttagtttgctgctattgttctgttatattaggatatgattaggtgttggaataaccagcatatacacatgcaacccctcgcagttcagttcgtgttcgtttgatgagcctcagctacctgttgcttggacttcattgttcagattgcacaaatcagcacctaacccgctaatgttcagttacatttaggcgtattttaagctcgagactttgaagcaagaccttaaatttgagtctgaaaattctcaaactaatctagcttcaactaatctgcattcctaactagaagctccctccgaccctagacgaggggaagcaagctacataaagaacagatccgaccttcaagtgtttatttcaacctcaatcaggccttgaaatttgaatacgtaaggatcttctgctaaaccattttactgctagcaagaccacaaattgtgaatttcattcagaacaggtatgtttttccaagaaaacaaaattgttacctatctatttctatagtcatgagataataactttggataccattaatcaggacaatattggttatatttgcataaacatcatgcatattatcttccatgtatagctcgacatgatgtcccttcatacatacttatgtaccaatgcatcattcttctagcttcaactaatctgtattcctaactagaagctccctccgaccctagacgaggggaagcaagctacataaggaatagatccggccttcaagtgtttatttcaacttcaatcaggccttgaaatttgaacgtgtaaggatctgctgctaaaccattttactgctagcaagaccacaaattgtgaatgtcatttagaacaggtatgtttttccaagaaaacaaaattgttacctatctatttccatagtcacgagataatagctttggataccattaatcaggacgatattggttatattcgcataaacatcatgcacattatcttccatgtatagctcgacatgatgtcccttcatacgtacttatgtatcaatgcatcgttgtacaccaatgcatcattcttttactattatttacattcttaatcagcttacgtaccacaaaatctcatttgttctctactccatttgtgcatgttcacattccaatttgaatcttcgacaacttatttcaataatttcagactttcattcagaacaaaaggtgcattgtgcattctaacagtttgcaactttcattcagaacaggaggcttcagcttcggaatagagatattcttctgtgacaagagtagaggtgtaacttgaaggtgacaaaaatgggcgacgaagctataatcaagggactttggctcaggttgatgacgaagaccaaatacaacagtgaccaaaaaaggataaagactatttagtccttaatgtttcgtattataattgaagacggatgacaaggacataaatgtacttttactcgggctacatctcgtgcctataaatacttgaacagtagcaccgtactgttcacgctggattgtaatcgctctcccgcatcttcaccttcgagcaagccgaaggtatcattgtaatgtgaaatctgttaatattcatacatgttttctgggatgaaaatatagataaatcaatgatatacaattattgtctacatccttttgcattcttattcatacaataaatgataaaggtatgtccttctcgaccttcgtctgattagtattatacccatgaggagataatactttggaggatgaaggtctattataattaacaattgtgttgccttgttcttgactcagcatttgagaacaagtgac

SEQ ID NO: 3143 - DNA, 1126 bp, Zea Mays
cgcatgcctctgcttgccgctgagtcccccacgccaccgcacccacgccgagcaatccatgcccatcccggcctcttcttgattttcatccctacccgcctctggctcgctcttctcaattcctgccgcatgtccatcgtgtcgtcgttgcgcgggcgcagggccaagcgccgccaaaaggcatcaatagagaataaggcgaccgtgggcgcaaggggtaagcagctccctccgaccctagacgaggggaagcaagctacataaagaacagatccgaccttcaagtgtttatttcaacctcaatcaggccttgaaatttgaatacaagctccctccgaccctagacgaggggaagcaagctacataaggaatagatccggccttcaagtgtttatttcaacttcaatcaggccttgaaatttgaacgtgtaaggatctgctgctaaaccattttactgctagcaagaccacaaattgtgaatgtcatttagaacagaaggtgcattgtgcattctaacagtttgcaactttcattcagaacaggaggcttcagcttcggaatagagatattcttctgtgacaagagtagaggtgtaacttgaaggtgacaaaaatgggcgacgaagctataatcaagggactttggctcaggttgatgacgaagaccaaatacaacagtgaccaaaaaaggataaagactatttagtccttaatgtttcgtattataattgaagacggatgacaaggacataaatgtacttttactcgggctacatctcgtgcctataaatacttgaacagtagcaccgtactgttcacgctggattgtaatcgctctcccgcatcttcaccttcgagcaagccgaaggtatcattgtaatgtgaaatctgttaatattcatacatgttttctgggatgaaaatatagataaatcaatgatatacaattattgtctacatccttttgcattcttattcatacaataaatgataaaggtatgtccttctcgaccttcgtctgattagtattatacccatgaggagataatactttggaggatgaaggtctattataattaacaattgtgttgccttgttcttgactcagcatttgagaacaagtgac

SEQ ID NO: 3144 - DNA, 3372 bp, Zea Mays
ctcttcttgattttcatccctacccgcctctggctcgctcttctcaattcctgccgcatgtccatcgtgtcgtcgttgcgcgggcgcagggccaagcgccgccaaaaggcatcaatagagaataaggcgaccgtgggcgcaaggggtaagcagctccctccgaccctagacgaggggaagcaagctacataaagaacagatccgaccttcaagtgtttatttcaacctcaatcaggccttgaaatttgaatacctccctccgaccctagacgaggggaagcaagctacataaggaatagatccggccttcaagtgtttatttcaacttcaatcaggccttgaaatttgaacgtgtaaggatctgctgctaaaccattttactgctagcaagaccacaaattgtgaatgtcatttagaacaggtatgtttttccaagaaaacaaaattgttacctatctatttccatagtcacgagataatagctttggataccattaatcaggacgatattggttatattcgcataaacatcatgcacattatcttccatgtatagctcgacatgatgtcccttcatacgtacttatgtatcaatgcatcgttgtacaccaatgcatcattcttttactattatttacattcttaatcagcttacgtaccacaaaatctcatttgttctctactccatttgtgcatgttcacattccaatttgaatcttcgacaacttatttcaataatttcagactttcattcagaacaaaaggtgcattgtgcattctaacagtttgcaactttcattcagaacaggtatggttttacctctatttttggacatgtatatgttcacgcaacgccttcaaacacattgttgttagctcttgatgcatggtggtttaatgctatttagtatgtattgtaatctcagttcactctacaattgatataagttgtttgaaaacgtcctacgtacttatttgcccttaatatgcttaaatttgctttcatacttacatacttatgtgaccaaaaaacgattactccatgcatgtacacatgttcatgacataatacaagattatacatgcttattataataaaaaagcttacaacacagctgaacatgcatgcatgggcgcgcaccaaacactagttctttacaataccactcgacatgtgttttatctaatgactttaaactgggatttagaaaccttttagataacaattatctaatgactctttaaactgggatttagaaaccttttagataacaattggacatgctcttaggttgtttttttaactatgctaatttgatataaatttattattttcataccttaaatcatttaaagtgcataacttatacacgagtgcgaaatcaatgtcaaacaagtgattttatggtgtgattgatgagtaaaagagaccattgggagtatgaaacaactttccaagtttgggactaaatatgaatatttaagaagttactatttttagcgacctcatttaagaaactgctgaagcatgaattttggttactaacactctaaaataaatttatggagtttttggaactagtggagatgctctaaggctgtttggttctctaactaaattttatttcatgtcacatcatatattaaaagtctaattataagtagtaaatatagtttaattataaaattaattacattgatgaagactaatgataagaaaattttattatgcctaataaatcaataattagcaaatagtaacatgtgtgcgaatcacatactgattgagcttagtagattcatcttcttgtttaattcttatctggataattagttttataataactatattatatttaatattatattgtatttaatatttctaactaacatttaaatatatgatgtgatgggactaaaatttagtctaaaaaccaaacatcccctagattactcttctctaatctaacaaacaaaatagggggaaagagggggaagggagcaattttaggcctcatggctaactgcgccacaacatacctaagattactaggccaaattaatggtgtgcttggtttgtggagtcacccaatgcttcatgaggtgatgcatcataagttcattccatcaattttggtggaatcaacccactcctcatgtatatactaattattagcttataaggaatgaggtggtgatggatcaactcattctattcaacaaaccaaataaaaatgtgaggagtgagaagaagatagatcacttcattcctcaaaccaaacacaccctaaaaaactaacttaaacagaaaaagttacgcagcctgtgactaggatgggggcggggctggagaccagctccccccttccgtgaaacccatttctcatcccactttgtttagcttaacaaggacaaactcatctctattcctgttcccgtgatccctatttcttatttgaggcttcgtggggaatactttagcattagcacaaaaatcatacctgtcgagtggtgatgtcggcagatggctaaacctggaggtcgtgggggacctggacttaagggctattggttagggggctaggggcagggccatgagggacgactaggggggctaggtgtcacactcggttttaaaaggcaaaccgaatgtgaaccatgtacgtgctaggatcaaaacccacgtacacaacgattacataaatgaatattattgggggccttcctcctccgaaggtcctaaaaaagtaactaaccatatgtctccagcatgacatagattattgcaggaggcttcagcttcggaatagagatattcttctgtgacaagagtagaggtgtaacttgaaggtgacaaaaatgggcgacgaagctataatcaagggactttggctcaggttgatgacgaagaccaaatacaacagtgaccaaaaaaggataaagactatttagtccttaatgtttcgtattataattgaagacggatgacaaggacataaatgtacttttactcgggctacatctcgtgcctataaatacttgaacagtagcaccgtactgttcacgctggattgtaatcgctctcccgcatcttcaccttcgagcaagccgaaggtatcattgtaatgtgaaatctgttaatattcatacatgttttctgggatgaaaatatagataaatcaatgatatacaattattgtctacatccttttgcattcttattcatacaataaatgataaaggtatgtccttctcgaccttcgtctgattagtattatacccatgaggagataatactttggaggatgaaggtctattataattaacaattgtgttgccttgttcttgactcagcatttgagaacaagtgac

SEQ ID NO: 3145 - DNA, 3866 bp, Zea Mays
ctcgctcttctcaattcctgccgcatgtccatcgtgtcgtcgttgcgcgggcgcagggccaagcgccgccaaaaggcatcaatagagaataaggcgaccgtgggcgcaaggggtaagcaggtatgacatccacgctcatcctttcttttttttcttagtttgctgctattgttctactagatccggatatgattatgtctttgaattatcaccatccgcttgcatcccccgtattttgattcatgttcattggaccgacctgcgatctatttttttcctctttatttcttagtttgctgctattgttctgttatattaggatatgattaggtgttggaataaccagcatatacacatgcaacccctcgcagttcagttcgtgttcgtttgatgagcctcagctacctgttgcttggacttcattgttcagattgcacaaatcagcacctaacccgctaatgttcagttacatttaggcgtattttaagctcgagactttgaagcaagaccttaaatttgagtctgaaaattctcaaactaatctagcttcaactaatctgcattcctaactagaagctccctccgaccctagacgaggggaagcaagctacataaagaacagatccgaccttcaagtgtttatttcaacctcaatcaggccttgaaatttgaatacgtaaggatcttctgctaaaccattttactgctagcaagaccacaaattgtgaatttcattcagaacagaagctccctccgaccctagacgaggggaagcaagctacataaggaatagatccggccttcaagtgtttatttcaacttcaatcaggccttgaaatttgaacgtgtaaggatctgctgctaaaccattttactgctagcaagaccacaaattgtgaatgtcatttagaacaggtatgtttttccaagaaaacaaaattgttacctatctatttccatagtcacgagataatagctttggataccattaatcaggacgatattggttatattcgcataaacatcatgcacattatcttccatgtatagctcgacatgatgtcccttcatacgtacttatgtatcaatgcatcgttgtacaccaatgcatcattcttttactattatttacattcttaatcagcttacgtaccacaaaatctcatttgttctctactccatttgtgcatgttcacattccaatttgaatcttcgacaacttatttcaataatttcagactttcattcagaacaaaaggtgcattgtgcattctaacagtttgcaactttcattcagaacaggtatggttttacctctatttttggacatgtatatgttcacgcaacgccttcaaacacattgttgttagctcttgatgcatggtggtttaatgctatttagtatgtattgtaatctcagttcactctacaattgatataagttgtttgaaaacgtcctacgtacttatttgcccttaatatgcttaaatttgctttcatacttacatacttatgtgaccaaaaaacgattactccatgcatgtacacatgttcatgacataatacaagattatacatgcttattataataaaaaagcttacaacacagctgaacatgcatgcatgggcgcgcaccaaacactagttctttacaataccactcgacatgtgttttatctaatgactttaaactgggatttagaaaccttttagataacaattatctaatgactctttaaactgggatttagaaaccttttagataacaattggacatgctcttaggttgtttttttaactatgctaatttgatataaatttattattttcataccttaaatcatttaaagtgcataacttatacacgagtgcgaaatcaatgtcaaacaagtgattttatggtgtgattgatgagtaaaagagaccattgggagtatgaaacaactttccaagtttgggactaaatatgaatatttaagaagttactatttttagcgacctcatttaagaaactgctgaagcatgaattttggttactaacactctaaaataaatttatggagtttttggaactagtggagatgctctaaggctgtttggttctctaactaaattttatttcatgtcacatcatatattaaaagtctaattataagtagtaaatatagtttaattataaaattaattacattgatgaagactaatgataagaaaattttattatgcctaataaatcaataattagcaaatagtaacatgtgtgcgaatcacatactgattgagcttagtagattcatcttcttgtttaattcttatctggataattagttttataataactatattatatttaatattatattgtatttaatatttctaactaacatttaaatatatgatgtgatgggactaaaatttagtctaaaaaccaaacatcccctagattactcttctctaatctaacaaacaaaatagggggaaagagggggaagggagcaattttaggcctcatggctaactgcgccacaacatacctaagattactaggccaaattaatggtgtgcttggtttgtggagtcacccaatgcttcatgaggtgatgcatcataagttcattccatcaattttggtggaatcaacccactcctcatgtatatactaattattagcttataaggaatgaggtggtgatggatcaactcattctattcaacaaaccaaataaaaatgtgaggagtgagaagaagatagatcacttcattcctcaaaccaaacacaccctaaaaaactaacttaaacagaaaaagttacgcagcctgtgactaggatgggggcggggctggagaccagctccccccttccgtgaaacccatttctcatcccactttgtttagcttaacaaggacaaactcatctctattcctgttcccgtgatccctatttcttatttgaggcttcgtggggaatactttagcattagcacaaaaatcatacctgtcgagtggtgatgtcggcagatggctaaacctggaggtcgtgggggacctggacttaagggctattggttagggggctaggggcagggccatgagggacgactaggggggctaggtgtcacactcggttttaaaaggcaaaccgaatgtgaaccatgtacgtgctaggatcaaaacccacgtacacaacgattacataaatgaatattattgggggccttcctcctccgaaggtcctaaaaaagtaactaaccatatgtctccagcatgacatagattattgcaggaggcttcagcttcggaatagagatattcttctgtgacaagagtagaggtgtaacttgaaggtgacaaaaatgggcgacgaagctataatcaagggactttggctcaggttgatgacgaagaccaaatacaacagtgaccaaaaaaggataaagactatttagtccttaatgtttcgtattataattgaagacggatgacaaggacataaatgtacttttactcgggctacatctcgtgcctataaatacttgaacagtagcaccgtactgttcacgctggattgtaatcgctctcccgcatcttcaccttcgagcaagccgaaggtatcattgtaatgtgaaatctgttaatattcatacatgttttctgggatgaaaatatagataaatcaatgatatacaattattgtctacatccttttgcattcttattcatacaataaatgataaaggtatgtccttctcgaccttcgtctgattagtattatacccatgaggagataatactttggaggatgaaggtctattataattaacaattgtgttgccttgttcttgactcagcatttgagaacaagtgac

SEQ ID NO: 3146 - DNA, 844 bp, Zea Mays
ctcaattcctgccgcatgtccatcgtgtcgtcgttgcgcgggcgcagggccaagcgccgccaaaaggcatcaatagagaataaggcgaccgtgggcgcaaggggtaagcagaagctccctccgaccctagacgaggggaagcaagctacataaggaatagatccggccttcaagtgtttatttcaacttcaatcaggccttgaaatttgaacgtaaggtgcattgtgcattctaacagtttgcaactttcattcagaacaggaggcttcagcttcggaatagagatattcttctgtgacaagagtagaggtgtaacttgaaggtgacaaaaatgggcgacgaagctataatcaagggactttggctcaggttgatgacgaagaccaaatacaacagtgaccaaaaaaggataaagactatttagtccttaatgtttcgtattataattgaagacggatgacaaggacataaatgtacttttactcgggctacatctcgtgcctataaatacttgaacagtagcaccgtactgttcacgctggattgtaatcgctctcccgcatcttcaccttcgagcaagccgaaggtatcattgtaatgtgaaatctgttaatattcatacatgttttctgggatgaaaatatagataaatcaatgatatacaattattgtctacatccttttgcattcttattcatacaataaatgataaaggtatgtccttctcgaccttcgtctgattagtattatacccatgaggagataatactttggaggatgaaggtctattataattaacaattgtgttgccttgttcttgactcagcatttgagaacaagtgac

SEQ ID NO: 3147 - DNA, 993 bp, Zea Mays
ctcaattcctgccgcatgtccatcgtgtcgtcgttgcgcgggcgcagggccaagcgccgccaaaaggcatcaatagagaataaggcgaccgtgggcgcaaggggtaagcagctccctccgaccctagacgaggggaagcaagctacataaagaacagatccgaccttcaagtgtttatttcaacctcaatcaggccttgaaatttgaatacgtaaggatcttctgctaaaccattttactgctagcaagaccacaaattgtgaatttcattcagaacagacgaggggaagcaagctacataaggaatagatccggccttcaagtgtttatttcaacttcaatcaggccttgaaatttgaacgtaaggtgcattgtgcattctaacagtttgcaactttcattcagaacaggaggcttcagcttcggaatagagatattcttctgtgacaagagtagaggtgtaacttgaaggtgacaaaaatgggcgacgaagctataatcaagggactttggctcaggttgatgacgaagaccaaatacaacagtgaccaaaaaaggataaagactatttagtccttaatgtttcgtattataattgaagacggatgacaaggacataaatgtacttttactcgggctacatctcgtgcctataaatacttgaacagtagcaccgtactgttcacgctggattgtaatcgctctcccgcatcttcaccttcgagcaagccgaaggtatcattgtaatgtgaaatctgttaatattcatacatgttttctgggatgaaaatatagataaatcaatgatatacaattattgtctacatccttttgcattcttattcatacaataaatgataaaggtatgtccttctcgaccttcgtctgattagtattatacccatgaggagataatactttggaggatgaaggtctattataattaacaattgtgttgccttgttcttgactcagcatttgagaacaagtgac

SEQ ID NO: 3148 - DNA, 2907 bp, Zea Mays
atgtccaagttcgatcggcaagcagatggcgtcttggagcctttccaagctaagcatgtcttaacagggattaatcttgaatgtttagctgccattcttcaaaagaaagaaagccactatgacttggatgtatacgcttatgtaattcgtcaagtctattgggattacacaggtaaggttggtgctgctgatacagatggagttgatacggcataccgcctagtcgcagatcacatgagaatgatcgctgttactaatgcacccggttctcaacttgggttaggaaatgaaggtcgcgagtatttcctgaagtgtgctgataaacaggctgtgaagtatggctatcaagtacttaagataaatgaagaggattacgacatgatgtcttcttcaatgcaccggtgcaaataacagagcatccagttaggtcacctgtcagtcttcatgattttcagtatgagtcgtcgttagcaaattttgtatttttgctccctgctgtattgagttttcgctttgtctttcctccagaagtatcttgccaggaacaccttgaaactacttatgcttggtgttgctgcatatatgtcattttgcaccctgctgtattgtgtttctgcttgtctttcctacaacagttatcttgccaagaattgtatgttaggctacttatggttggagttgctgcatgctgtcatctcacagtgtgcagttaccacttctatcttttgctgtgcgcttctttactgaaagtaaaaataacattcaagatgaaacctgctcaggatattgattctatgactggtttagttcttgccagcctgtcatgcaacttctattccgagtaggttaaacatactcacagtgggtatatagaaagaatacatgccatctatgattactgcatgtgagcttgtactcaaatgattttttttccttgaacagtgttgttgatgcaattcttctaaatgaacctgatttatgtaccgagcttgaaaaagaaataatcgacagaatagtcaaagatgaagtgatgatctacaaaaagactaaagcagagttgcggaatcaggaacagccgtttgatatggggaaaaagaagaaaaggaacaaaaatgtccctgctgttgtgtggtatccgacaagggttatcgaatttcttggtcggcgcacacccattatcctcaaggaaaaggatacacggtgctccctagtagcaatatgtttcaccctcacttcatggagcttattggaaatgcctaggacagagttcattcacttcttgttcctgtgccactgcaggcaacgttctcctgcttggagagaaaataaccctcgatttagatatcaagaaagtgttggagagccatctcatccatcttgtccagaggcctcttttgtgtggcaatacacaaatgcaggcatgcaactgtatatatgcaagtgttttgaaaatgaatgtccattaactcaaaagctaagctattgtccacttatactgcagttggaacagaacttggaactatcagagttcaataaacaagttcttggtgtattgccgaagcttacatgcagcttatactttgatgtgacattttctagctcttgtggcttagagaagacctttgaaactgcactgtttggttttcttggtgtccctctacgccatggctggttggtagatccccagggccctcagctaacccgatatggattctcttccttacataatgacctcagagcgttacaacctactgtcctgatctggaatgaaaacttaattacaatatctaagtttgaagacaaaatatatgtgttgctgaacgatttgtccttgttgagaactgaaaccgatgctgtgtgggaaaggttaacgcaggcaaatggtgatggagtttttgttgattgtaactttgtgcctacagattctaagattcaatcagtactgccactgacgaaaactgaaagaaagaaaaggataaaagagaagatggatctgaagaagaaagagaaggatagtaacaaggacaaagatgatgaggataccaaggataaagatgatgggaaagaagaggatagtaacgaggacagagatgatgaggagaccgaggagaaagatgatgggaatgttgcccctcaaacctatttcttgcagggcaggcatatcaacttgaatgttaggcctatcaattttcttggactatctacccatgttatccaccagataaatgatggcccatgcgcccttattgcagcaatgttctattctcagggggacatctcttttgaaccacatgaaactgtggtgtcaatggagtatctacttggccttgtcctcgctcttcttggaggaagtgtgaaaatgcaggactattctgatgaaagaaaaagtcagatattgaatgtggtgaagagtctggccggagggtttgatatggatgttatcttcaccagaacggatggttttacaatgactccagagtggttgcttctggattgcttagatctcaaccttcgacatggttggattgctgctaggatcaatggagtattaaattctctagtcactgattctaattatttagaaactcgtgtagtttggcagacgcttgacggggtcaatggtgatggagtatatttggacagcaacttcacaccaatttatatggggctagatgcagctgcttctatatatttaatgtggcccaaaataaattaattttctgtatctacaatgctttgttattatggtatgatttttttctttttcatttctatttctatatgtgatatatttatgttgtagatgtagtcaaatacaatttactctccacatatacatttttttaaagcgcaggagagctgcgtttcattgaaattagagagaaataggtgggtcccctacatgat

SEQ ID NO: 3149 - DNA, 2225 bp, Zea Mays
atgtccaagttcgatcggcaagcagatggcgtcttggagcctttccaagctaagcatgtcttaacagggattaatcttgaatgtttagctgccattcttcaaaagaaagaaagccactatgacttggatgtatacgcttatgtaattcgtcaagtctattgggattacacaggtaaggttggtgctgctgatacagatggagttgatacggcataccgcctagtcgcagatcacatgagaatgatcgctgttactaatgcacccggttctcaacttgggttaggaaatgaaggtcgcgagtatttcctgaagtgtgctgataaacaggctgtgaagtatggctatcaagtacttaagataaatgaagaggattacgacatgatgtcttcttcaatgcaccggtgcaaataacagagcatccatgttgttgatgcaattcttctaaatgaacctgatttatgtaccgagcttgaaaaagaaataatcgacagaatagtcaaagatgaagtgatgatctacaaaaagactaaagcagagttgcggaatcaggaacagccgtttgatatggggaaaaagaagaaaaggaacaaaaatgtccctgctgttgtgtggtatccgacaagggttatcgaatttcttggtcggcgcacacccattatcctcaaggaaaaggatacacggtgctccctagtagcaatatgcaacgttctcctgcttggagagaaaataaccctcgatttagatatcaagaaagtgttggagagccatctcatccatcttgtccagaggcctcttttgtgtggcaatacacaaatgcagttggaacagaacttggaactatcagagttcaataaacaagttcttggtgtattgccgaagcttacatgcagcttatactttgatgtgacattttctagctcttgtggcttagagaagacctttgaaactgcactgtttggttttcttggtgtccctctacgccatggctggttggtagatccccagggccctcagctaacccgatatggattctcttccttacataatgacctcagagcgttacaacctactgtcctgatctggaatgaaaacttaattacaatatctaagtttgaagacaaaatatatgtgttgctgaacgatttgtccttgttgagaactgaaaccgatgctgtgtgggaaaggttaacgcaggcaaatggtgatggagtttttgttgattgtaactttgtgcctacagattctaagattcaatcagtactgccactgacgaaaactgaaagaaagaaaaggataaaagagaagatggatctgaagaagaaagagaaggatagtaacaaggacaaagatgatgaggataccaaggataaagatgatgggaaagaagaggatagtaacgaggacagagatgatgaggagaccgaggagaaagatgatgggaatgttgcccctcaaacctatttcttgcagggcaggcatatcaacttgaatgttaggcctatcaattttcttggactatctacccatgttatccaccagataaatgatggcccatgcgcccttattgcagcaatgttctattctcagggggacatctcttttgaaccacatgaaactgtggtgtcaatggagtatctacttggccttgtcctcgctcttcttggaggaagtgtgaaaatgcaggactattctgatgaaagaaaaagtcagatattgaatgtggtgaagagtctggccggagggtttgatatggatgttatcttcaccagaacggatggttttacaatgactccagagtggttgcttctggattgcttagatctcaaccttcgacatggttggattgctgctaggatcaatggagtattaaattctctagtcactgattctaattatttagaaactcgtgtagtttggcagacgcttgacggggtcaatggtgatggagtatatttggacagcaacttcacaccaatttatatggggctagatgcagctgcttctatatatttaatgtggcccaaaataaattaattttctgtatctacaatgctttgttattatggtatgatttttttctttttcatttctatttctatatgtgatatatttatgttgtagatgtagtcaaatacaatttactctccacatatacatttttttaaagcgcaggagagctgcgtttcattgaaattagagagaaataggtgggtcccctacatgat

SEQ ID NO: 3150 - DNA, 1409 bp, Zea Mays
actttgatatttcattaggatgctgagttggactcctcgatatgtggaagctcctactccaaactttcgtataatcttgctatctatgaatcaattcgaccccaagacaaattcagggcctcaaaagcatggtcgatatgaagatgatatgttctatacagcgcttgcattctctaaaactggatcagaaaaagaacttgattctacttcttattctcttccttacataatgacctcagagcgttacaacctactgtcctgatctggaatgaaaacttaattacaatatctaagtttgaagacaaaatatatgtgttgctgaacgatttgtccttgttgagaactgaaaccgatgctgtgtgggaaaggttaacgcaggcaaatggtgatggagtttttgttgattgtaactttgtgcctacagattctaagattcaatcagtactgccactgacgaaaactgaaagaaagaaaaggataaaagagaagatggatctgaagaagaaagagaaggatagtaacaaggacaaagatgatgaggataccaaggataaagatgatgggaaagaagaggatagtaacgaggacagagatgatgaggagaccgaggagaaagatgatgggaatgttgcccctcaaacctatttcttgcagggcaggcatatcaacttgaatgttaggcctatcaattttcttggactatctacccatgttatccaccagataaatgatggcccatgcgcccttattgcagcaatgttctattctcagggggacatctcttttgaaccacatgaaactgtggtgtcaatggagtatctacttggccttgtcctcgctcttcttggaggaagtgtgaaaatgcaggactattctgatgaaagaaaaagtcagatattgaatgtggtgaagagtctggccggagggtttgatatggatgttatcttcaccagaacggatggttttacaatgactccagagtggttgcttctggattgcttagatctcaaccttcgacatggttggattgctgctaggatcaatggagtattaaattctctagtcactgattctaattatttagaaactcgtgtagtttggcagacgcttgacggggtcaatggtgatggagtatatttggacagcaacttcacaccaatttatatggggctagatgcagctgcttctatatatttaatgtggcccaaaataaattaattttctgtatctacaatgctttgttattatggtatgatttttttctttttcatttctatttctatatgtgatatatttatgttgtagatgtagtcaaatacaatttactctccacatatacatttttttaaagcgcaggagagctgcgtttcattgaaattagagagaaataggtgggtcccctacatgat

SEQ ID NO: 3151 - DNA, 1445 bp, Zea Mays
attaggatgctgagttggactcctcgatatgtggaagctcctactccaaactttcgtataatcttgctatctatgaatcaattcgaccccaagacaaattcagggcctcaaaagcatggtcgatatgaagatgatatgttctatacagcgcttgcattctctaaaactggatcagaaaaagaacttgattctacttcttgtgcaacaatctcaacatttttgcagggccctcagctaacccgatatggattctcttccttacataatgacctcagagcgttacaacctactgtcctgatctggaatgaaaacttaattacaatatctaagtttgaagacaaaatatatgtgttgctgaacgatttgtccttgttgagaactgaaaccgatgctgtgtgggaaaggttaacgcaggcaaatggtgatggagtttttgttgattgtaactttgtgcctacagattctaagattcaatcagtactgccactgacgaaaactgaaagaaagaaaaggataaaagagaagatggatctgaagaagaaagagaaggatagtaacaaggacaaagatgatgaggataccaaggataaagatgatgggaaagaagaggatagtaacgaggacagagatgatgaggagaccgaggagaaagatgatgggaatgttgcccctcaaacctatttcttgcagggcaggcatatcaacttgaatgttaggcctatcaattttcttggactatctacccatgttatccaccagataaatgatggcccatgcgcccttattgcagcaatgttctattctcagggggacatctcttttgaaccacatgaaactgtggtgtcaatggagtatctacttggccttgtcctcgctcttcttggaggaagtgtgaaaatgcaggactattctgatgaaagaaaaagtcagatattgaatgtggtgaagagtctggccggagggtttgatatggatgttatcttcaccagaacggatggttttacaatgactccagagtggttgcttctggattgcttagatctcaaccttcgacatggttggattgctgctaggatcaatggagtattaaattctctagtcactgattctaattatttagaaactcgtgtagtttggcagacgcttgacggggtcaatggtgatggagtatatttggacagcaacttcacaccaatttatatggggctagatgcagctgcttctatatatttaatgtggcccaaaataaattaattttctgtatctacaatgctttgttattatggtatgatttttttctttttcatttctatttctatatgtgatatatttatgttgtagatgtagtcaaatacaatttactctccacatatacatttttttaaagcgcaggagagctgcgtttcattgaaattagagagaaataggtgggtcccctacatgat

SEQ ID NO: 3152 - DNA, 1918 bp, Zea Mays
cttgattctacttcttgtgcaacaatctcaacatttttgcagggccctcagctaacccgatatggattctcttccttacataatgacctcagagcgttacaacctactgtcctgatctggaatgaaaacttaattacaatatctaagtttgaagacaaaatatatgtgttgctgaacgatttgtccttgttgagaactgaaaccgatgctgtgtgggaaaggttaacgcaggcaaatggtgatggagtttttgttgattgtaactttgtgcctacagattctaagattcaatcagtactgccactgacgaaaactgaaagaaagaaaaggataaaagagaagatggatctgaagaagaaagagaaggatagtaacaaggacaaagatgatgaggataccaaggataaagatgatgggaaagaagaggatagtaacgaggacagagatgatgaggagaccgaggagaaagatgatgggaatgttgcccctcaaacctatttcttgcagggcaggcatatcaacttgaatgttaggcctatcaattttcttggactatctacccatgttatccaccagataaatgatggcccatgcgcccttattgcagcaatgttctattctcagggggacatctcttttgaaccacatgaaactgtggtgtcaatggagtatctacttggccttgtcctcgctcttcttggaggaagtgtgaaaatgcaggactattctgatgaaagaaaaagtcagatattgaatgtggtgaagagtctggccggagggtttgatatggatgttatcttcaccagaacggatggttttacaatgactccagagtggttgcttctggattgcttagatctcaaccttcgacatggttggattgctgctagggtaagcaagtttatcatgagcattgattatgtcgttagtgcaaattttcgaattcagtgcgcaagcatcttatatgatgtcgttcatgatactaattattaggatttgttgaccggacccgaagtatcatttgaaagtcttacgttggcttctaatgaacctggatttccacatggttagttttatttttcagctacacattgcacaacctttttcatcactcttattgattttgttcaatgtttttagcggaggagatcaagaattttctaaggggacctcaacttactcccattgggtaaaatacctagttttcctttttctatgtgcagtcttttttgtttggaaactatttgttgtttgccattggttaatattttaactaaccatgtgccaatgctacagcttggtttcgctgcaagaggactttgttgagaatgttccgtgcattctgttctggaacaagcattaccatactatagttatggtgaaaactcaacttttgttgtattttattactttagaagatatgttagttgccttctatttttcctttttgacccgttttgatcttatgcagatcaatggagtattaaattctctagtcactgattctaattatttagaaactcgtgtagtttggcagacgcttgacggggtatgctattctgtatttttcataatttctttgtgtgattgtgaacttatggtcattcttagctttggcttgtcaggtcaatggtgatggagtatatttggacagcaacttcacaccaatttatatggggctagatgcagctgcttctatatatttaatgtggcccaaaataaattaattttctgtatctacaatgctttgttattatggtatgatttttttctttttcatttctatttctatatgtgatatatttatgttgtagatgtagtcaaatacaatttactctccacatatacatttttttaaagcgcaggagagctgcgtttcattgaaattagagagaaataggtgggtcccctacatgat

SEQ ID NO: 3153 - DNA, 860 bp, Zea Mays
ttttgcatggttaattaggcaaatggtgatggagtttttgttgattgtaactttgtgcctacagattctaagattcaatcagtactgccactgacgaaaactgaaagaaagaaaaggataaaagagaagatggatctgaagaagaaagagaaggatagtaacaaggacaaagatgatgaggataccaaggataaagatgatgggaaagaagaggatagtaacgaggacagagatgatgaggagaccgaggagaaagatgatgggaatgttgcccctcaaacctatttcttgcagggcaggcatatcaacttgaatgttaggcctatcaattttcttggactatctacccatgttatccaccagataaatgatggcccatgcgcccttattgcagcaatgttctattctcagggggacatctcttttgaaccacatgaaactgtggtgtcaatggagtatctacttggccttgtcctcgctcttcttggaggaagtgtgaaaatgcaggactattctgatgaaagaaaaagtcagatattgaatgtggtgaagagtctggccggagggtttgatatggatgttatcttcaccagaacggatggttttacaatgactccagagtggttgcttctggattgcttagatctcaaccttcgacatggttggattgctgctaggatcaatggagtattaaattctctagtcactgattctaattatttagaaactcgtgtagtttggcagacgcttgacgggatgtagtcaaatacaatttactctccacatatacatttttttaaagcgcaggagagctgcgtttcattgaaattagagagaaataggtgggtcccctacatgat

SEQ ID NO: 3154 - DNA, 766 bp, Zea Mays
cgatgctgtgtgggaaaggttaacacatgcaaatggtgatggagtttttgttgattgtaactttgtgcctacagattctaagattcaatcagtactgggggacatctcttttgaaccacatgaaactgtggtgtcaatggagtatctacttggccttgtccttgctcttcttggaggaagtgtgaaaatgcaggactattctgatgaaagaaaaagtcagatattggatgtggtgaagagtctggccggagggtttgatatggatgttatcttcaccagaacggatggttttacaatgactcaagagtggttgcttctggattgcttagatctcaaccttcgacatggttggattgctgctagggatttgttgaccggacccgaagtatcatttgaaagtcttacattggcttctaatgaacctggttttccacatgcggaggagatcaagaattttctaaggggacctcaacttactcccattggcttggtttcgctgcaagaagactttgttgagaatgttccgtgcattctgttctggaacaagcattaccatactatagttatgatcaatggagtattaaattctctagtcactgattctaattatttagaaactcgtatagtttggcagacgcttgacggggtcaacggtgatggagtatatttggacaacaacttcacaccagtttatgtggggctagatgcagctacttctgtatatgtaatgtggcccaaaataaattaattttctgtatctgcaata

SEQ ID NO: 3155 - DNA, 583 bp, Zea Mays
atcaattttcttggactatctacccatgttatccaccagataaatgatggcccatgcgcccttattgcagtctggggacatctcttttgaaccacatgaaactgtggtgtcaatggagtatctacttggccttgtccttgctcttcttggaggaagtgtgaaaatgcaggactattctgatgaaagaaaaagtcagatattggatgtggtgaagagtctggccggagggtttgatatggatgttatcttcaccagaacggatggttttacaatgactcaagagtggttgcttctggattgcttagatctcaaccttcgacatggttggattgctgctagggatttgttgaccggacccgaagtatcatttgaaagtcttacattggcttctaatgaacctggttttccacatgcggaggagatcaagaattttctaaggggacctcaacttactcccattggcttggtttcgctgcaagaagactttgttgagaatgttccgtgcattctgttctggaacaagcattaccatactatagttatgatcaatggagtattaaattctctagtcactgattctaat

SEQ ID NO: 3156 - DNA, 718 bp, Zea Mays
atgatggcccatgcgcccttattgcagtctgcaatgttctattgctcagggggacatctcttttgaaccacatgaaactgtggtgtcaatggagtatctacttggccttgtccttgctcttcttggaggaagtgtgaaaatgcaggactattctgatgaaagaaaaagtcagatattggatgtggtgaagagtctggccggagggtttgatatggatgttatcttcaccagaacggatggttttacaatgactcaagagtggttgcttctggattgcttagatctcaaccttcgacatggttggattgctgctagggatttgttgaccggacccgaagtatcatttgaaagtcttacattggcttctaatgaacctggttttccacatgcggaggagatcaagaattttctaaggggacctcaacttactcccattggcttggtttcgctgcaagaagactttgttgagaatgttccgtgcattctgttctggaacaagcattaccatactatagttatgatcaatggagtattaaattctctagtcactgattctaattatttagaaactcgtatagtttggcagacgcttgacggggtcaacggtgatggagtatatttggacaacaacttcacaccagtttatgtggggctagatgcagctacttctgtatatgtaatgtggcccaaaataaattaattttctgtatctgcaata

SEQ ID NO: 3157 - DNA, 1477 bp, Zea Mays
gccgcatccgtccgggcctcctcgtctccccagccccgctgccgccgggttcatcagcagaagctgcttgctccgccgccgccctcttcctcctctactgcaccagcttgtactgctgtagttccagcaccaccacattctcctcctgctcctgttacctcagcaccagcttctcccctgcaccttctgcagcagctccagatactaaagatgaaccattgcaagataaaacagttgaagaaagtacagatgttgtgactggaaacatatctggttttcctgccagccaatttgatcatagtgcatgggcatacaagggtgccatggtcaggaatatgccagatgacccgtcccagtcacaacatctcgttcaagaagatttagttgatgtatttgacattttggatgacctgaagaatgaccctgtacagcgtgatttgttgaaagaagtcgagaaacacgatgtaaagaatgtttctacatttggttctactgaaaggagcatccccctgtcccaaggtttcacgatgccccggttgtacctgatgacactgacattcagtacacacctcctcagccacgagcgacacgttctcaagctcaacctctgaaatcttcgctccgtaccaatgagactaggcagattaggaaaggccagaagaagctcaagaagtcgcctaagaaagtctcccaagatgttgagcttgatgacaatggtttccccatcatcgactttgctgctctagaccgttttgatcctcctccacatcttgccgtggatgttgagagttatggtggaccagctgcctcaggttgatatggtggactcgtgtcactattcagacctgaatggcgtcgcaaagtggctgcaaagcaggcagctttgaggatggtggcagaaattcttgagaagaggattgctcacccacagttgacatactttacatatgttgaaaagttccttcctgaggatgatccagaagatgtgattgctttggagtacaacctaattggcagtaagcagatttatgaagcatgtgcagatggcgaaatgagaagcaatgaccaagtgtactactacaccatctgcatagctaatgaagacaagctcttcaggaccgaagctgccgattacagaattttccttcctaccaatctgtcattcgcttgggtgatcacccaggccgtcgtcggtgcaagtcgccggagcaacgctgttaggcttgagcacgaacgcggcgtgaccgacaagctcggtgaggtggagcacgatgagcgagacgggacctcaacgcctccagtaggtcgatcagcggcgccgatgggcatgccgccggggagcgccagccctagcatcatgggcccgatcatgtacttgaacccgatctcgtccgtcaccagcgccgcgatgacgacgacaaaggaaccctccgacaacagtgaccccgtcggcgggcgcttgtacgcgatgtactga

SEQ ID NO: 3158 - DNA, 1342 bp, Zea Mays
ctcctcgtctccccagccccgctgccgccgggttcatcagcagaagctgcttgctccgccgccgccctcttcctcctctactgttgcaagataaaacagttgaagaaagtacagatgttgtgactggaaacatatctggttttcctgccagccaatttgatcatagtgcatgggcatacaagggtgccatggtcaggaatatgccagatgacccgtcccagtcacaacatctcgttcaagaagatttagttgatgtatttgacattttggatgacctgaagaatgaccctgtacagcgtgatttgttgaaagaagtcgagaaacacgatgtaaagaatgtttctacatttggttctactgaaaggagcatccccctgtcccaaggtttcacgatgccccggttgtacctgatgacactgacattcagtacacacctcctcagccacgagcgacacgttctcaagctcaacctctgaaatcttcgctccgtaccaatgagactaggcagattaggaaaggccagaagaagctcaagaagtcgcctaagaaagtctcccaagatgttgagcttgatgacaatggtttccccatcatcgactttgctgctctagaccgttttgatcctcctccacatcttgccgtggatgttgagagttatggtggaccagctgcctcaggttgatatggtggactcgtgtcactattcagacctgaatggcgtcgcaaagtggctgcaaagcaggcagctttgaggatggtggcagaaattcttgagaagaggattgctcacccacagttgacatactttacatatgttgaaaagttccttcctgaggatgatccagaagatgtgattgctttggagtacaacctaattggcagtaagcagatttatgaagcatgtgcagatggcgaaatgagaagcaatgaccaagtgtactactacaccatctgcatagctaatgaagacaagctcttcaggaccgaagctgccgattacagaattttccttcctaccaatctgtcattcgcttgggtgatcacccaggccgtcgtcggtgcaagtcgccggagcaacgctgttaggcttgagcacgaacgcggcgtgaccgacaagctcggtgaggtggagcacgatgagcgagacgggacctcaacgcctccagtaggtcgatcagcggcgccgatgggcatgccgccggggagcgccagccctagcatcatgggcccgatcatgtacttgaacccgatctcgtccgtcaccagcgccgcgatgacgacgacaaaggaaccctccgacaacagtgaccccgtcggcgggcgcttgtacgcgatgtactga

SEQ ID NO: 3159 - DNA, 2654 bp, Zea Mays
gtctccccagccccgctgccgccgggttcatcagcagaagctgcttgctccgccgccgccctcttcctcctctactgcttaatcttagattttgcttcggggttcggctaaatttcgtcggatggatattgatgccagcgccagcgtcatgtgccagctgctgagccccgagggagaccctctaggctctacgctcacgaggaagacagaagaagcaaagcgacgtcctcctcccctgctgcacagagtgggctggggccacggttgcaggcgcgagaagaaagcagtgtccgtcagtagcagcggtggaggtgctccgcggtcctagttcagtagttctccccctccggcggtggcagcggtcgggtctgcgtcgcggcggcggaaagcagcccccctgagcccggagccgtccttctgaagctcggcggcggcgagatctgagttcggtcgcgcggagaggaggtttcgctgtgccggcgtggtgctcccggagccgcgcgtggaggcggcgcctttgcgcattgccgttccgtccatcccgtccctgcaagctctaaggcttccgaagaattgaaaccgggttcttgggggcgcgacatgcggttgcgttctgacgctacgtgagcgcgacatgcggggagggcgagccccacaaggcaaggctgacgatgcatgcagggagggcggggcgacactgggcatgcgcggaggcaactttcgtaggggaggcgggggcacgaggatggtctacacatagtcttaatagttagtagagatctctttttgttgctcacgtttctggaggctattcattttccttcgttcaccaccatacccaacctcttcttctcgatccttctacctctctcacattcggtgctcaggatgccagccctagggctcgccaacttcatctccctgctccagccgctccctccagactgctcaaccgcttgctggattgcgcaaaggtgtcaaaagagctgctgataaatacaagatgtcagctcaaaaggctaatgtctcaccagcccctaagcagtcctgtcccgcgcagcattcagcacctccttctccagttcaagttttagcttcagcagcaccagcgtcagcaacagcatcatcagcagcagtgcagcaccagcttctccagttcctgcacacacagcatcagattctccagaagcaccagtttctgtttgtccttctgttttttctctcccagcaccagcttgtactgctgtagttccagcaccaccacattctcctcctgctcctgttacctcagcaccagcttctcccctgcaccttctgcagcagctccagatactaaagatgaaccattgcaagataaaacagttgaagaaagtacagatgttgtgactggaaacatatctggttttcctgccagccaatttgatcatagtgcatgggcatacaagggtgccatggtcaggaatatgccagatgacccgtcccagtcacaacatctcgttcaagaagatttagttgatgtatttgacattttggatgacctgaagaatgaccctgtacagcgtgatttgttgaaagaagtcgagaaacacgatgtaaagaatgtttctacatttggttctactgaaaggagcatccccctgtcccaaggtttcacgatgccccggtacgttgtacctgatgacactgacattcagtacacacctcctcagccacgagcgacacgttctcaagctcaacctctgaaatcttcgctccgtaccaatgagactaggcagattaggaaaggccagaagaagctcaagaagtcgcctaagaaagtctcccaagatgttgagcttgatgacaatggtttccccatcatcgactttgctgctctagaccgttttgatcctcctccacatcttgccgtggatgttgagagttatggtggaccagctgcctcagtggctgcaaagcaggcagctttgaggatggtggcagaaattcttgagaagaggattgctcacccacagttgacatactttacatatgttgaaaagttccttcctgaggatgatccagaagatgtgattgctttggagtacaacctaattggcagtaagcagatttatgaagcatgtgcagatggcgaaatgagaagcaatgaccaagtgtactactacaccatctgcatagctaatgaagacaagctcttcaggaccgaagctgccgattacagaattttccttcctaccaatctgtcacagttctcaatttctcaaactgaaagatcaacaatcgaacctactaccaaaacctcactgtatccggagcaatgatacattcgatttctgaagaagatgcaccttgatgctattgtcagaagtcatgctctcgtattcctctacgcatcaacatctggatacaccaactcctgaccctgagcaacaatggaacaaggaaaacatagggacacagttaggacttaggacataggtgctaggccacatgcattgtgttgcaacggctgcaacagctcaaaataagcaattcagtacaggatcaacaaattggttgacaagttataaacagttaaacttctgggcagtgaatcagtgtattggcataatttttttttgaaaaaataaataaataattacattataaggagacaa

SEQ ID NO: 3160 - DNA, 1690 bp, Zea Mays
ctccttctctctttatcgctggattcggcgctgaaaattcgatggagggaaacgccttggctctcgggatgcccgcggatgctacttgtgcgtgcatgcgttgcaactctggcaccgattccgttccttccttgcggcggcggcggaaaaacaggagcttctccatccttcccttcgttcgtgctcttcttcttgttattccgtttatcggtctggcgcagaaagaaacaagagatgagatctagtctgctaccggagtccccgtacgtacccagtgctccgcggcttcggcaggggtgctgctggctgcagacgctgatctgtatccaccggccaccgccgttcgtgtttctccatgtaaacggtggaggattttgtgtctgttggctgctgcttccaatgcgctccacgagagacgagaccctctctgccagttcccttgtgtttcaaaacatagctcgagttcaaattgcttatttagtttcttttttctcttcttacttattgacaacttgttcacagggttcatcagcagaagctgcttgctccgccgccgccctcttcctcctctactgttgcaagataaaacagttgaagaaagtacagatgttgtgactggaaacatatctggttttcctgccagccaatttgatcatagtgcatgggcatacaagggtgccatggtcaggaatatgccagatgacccgtcccagtcacaacatctcgttcaagaagatttagttgatgtatttgacattttggatgacctgaagaatgaccctgtacagcgtgatttgttgaaagaagtcgagaaacacgatgtaaagaatgtttctacatttggttctactgaaaggagcatccccctgtcccaaggtttcacgatgccccggtacgttgtacctgatgacactgacattcagtacacacctcctcagccacgagcgacacgttctcaagctcaacctctgaaatcttcgctccgtaccaatgagactaggcagattaggaaaggccagaagaagctcaagaagtcgcctaagaaagtctcccaagatgttgagcttgatgacaatggtttccccatcatcgactttgctgctctagaccgttttgatcctcctccacatcttgccgtggatgttgagagttatggtggaccagctgcctcagtggctgcaaagcaggcagctttgaggatggtggcagaaattcttgagaagaggattgctcacccacagttgacatactttacatatgttgaaaagttccttcctgaggatgatccagaagatgtgattgctttggagtacaacctaattggcagtaagcagatttatgaagcatgtgcagatggcgaaatgagaagcaatgaccaagtgtactactacaccatctgcatagctaatgaagacaagctcttcaggaccgaagctgccgattacagaattttccttcctaccaatctgtcaggagcagaggagcagttgagtccgcgtggagatcgacatcaaatggaggcattcgtcgtctgcccctttagcacccaacgtttctattttgattctcggtgtcaaccacacacactggccgtattttatattccatccaggtttgtggctgttttcagttacacagtccatccacaagtaattttgctcaaacggttgactgattgccaacaattaag

SEQ ID NO: 3161 - DNA, 2002 bp, Zea Mays
ctccttctctctttatcgctggattcggcgctgaaaattcgatggagggaaacgccttggctctcgggatgcccgcggatgctacttgtgcgtgcatgcgttgcaactctggcaccgattccgttccttccttgcggcggcggcggaaaaacaggagcttctccatccttcccttcgttcgtgctcttcttcttgttattccgtttatcggtctggcgcagaaagaaacaagagatgagatctagtctgctaccggagtccccgtacgtacccagtgctccgcggcttcggcaggggtgctgctggctgcagacgctgatctgtatccaccggccaccgccgttcgtgtttctccatgtaaacggtggaggattttgtgtctgttggctgctgcttccaatgcgctccacgagagacgagaccctctctgccagttcccttgtgtttcaaaacatagctcgagttcaaattgcttatttagtttcttttttctcttcttacttattgacaacttgttcacagggttcatcagcagaagctgcttgctccgccgccgccctcttcctcctctactgcaccagcttgtactgctgtagttccagcaccaccacattctcctcctgctcctgttacctcagcaccagcttctcccctgcaccttctgcagcagctccagatactaaagatgaaccattgcaagataaaacagttgaagaaagtacagatgttgtgactggaaacatatctggttttcctgccagccaatttgatcatagtgcatgggcatacaagggtgccatggtcaggaatatgccagatgacccgtcccagtcacaacatctcgttcaagaagatttagttgatgtatttgacattttggatgacctgaagaatgaccctgtacagcgtgatttgttgaaagaagtcgagaaacacgatgtaaagaatgtttctacatttggttctactgaaaggagcatccccctgtcccaaggtttcacgatgccccggttgtacctgatgacactgacattcagtacacacctcctcagccacgagcgacacgttctcaagctcaacctctgaaatcttcgctccgtaccaatgagactaggcagattaggaaaggccagaagaagctcaagaagtcgcctaagaaagtctcccaagatgttgagcttgatgacaatggtttccccatcatcgactttgctgctctagaccgttttgatcctcctccacatcttgccgtggatgttgagagttatggtggaccagctgcctcaggttgatatggtggactcgtgtcactattcagacctgaatggcgtcgcaaagtggctgcaaagcaggcagctttgaggatggtggcagaaattcttgagaagaggattgctcacccacagttgacatactttacatatgttgaaaagttccttcctgaggatgatccagaagatgtgattgctttggagtacaacctaattggcagtaagcagatttatgaagcatgtgcagatggcgaaatgagaagcaatgaccaagtgtactactacaccatctgcatagctaatgaagacaagctcttcaggaccgaagctgccgattacagaattttccttcctaccaatctgtcaatttttaaaagcgaggaagttcgattttgaaaaagcagcacagatgtgggcgaacatgctgcagtggagaaaggagttcggtacagacacaatttttgaagattttgaatttcatgaactagaggaggtcctgcaatattatcctcatggttaccatggggttgacaaggaaggaaggcctgtctacattgagttgcttgggaaagttgaacccaacaagcttatacaaatcacaacagttgagcgctatattaagtatcatgtacatgagtttgagagagctttccgggagcaattccccgcatgctcaatttctgccaaaagacatagatactacaacgacgatattggatgtccacggtgtg

SEQ ID NO: 3162 - DNA, 1794 bp, Zea Mays
ctttatcgctggattcggcgctgaaaattcgatggagggaaacgccttggctctcgggatgcccgcggatgctacttgtgcgtgcatgcgttgcaactctggcaccgattccgttccttccttgcggcggcggcggaaaaacaggagcttctccatccttcccttcgttcgtgctcttcttcttgttattccgtttatcggtctggcgcagaaagaaacaagagatgagatctagtctgctaccggagtccccgtacgtacccagtgctccgcggcttcggcaggggtgctgctggctgcagacgctgatctgtatccaccggccaccgccgttcgtgtttctccatgtaaacggtggaggattttgtgtctgttggctgctgcttccaatgcgctccacgagagacgagaccctctctgccagttcccttgtgtttcaaaacatagctcgagttcaaattgcttatttagtttcttttttctcttcttacttattgacaacttgttcacagggttcatcagcagaagctgcttgctccgccgccgccctcttcctcctctactgcaccagcttgtactgctgtagttccagcaccaccacattctcctcctgctcctgttacctcagcaccagcttctcccctgcaccttctgcagcagctccagatactaaagatgaaccattgcaagataaaacagttgaagaaagtacagatgttgtgactggaaacatatctggttttcctgccagccaatttgatcatagtgcatgggcatacaagggtgccatggtcaggaatatgccagatgacccgtcccagtcacaacatctcgttcaagaagatttagttgatgtatttgacattttggatgacctgaagaatgaccctgtacagcgtgatttgttgaaagaagtcgagaaacacgatgtaaagaatgtttctacatttggttctactgaaaggagcatccccctgtcccaaggtttcacgatgccccggttgtacctgatgacactgacattcagtacacacctcctcagccacgagcgacacgttctcaagctcaacctctgaaatcttcgctccgtaccaatgagactaggcagattaggaaaggccagaagaagctcaagaagtcgcctaagaaagtctcccaagatgttgagcttgatgacaatggtttccccatcatcgactttgctgctctagaccgttttgatcctcctccacatcttgccgtggatgttgagagttatggtggaccagctgcctcagtggctgcaaagcaggcagctttgaggatggtggcagaaattcttgagaagaggattgctcacccacagttgacatactttacatatgttgaaaagttccttcctgaggatgatccagaagatgtgattgctttggagtacaacctaattggcagtaagcagatttatgaagcatgtgcagatggcgaaatgagaagcaatgaccaagtgtactactacaccatctgcatagctaatgaagacaagctcttcaggaccgaagctgccgattacagaattttccttcctaccaatctgtcaggagcagaggagcagttgagtccgcgtggagatcgacatcaaatggaggcattcgtcgtctgcccctttagcacccaacgtttctattttgattctcggtgtcaaccacacacactggccgtattttatattccatccaggtttgtggctgttttcagttacacagtccatccacaagtaattttgctcaaacggttgactgattgccaacaattaag

SEQ ID NO: 3163 - DNA, 1643 bp, Zea Mays
ggaaaaacaggagcttctccatccttcccttcgttcgtgctcttcttcttgttattccgtttatcggtctggcgcagaaagaaacaagagatgagatctagtctgctaccggagtccccgtacgtacccagtgctccgcggcttcggcaggggtgctgctggctgcagacgctgatctgtatccaccggccaccgccgttcgtgtttctccatgtaaacggtggaggattttgtgtctgttggctgctgcttccaatgcgctccacgagagacgagaccctctctgccagttcccttgtgtttcaaaacatagctcgagttcaaattgcttatttagtttcttttttctcttcttacttattgacaacttgttcacagggttcatcagcagaagctgcttgctccgccgccgccctcttcctcctctactgttgcaagataaaacagttgaagaaagtacagatgttgtgactggaaacatatctggttttcctgccagccaatttgatcatagtgcatgggcatacaagggtgccatggtcaggaatatgccagatgacccgtcccagtcacaacatctcgttcaagaagatttagttgatgtatttgacattttggatgacctgaagaatgaccctgtacagcgtgatttgttgaaagaagtcgagaaacacgatgtaaagaatgtttctacatttggttctactgaaaggagcatccccctgtcccaaggtttcacgatgccccggtacgttgtacctgatgacactgacattcagtacacacctcctcagccacgagcgacacgttctcaagctcaacctctgaaatcttcgctccgtaccaatgagactaggcagattaggaaaggccagaagaagctcaagaagtcgcctaagaaagtctcccaagatgttgagcttgatgacaatggtttccccatcatcgactttgctgctctagaccgttttgatcctcctccacatcttgccgtggatgttgagagttatggtggaccagctgcctcagtggctgcaaagcaggcagctttgaggatggtggcagaaattcttgagaagaggattgctcacccacagttgacatactttacatatgttgaaaagttccttcctgaggatgatccagaagatgtgattgctttggagtacaacctaattggcagtaagcagatttatgaagcatgtgcagatggcgaaatgagaagcaatgaccaagtgtactactacaccatctgcatagctaatgaagacaagctcttcaggaccgaagctgccgattacagaattttccttcctaccaatctgtcattcgcttgggtgatcacccaggccgtcgtcggtgcaagtcgccggagcaacgctgttaggcttgagcacgaacgcggcgtgaccgacaagctcggtgaggtggagcacgatgagcgagacgggacctcaacgcctccagtaggtcgatcagcggcgccgatgggcatgccgccggggagcgccagccctagcatcatgggcccgatcatgtacttgaacccgatctcgtccgtcaccagcgccgcgatgacgacgacaaaggaaccctccgacaacagtgaccccgtcggcgggcgcttgtacgcgatgtactga

SEQ ID NO: 3164 - DNA, 1823 bp, Zea Mays
ctttttgttgctcacgtttctggaggctattcattttccttcgttcaccaccatacccaacctcttcttctcgatccttctacctctctcacattcggtgctcaggatgccagccctagggctcgccaacttcatctccctgctccagccgctccctccagactgctcaaccgcttgctggattgcgcaaaggtgtcaaaagagctgctgataaatacaagatgtcagctcaaaaggctaatgtctcaccagcccctaagcagtcctgtcccgcgcagcattcagcacctccttctccagttcaagttttagcttcagcagcaccagcgtcagcaacagcatcatcagcagcagtgcagcaccagcttctccagttcctgcacacacagcatcagattctccagaagcaccagtttctgtttgtccttctgttttttctctcccagcaccagcttgtactgctgtagttccagcaccaccacattctcctcctgctcctgttacctcagcaccagcttctcccctgcaccttctgcagcagctccagatactaaagatgaaccattgcaagataaaacagttgaagaaagtacagatgttgtgactggaaacatatctggttttcctgccagccaatttgatcatagtgcatgggcatacaagggtgccatggtcaggaatatgccagatgacccgtcccagtcacaacatctcgttcaagaagatttagttgatgtatttgacattttggatgacctgaagaatgaccctgtacagcgtgatttgttgaaagaagtcgagaaacacgatgtaaagaatgtttctacatttggttctactgaaaggagcatccccctgtcccaaggtttcacgatgccccggttgtacctgatgacactgacattcagtacacacctcctcagccacgagcgacacgttctcaagctcaacctctgaaatcttcgctccgtaccaatgagactaggcagattaggaaaggccagaagaagctcaagaagtcgcctaagaaagtctcccaagatgttgagcttgatgacaatggtttccccatcatcgactttgctgctctagaccgttttgatcctcctccacatcttgccgtggatgttgagagttatggtggaccagctgcctcaggttgatatggtggactcgtgtcactattcagacctgaatggcgtcgcaaagtggctgcaaagcaggcagctttgaggatggtggcagaaattcttgagaagaggattgctcacccacagttgacatactttacatatgttgaaaagttccttcctgaggatgatccagaagatgtgattgctttggagtacaacctaattggcagtaagcagatttatgaagcatgtgcagatggcgaaatgagaagcaatgaccaagtgtactactacaccatctgcatagctaatgaagacaagctcttcaggaccgaagctgccgattacagaattttccttcctaccaatctgtcattcgcttgggtgatcacccaggccgtcgtcggtgcaagtcgccggagcaacgctgttaggcttgagcacgaacgcggcgtgaccgacaagctcggtgaggtggagcacgatgagcgagacgggacctcaacgcctccagtaggtcgatcagcggcgccgatgggcatgccgccggggagcgccagccctagcatcatgggcccgatcatgtacttgaacccgatctcgtccgtcaccagcgccgcgatgacgacgacaaaggaaccctccgacaacagtgaccccgtcggcgggcgcttgtacgcgatgtactga

SEQ ID NO: 3165 - DNA, 1720 bp, Zea Mays
ctcacgtttctggaggctattcattttccttcgttcaccaccatacccaacctcttcttctcgatccttctacctctctcacattcggtgctcaggatgccagccctagggctcgccaacttcatctccctgctccagccgctccctccagactgctcaaccgcttgctggattgcgcaaaggtgtcaaaagagctgctgataaatacaagatgtcagctcaaaaggctaatgtctcaccagcccctaagcagtcctgtcccgcgcagcattcagcacctccttctccagttcaagttttagcttcagcagcaccagcgtcagcaacagcatcatcagcagcagtgcagcaccagcttctccagttcctgcacacacagcatcagattctccagaagcaccagtttctgtttgtccttctgttttttctctcccagcaccagcttgtactgctgtagttccagcaccaccacattctcctcctgctcctgttacctcagcaccagcttctcccctgcaccttctgcagcagctccagatactaaagatgaaccattgcaagataaaacagttgaagaaagtacagatgttgtgactggaaacatatctggttttcctgccagccaatttgatcatagtgcatgggcatacaagggtgccatggtcaggaatatgccagatgacccgtcccagtcacaacatctcgttcaagaagatttagttgatgtatttgacattttggatgacctgaagaatgaccctgtacagcgtgatttgttgaaagaagtcgagaaacacgatgtaaagaatgtttctacatttggttctactgaaaggagcatccccctgtcccaaggtttcacgatgccccggtacgttgtacctgatgacactgacattcagtacacacctcctcagccacgagcgacacgttctcaagctcaacctctgaaatcttcgctccgtaccaatgagactaggcagattaggaaaggccagaagaagctcaagaagtcgcctaagaaagtctcccaagatgttgagcttgatgacaatggtttccccatcatcgactttgctgctctagaccgttttgatcctcctccacatcttgccgtggatgttgagagttatggtggaccagctgcctcaggttgatatggtggactcgtgtcactattcagacctgaatggcgtcgcaaagtggctgcaaagcaggcagctttgaggatggtggcagaaattcttgagaagaggattgctcacccacagttgacatactttacatatgttgaaaagttccttcctgaggatgatccagaagatgtgattgctttggagtacaacctaattggcagtaagcagatttatgaagcatgtgcagatggcgaaatgagaagcaatgaccaagtgtactactacaccatctgcatagctaatgaagacaagctcttcaggaccgaagctgccgattacagaattttccttcctaccaatctgtcaggagcagaggagcagttgagtccgcgtggagatcgacatcaaatggaggcattcgtcgtctgcccctttagcacccaacgtttctattttgattctcggtgtcaaccacacacactggccgtattttatattccatccaggtttgtggctgttttcagttacacagtccatccacaagtaattttgctcaaacggttgactgattgccaacaattaag

SEQ ID NO: 3166 - DNA, 1665 bp, Zea Mays
ctcacgtttctggaggctattcattttccttcgttcaccaccatacccaacctcttcttctcgatccttctacctctctcacattcggtgctcaggatgccagccctagggctcgccaacttcatctccctgctccagccgctccctccagactgctcaaccgcttgctggattgcgcaaaggtgtcaaaagagctgctgataaatacaagatgtcagctcaaaaggctaatgtctcaccagcccctaagcagtcctgtcccgcgcagcattcagcacctccttctccagttcaagttttagcttcagcagcaccagcgtcagcaacagcatcatcagcagcagtgcagcaccagcttctccagttcctgcacacacagcatcagattctccagaagcaccagtttctgtttgtccttctgttttttctctcccagcaccagcttgtactgctgtagttccagcaccaccacattctcctcctgctcctgttacctcagcaccagcttctcccctgcaccttctgcagcagctccagatactaaagatgaaccattgcaagataaaacagttgaagaaagtacagatgttgtgactggaaacatatctggttttcctgccagccaatttgatcatagtgcatgggcatacaagggtgccatggtcaggaatatgccagatgacccgtcccagtcacaacatctcgttcaagaagatttagttgatgtatttgacattttggatgacctgaagaatgaccctgtacagcgtgatttgttgaaagaagtcgagaaacacgatgtaaagaatgtttctacatttggttctactgaaaggagcatccccctgtcccaaggtttcacgatgccccggttgtacctgatgacactgacattcagtacacacctcctcagccacgagcgacacgttctcaagctcaacctctgaaatcttcgctccgtaccaatgagactaggcagattaggaaaggccagaagaagctcaagaagtcgcctaagaaagtctcccaagatgttgagcttgatgacaatggtttccccatcatcgactttgctgctctagaccgttttgatcctcctccacatcttgccgtggatgttgagagttatggtggaccagctgcctcagtggctgcaaagcaggcagctttgaggatggtggcagaaattcttgagaagaggattgctcacccacagttgacatactttacatatgttgaaaagttccttcctgaggatgatccagaagatgtgattgctttggagtacaacctaattggcagtaagcagatttatgaagcatgtgcagatggcgaaatgagaagcaatgaccaagtgtactactacaccatctgcatagctaatgaagacaagctcttcaggaccgaagctgccgattacagaattttccttcctaccaatctgtcaggagcagaggagcagttgagtccgcgtggagatcgacatcaaatggaggcattcgtcgtctgcccctttagcacccaacgtttctattttgattctcggtgtcaaccacacacactggccgtattttatattccatccaggtttgtggctgttttcagttacacagtccatccacaagtaattttgctcaaacggttgactgattgccaacaattaag

SEQ ID NO: 3167 - DNA, 556 bp, Zea Mays
atcggctccgacggctcatcagcaacaaccggaggcgcctcacgctcgaactctaccgccgtggccccgttttgcagctcctcgctctcttctaagatacatggtattggggggatgttaatggcaactgcaatgaccacatggaggaggaggatcatgttcttgcacctactgatagtgaggtgaatgtcattagccaaaaagttgtttgtggaaaaaacaaatccatagatggagacaatcctgtggtgaaacgactactagcaaccaagtcaactagtacctctacaagcaagtttatggcatctatatttaaatcagcaaggtcaaacaagagcacagatttagtgtctcaacctcaagttcctaaagttgcacaagatgcaagtgcgagcgcaagtgaaaatgcaagcatatatagctgcaagtgtccaaataagcactgaggatgattgtgatgaagaattagatgtcaagaaaaagaaacttacttcatgggtttgggagtattttacaaggtatgatgtagaagtggaggaaaatgatggttccattg

SEQ ID NO: 3168 - DNA, 5104 bp, Zea Mays
cttctcttcctcctacccacccaccgccccactccaccttttccttccccgccggccgccgcgcagcgcgagcggagtcgccctctccagtagagtaggagtgacgtctctacctatccacctcagccccctcttttcattccccacccgcgccgcgcgagcggagtttcgcagcacgctgcggctcgcttcgccagaattcctggcgagggtacagaattccgcatcgaaacggaagggttccgctcaccgagaaaattggcctcaatcgcgcgtccgtcctcagcgtcgtgcgttcggatgccaaggagggaacaacaactggggtttcagcaaaggattggacaaacacaatattggcacttgtgtctcctaattccaaaccggaggacttcaaccgcccagctgggttacctccttttgcagttctttgtgaaattgttgatgatgatgatggctccatggctttgttaccaaaactgcaacaatttgcaaagagggagaacctgaagataatatcaattgcagacctgataagcgaggggggcaccgacacgaagccacgagatggtttggagagaaacagttgaagcatctcccgcggaggttcacactggtccctctccgcgccgaagcacaacgagactgctttctgctcttcaccacctgccagccatcctcctgaagaccccaggtgtacttggaaaaaaatgaatgattgtacttggagtcttggatgtgaaatttttttatgatagccttcttgacttcttgcattgtaattctaagctttgaacattcccatttgcagatataggagaaagagagtgttatggtcgttagatcggtgaggaattggagaggggtatcgatgggcaggaacaccagccgggggcctctgcccacgaccgagcaagaggagggtttctcccttctaattcttgcctgctttatttttcatccattgattacataaataggccggctgaccgcccctatctagctagagatccttatctccttaaaactctcctaaaaactctcaacaaactactaactgataacctatctagataatctcaactaatcttctaaataatctcaactaatcttctaatcttatctctaactatccttatctaatcccccttggagggcccatggctgctgctgccgcagcccctccgtggacctccttaggccctgacactacacccctcctggacaagcagctcgtcctcgagctacagcatgacgatgctcaaagaccgagtctacttgactcaaaaccagaaacctagaagacaaaccttttacatctcggcttatcttattattccgaatatgttttttttgaccccataagataaggcggacaccctccgcgcattggacttgcacgtgtgcagccacctggatcccatggactccatctagacgaaaggggagcacatggacgggcacctggaataggtcgcaacaataaccagcggaggcgctctcgtggcggccggtagcggaatgtggtggcgccaaatagtgcgcccttgtcgatgacgaggggagtgccttccctaccgccgctgccgtagagttgaagttcgtcgcccgcgggacacgtaccatgctcgcacttggtgacttggagatagcggcccggtgacgctgctgatggccgtccgacagggcgaggtcgcgcccccgtgtgccgaggtcaaccgtcaccaaggctgcctcgagcatccgctggcgcatctcccgcactctctgtcgtgcaaggaagccacgagcaacaacttgtatgcccacagccgccgacgtctggagacgtgcggacaacgccaactggtggtgcccatgttgcactgctgccttgatttgcagcagcccttgcttaaccttctggagcgtggcttgcatctttgcgagatcagcccttatgttggtccacaagtcgcccgtcgatggagctggtgattgctgagtcgtggctgcccctagtggcgttgcccatggggacggacacgccgtcaacgaagatgatgtgacgaaatttggcgttgttcctggggatgggcgcgccaacgtccaggacgtggtgacaaaattggcaggtgatggtgcccatggagatagggacgccggttgccaagatggtgtgacgaaggtggcatgtggcgcaacccatagagatggcgacgtcggttgccaggacggcgtgatgaaggtgacatgcggcgcagtccatggagatggggacgccggttgccaggatgacaccacgaaattggcagcagaagccataggatcagatcgaaacccaaggtagccaataccagatgttatggtcgttagatcgatgagggattggagaggggtatcgatgggcaggaacaccggccgggggcctctgcccacagtaaattttatgttcagcagaaggatggctacatttaatgttatgttcattagagtgatggctactacttcaaacatcaggtccaaaaagtttgaatgtgcatgggcagcttatgaactttgaaaaacaaggacctccttgcatgatgtaggaatgtaaagtcacatgctttgggctgaagggtgtaaaaatgttgctcccaaatgaaccacaatatgacgagacattttgccagctacatccactacactggatgagtaaaagatctgattttctttatcttgaggtggtatcccggatatgatctgcttgcagacaaccaaaaaggcaaaaacatctcctttgttttcgaatttagtctagtgattgtctaaatgataaacatgtttcccccagcaatatgtttggaattttagaatggttcttttcactcatgcagggtgatgttggggatggacaagagatcttagtacgagtgcattcggagtgcctaactggggacatatttggatcagcgagatgcgattatgggaattaacttgctctggcaatgaccatgattgagaaaactggccggggtgtagtagtctatcttcgtggccatgagggtaggggtattgggctgggtcacaagcttcaagcatacaacttacaagatgatgggcgcgatactgtcgaggcaaacttggagctagggctgcctgctgactcgcgggagtacggtataggtgcacagatattacgccatcttggtgccaggaccatgcggctgatgactaacaaccctgccaagtacactggactcaagggctatggtttaagtgtccttggtagagtgccattgctaacaccgataaccaccgagaataggcgctatatggaaacaaagcgattgaagatggggcatgtttatggaagccgctccagtaatcatgcaaacggcagtggcttggctggtgctggcgagagagaggagcaggatcagaatgacagtgctggcgtgcaagagcgaactccagaagcttgagtgcctaactctgcgttccttagagctgctccaatgggagtcttaaaaagagatgcatcttaaaatatagggctccatggcaaaaaaatcactccaacggggacctcattttacaaaaactcaggaaacaaatttgggctccggtctcattggtcccaaatgtaggacttgaaactatcggccctattctcgttcccacgcccccacgaccttcggtcttttcctgttgcattcgttctcaagccgtctctcccacaaaccaaaccctctgcctgtcgagaagcattggcgagatggatggacggccaccgccttttcctcgttcacggccaacaggttggcctcgttgaacttccatggagatggcactagatgtgatagggagatcatcagctgtgtcttctccgccagatttgcgcaggcctcctgtggccgtggctgcagagcgaaggcctgcaagtatgtctgcaacttcccaacagacacaaggacaagcgtcttggcatcgaatcgctgcagaccatgccgatcggagtttatcagtggcaccgatgatgtatcaagatccattgtcaatgattgatgactatagagtctgctcatatttttacactactctattgaaccaagaacctgaagatgtatttgcctgccaagaaaatatggagagcgaaaatgaggtcatggagtcaccaccattgaatgattcaaattcacagtcaaaaccaaagggtcgatccaagaattttaatgaagctgaagacattttgttgatgtcagcttatcttaacatacgtaaagatgcaattactggaagggatcaataagaaggcaacttttgggaaagagttgagaagtactttaacgttaacaggacatttgagtcagatcgtaactggtcatcgttgaagcatcggtggggtataattcacaaataagttagtagtttccaaggtttccatgacagtatcgaaaggaaaaatgaaagtgggaagacaagtgatgataagctggctgaagcaaatgtaatgttccatcaatttaaaaataaggccttttctttgttccatgcgtggaacattctcagacatgagccaaagtgggctgaagataaaacatctaatgaagggaatgcaaatggggacagtcatcccaatgctcaaagacctgcaggaaggaaagctgaaaaggaaaagatgaaagcaaaaaggcgcaacagtgatgaagagtctgatcctttcattgaagaggtaaaaaaatttgagagaatcgagagagaaaactgagagcgaacgaaaggagcgtgatgaaagatactttgagctgcataagaaaaaagtagacttggagcaagaccagcatgacaagttgataatggcacttgagtcttgacacgagcacaatggatgaccaaggaaaacagtattttcagttgatgaaagaagatattttagctcgacgctttgggagtaggcagccatagttatttagtttttaatactttagacttttttccattcaaaacagattatcttgatgttcatgtaatgtaagaacatattttcattcaaagcagattatcttgatgtttgcaacaatctgtgttgacattgttttctggttactgtaaaagttgagttgaaattttgcttctgaaa

SEQ ID NO: 3169 - DNA, 5551 bp, Zea Mays
cttctcttcctcctacccacccaccgccccactccaccttttccttccccgccggccgccgcgcagcgcgagcggagtcgccctctccagtagagtaggagtgacgtctctacctatccacctcagccccctcttttcattccccacccgcgccgcgcgagcggagtttcgcagcacgctgcggctcgcttcgccagaattcctggcgagggtacagaattccgcatcgaaacggaagggttccgctcaccgagaaaattggcctcaatcgcgcgtccgtcctcagcgtcgtgcgttcggatgccaaggagggaacaacaactggggtttcagcaaaggattggacaaacacaatattggcacttgtgtctcctaattccaaaccggaggacttcaaccgcccagttctttgtgaaattgttgatgatgatgatggctccatggctttgttaccaaaactgcaacaatttgcaaagagggagaacctgaagataatatcaattgcagacctgataagcgaggggggcaccgacacgaagccacgagatggtttggagagaaacagttgaagcatctcccgcggaggttcacactggtccctctccgcgccgaagcacaacgagactgctttctgctcttcaccacctgccagccatcctcctgaagaccccaggtgtacttggaaaaaaatgaatgattgtacttggagtcttggatgtgaaatttttttatgatagccttcttgacttcttgcattgtaattctaagctttgaacattcccatttgcagatataggagaaagagagtgttatggtcgttagatcggtgaggaattggagaggggtatcgatgggcaggaacaccagccgggggcctctgcccacgaccgagcaagaggagggtttctcccttctaattcttgcctgctttatttttcatccattgattacataaataggccggctgaccgcccctatctagctagagatccttatctccttaaaactctcctaaaaactctcaacaaactactaactgataacctatctagataatctcaactaatcttctaaataatctcaactaatcttctaatcttatctctaactatccttatctaatcccccttggagggcccatggctgctgctgccgcagcccctccgtggacctccttaggccctgacactacacccctcctggacaagcagctcgtcctcgagctacagcatgacgatgctcaaagaccgagtctacttgactcaaaaccagaaacctagaagacaaaccttttacatctcggcttatcttattattccgaatatgttttttttgaccccataagataaggcggacaccctccgcgcattggacttgcacgtgtgcagccacctggatcccatggactccatctagacgaaaggggagcacatggacgggcacctggaataggtcgcaacaataaccagcggaggcgctctcgtggcggccggtagcggaatgtggtggcgccaaatagtgcgcccttgtcgatgacgaggggagtgccttccctaccgccgctgccgtagagttgaagttcgtcgcccgcgggacacgtaccatgctcgcacttggtgacttggagatagcggcccggtgacgctgctgatggccgtccgacagggcgaggtcgcgcccccgtgtgccgaggtcaaccgtcaccaaggctgcctcgagcatccgctggcgcatctcccgcactctctgtcgtgcaaggaagccacgagcaacaacttgtatgcccacagccgccgacgtctggagacgtgcggacaacgccaactggtggtgcccatgttgcactgctgccttgatttgcagcagcccttgcttaaccttctggagcgtggcttgcatctttgcgagatcagcccttatgttggtccacaagtcgcccgtcgatggagctggtgattgctgagtcgtggctgcccctagtggcgttgcccatggggacggacacgccgtcaacgaagatgatgtgacgaaatttggcgttgttcctggggatgggcgcgccaacgtccaggacgtggtgacaaaattggcaggtgatggtgcccatggagatagggacgccggttgccaagatggtgtgacgaaggtggcatgtggcgcaacccatagagatggcgacgtcggttgccaggacggcgtgatgaaggtgacatgcggcgcagtccatggagatggggacgccggttgccaggatgacaccacgaaattggcagcagaagccataggatcagatcgaaacccaaggtagccaataccagatgttatggtcgttagatcgatgagggattggagaggggtatcgatgggcaggaacaccggccgggggcctctgcccacagtaaattttatgttcagcagaaggatggctacatttaatgttatgttcattagagtgatggctactacttcaaacatcaggtccaaaaagtttgaatgtgcatgggcagcttatgaactttgaaaaacaaggacctccttgcatgatgtaggaatgtaaagtcacatgctttgggctgaagggtgtaaaaatgttgctcccaaatgaaccacaatatgacgagacattttgccagctacatccactacactggatgagtaaaagatctgattttctttatcttgaggtggtatcccggatatgatctgcttgcagacaaccaaaaaggcaaaaacatctcctttgttttcgaatttagtctagtgattgtctaaatgataaacatgtttcccccagcaatatgtttggaattttagaatggttcttttcactcatgcagggtgatgttggggatggacaagagatcttagtacgagtgcattcggagtgcctaactggggacatatttggatcagcgagatgcgattatgggaattaacttgctctggcaatgaccatgattgagaaaactggccggggtgtagtagtctatcttcgtggccatgagggtaggggtattgggctgggtcacaagcttcaagcatacaacttacaagatgatgggcgcgatactgtcgaggcaaacttggagctagggctgcctgctgactcgcgggagtacggtataggtgcacagatattacgccatcttggtgccaggaccatgcggctgatgactaacaaccctgccaagtacactggactcaagggctatggtttaagtgtccttggtagagtgccattgctaacaccgataaccaccgagaataggcgctatatggaaacaaagcgattgaagatggggcatgtttatggaagccgctccagtaatcatgcaaacggcagtggcttggctggtgctggcgagagagaggagcaggatcagaatgacagtgctggcgtgcaagagcgaactccagaagcttgagtgcctaactctgcgttccttagagctgctccaatgggagtcttaaaaagagatgcatcttaaaatatagggctccatggcaaaaaaatcactccaacggggacctcattttacaaaaactcaggaaacaaatttgggctccggtctcattggtcccaaatgtaggacttgaaactatcggccctattctcgttcccacgcccccacgaccttcggtcttttcctgttgcattcgttctcaagccgtctctcccacaaaccaaaccctctgcctgtcgagaagcattggcgagatggatggacggccaccgccttttcctcgttcacggccaacaggttggcctcgttgaacttccatggagatggcactagatgtgatagggagatcatcagctgtgtcttctccgccagatttgcgcaggcctcctgtggccgtggctgcagagcgaaggcctgcaagtatgtctgcaacttcccaacagacacaaggacaagcgtcttggcatcgaatcgctgcagaccatgccgatcggagtttatcagtggcaccgatgatgtatcaagatccattgtcaatgattgatgactataggtaataacctttctgttgagattagtagtcgattatatttgctcatgaattcaatcgatggtgatctgggatctccatggttgagaaattgaagtcaaggcctggtgaggttacttgtactggtaggtgctgatagatgtagtgctcaccgatgcttgtgaattgaattattggttctgaaaatatcctcacttcaaccatgcatacgagattatgagtaaatgtgaattccatacactctgttgccccagtccaatacaaccttgctgaaccttgcatatttgtgtgagcaggtacatttttgggagtctctttaatgtttttcttgtttggtctcataattagtggagtacttcaacttatgtgcattattatatcaatttgattaccaaactttattgtgtatagcgtcaaagctgttttgaatgtcttgtgtttgtgtatatttcattctaattccataaccagagtctgctcatatttttacactactctattgaaccaagaacctgaagatgtatttgcctgccaagaaaatatggagagcgaaaatgaggtcatggagtcaccaccattgaatgattcaaattcacagtcaaaaccaaagggtcgatccaagaattttaatgaagctgaagacattttgttgatgtcagcttatcttaacatacgtaaagatgcaattactggaagggatcaataagaaggcaacttttgggaaagagttgagaagtactttaacgttaacaggacatttgagtcagatcgtaactggtcatcgttgaagcatcggtggggtataattcacaaataagttagtagtttccaaggtttccatgacagtatcgaaaggaaaaatgaaagtgggaagacaagtgatgataagctggctgaagcaaatgtaatgttccatcaatttaaaaataaggccttttctttgttccatgcgtggaacattctcagacatgagccaaagtgggctgaagataaaacatctaatgaagggaatgcaaatggggacagtcatcccaatgctcaaagacctgcaggaaggaaagctgaaaaggaaaagatgaaagcaaaaaggcgcaacagtgatgaagagtctgatcctttcattgaagaggtaaaaaaatttgagagaatcgagagagaaaactgagagcgaacgaaaggagcgtgatgaaagatactttgagctgcataagaaaaaagtagacttggagcaagaccagcatgacaagttgataatggcacttgagtcttgacacgagcacaatggatgaccaaggaaaacagtattttcagttgatgaaagaagatattttagctcgacgctttgggagtaggcagccatagttatttagtttttaatactttagacttttttccattcaaaacagattatcttgatgttcatgtaatgtaagaacatattttcattcaaagcagattatcttgatgtttgcaacaatctgtgttgacattgttttctggttactgtaaaagttgagttgaaattttgcttctgaaa

SEQ ID NO: 3170 - DNA, 3181 bp, Zea Mays
cttctcttcctcctacccacccaccgccccactccaccttttccttccccgccggccgccgcgcagcgcgagcggagtcgccctctccagtagagtaggagtgacgtctctacctatccacctcagccccctcttttcattccccacccgcgccgcgcgagcggagtttcgcagcacgctgcggctcgcttcgccagaattcctggcgagggtacagaattccgcatcgaaacggaagggttccgctcaccgagaaaattggcctcaatcgcgcgtccgtcctcagcgtcgatgccaaggagggaacaacaactggggtttcagcaaaggattggacaaacacaatattggcacttgtgtctcctaattccaaaccggaggacttcaaccgcccagctgggttacctccttttgcagttctttgtgaaattgttgatgatgatgatggctccatggctttgttaccaaaactgcaacaatttgcaaagagggagaacctgaagataatatcaattgcagacctgataagcgaggggggcaccgacacgaagccacgagatggtttggagagaaacagttgaagcatctcccgcggaggttcacactggtccctctccgcgccgaagcacaacgagactgctttctgctcttcaccacctgccagccatcctcctgaagaccccaggaatgtaaagtcacatgctttgggctgaagggtgtaaaaatgttgctcccaaatgaaccacaatatgacgagacattttgccagctacatccactacactggatgagtaaaagatctgattttctttatcttgaggtggtatcccggatatgatctgcttgcagacaaccaaaaaggcaaaaacatctcctttgttttcgaatttagtctagtgattgtctaaatgataaacatgtttcccccagcaatatgtttggaattttagaatggttcttttcactcatgcagggtgatgttggggatggacaagagatcttagtacgagtgcattcggagtgcctaactggggacatatttggatcagcgagatgcgattatgggaattaacttgctctggcaatgaccatgattgagaaaactggccggggtgtagtagtctatcttcgtggccatgagggtaggggtattgggctgggtcacaagcttcaagcatacaacttacaagatgatgggcgcgatactgtcgaggcaaacttggagctagggctgcctgctgactcgcgggagtacggtataggtgcacagatattacgccatcttggtgccaggaccatgcggctgatgactaacaaccctgccaagtacactggactcaagggctatggtttaagtgtccttggtagagtgccattgctaacaccgataaccaccgagaataggcgctatatggaaacaaagcgattgaagatggggcatgtttatggaagccgctccagtaatcatgcaaacggcagtggcttggctggtgctggcgagagagaggagcaggatcagaatgacagtgctggcgtgcaagagcgaactccagaagcttgagtgcctaactctgcgttccttagagctgctccaatgggagtcttaaaaagagatgcatcttaaaatatagggctccatggcaaaaaaatcactccaacggggacctcattttacaaaaactcaggaaacaaatttgggctccggtctcattggtcccaaatgtaggacttgaaactatcggccctattctcgttcccacgcccccacgaccttcggtcttttcctgttgcattcgttctcaagccgtctctcccacaaaccaaaccctctgcctgtcgagaagcattggcgagatggatggacggccaccgccttttcctcgttcacggccaacaggttggcctcgttgaacttccatggagatggcactagatgtgatagggagatcatcagctgtgtcttctccgccagatttgcgcaggcctcctgtggccgtggctgcagagcgaaggcctgcaagtatgtctgcaacttcccaacagacacaaggacaagcgtcttggcatcgaatcgctgcagaccatgccgatcggagtttatcagtggcaccgatgatgtatcaagatccattgtcaatgattgatgactatagaacctgaagatgtatttgcctgccaagaaaatatggagagcgaaaatgaggtcatggagtcaccaccattgaatgattcaaattcacagtcaaaaccaaagggtcgatccaagaattttaatgaagctgaagacattttgttgatgtcagcttatcttaacatacgtaaagatgcaattactggaagggatcaataagaaggcaacttttgggaaagagttgagaagtactttaacgttaacaggacatttgagtcagatcgtaactggtcatcgttgaagcatcggtggggtataattcacaaataagttagtagtttccaaggtttccatgacagtatcgaaaggaaaaatgaaagtgggaagacaagtgatgataagctggctgaagcaaatgtaatgttccatcaatttaaaaataaggccttttctttgttccatgcgtggaacattctcagacatgagccaaagtgggctgaagataaaacatctaatgaagggaatgcaaatggggacagtcatcccaatgctcaaagacctgcaggaaggaaagctgaaaaggaaaagatgaaagcaaaaaggcgcaacagtgatgaagagtctgatcctttcattgaagaggtaaaaaaatttgagagaatcgagagagaaaactgagagcgaacgaaaggagcgtgatgaaagatactttgagctgcataagaaaaaagtagacttggagcaagaccagcatgacaagttgataatggcacttgagtcttgacacgagcacaatggatgaccaaggaaaacagtattttcagttgatgaaagaagatattttagctcgacgctttgggagtaggcagccatagttatttagtttttaatactttagacttttttccattcaaaacagattatcttgatgttcatgtaatgtaagaacatattttcattcaaagcagattatcttgatgtttgcaacaatctgtgttgacattgttttctggttactgtaaaagttgagttgaaattttgcttctgaaa

SEQ ID NO: 3171 - DNA, 5057 bp, Zea Mays
cttctcttcctcctacccacccaccgccccactccaccttttccttccccgccggccgccgcgcagcgcgagcggagtcgccctctccagtagagtaggagtgacgtctctacctatccacctcagccccctcttttcattccccacccgcgccgcgcgagcggagtttcgcagcacgctgcggctcgcttcgccagaattcctggcgagggtacagaattccgcatcgaaacggaagggttccgctcaccgagaaaattggcctcaatcgcgcgtccgtcctcagcgtcgtgcgttcggatgccaaggagggaacaacaactggggtttcagcaaaggattggacaaacacaatattggcacttgtgtctcctaattccaaaccggaggacttcaaccgcccagctgggttacctccttttgcagttctttgtgaaattgttgatgatgatgatggctccatggctttgttaccaaaactgcaacaatttgcaaagagggagaacctgaagataatatcaattgcagacctgataagcgaggggggcaccgacacgaagccacgagatggtttggagagaaacagttgaagcatctcccgcggaggttcacactggtccctctccgcgccgaagcacaacgagactgctttctgctcttcaccacctgccagccatcctcctgaagaccccaggtgtacttggaaaaaaatgaatgattgtacttggagtcttggatgtgaaatttttttatgatagccttcttgacttcttgcattgtaattctaagctttgaacattcccatttgcagatataggagaaagagagtgttatggtcgttagatcggtgaggaattggagaggggtatcgatgggcaggaacaccagccgggggcctctgcccacgaccgagcaagaggagggtttctcccttctaattcttgcctgctttatttttcatccattgattacataaataggccggctgaccgcccctatctagctagagatccttatctccttaaaactctcctaaaaactctcaacaaactactaactgataacctatctagataatctcaactaatcttctaaataatctcaactaatcttctaatcttatctctaactatccttatctaatcccccttggagggcccatggctgctgctgccgcagcccctccgtggacctccttaggccctgacactacacccctcctggacaagcagctcgtcctcgagctacagcatgacgatgctcaaagaccgagtctacttgactcaaaaccagaaacctagaagacaaaccttttacatctcggcttatcttattattccgaatatgttttttttgaccccataagataaggcggacaccctccgcgcattggacttgcacgtgtgcagccacctggatcccatggactccatctagacgaaaggggagcacatggacgggcacctggaataggtcgcaacaataaccagcggaggcgctctcgtggcggccggtagcggaatgtggtggcgccaaatagtgcgcccttgtcgatgacgaggggagtgccttccctaccgccgctgccgtagagttgaagttcgtcgcccgcgggacacgtaccatgctcgcacttggtgacttggagatagcggcccggtgacgctgctgatggccgtccgacagggcgaggtcgcgcccccgtgtgccgaggtcaaccgtcaccaaggctgcctcgagcatccgctggcgcatctcccgcactctctgtcgtgcaaggaagccacgagcaacaacttgtatgcccacagccgccgacgtctggagacgtgcggacaacgccaactggtggtgcccatgttgcactgctgccttgatttgcagcagcccttgcttaaccttctggagcgtggcttgcatctttgcgagatcagcccttatgttggtccacaagtcgcccgtcgatggagctggtgattgctgagtcgtggctgcccctagtggcgttgcccatggggacggacacgccgtcaacgaagatgatgtgacgaaatttggcgttgttcctggggatgggcgcgccaacgtccaggacgtggtgacaaaattggcaggtgatggtgcccatggagatagggacgccggttgccaagatggtgtgacgaaggtggcatgtggcgcaacccatagagatggcgacgtcggttgccaggacggcgtgatgaaggtgacatgcggcgcagtccatggagatggggacgccggttgccaggatgacaccacgaaattggcagcagaagccataggatcagatcgaaacccaaggtagccaataccagatgttatggtcgttagatcgatgagggattggagaggggtatcgatgggcaggaacaccggccgggggcctctgcccacagtaaattttatgttcagcagaaggatggctacatttaatgttatgttcattagagtgatggctactacttcaaacatcaggtccaaaaagtttgaatgtgcatgggcagcttatgaactttgaaaaacaaggacctccttgcatgatgtaggaatgtaaagtcacatgctttgggctgaagggtgtaaaaatgttgctcccaaatgaaccacaatatgacgagacattttgccagctacatccactacactggatgagtaaaagatctgattttctttatcttgaggtggtatcccggatatgatctgcttgcagacaaccaaaaaggcaaaaacatctcctttgttttcgaatttagtctagtgattgtctaaatgataaacatgtttcccccagcaatatgtttggaattttagaatggttcttttcactcatgcagggtgatgttggggatggacaagagatcttagtacgagtgcattcggagtgcctaactggggacatatttggatcagcgagatgcgattatgggaattaacttgctctggcaatgaccatgattgagaaaactggccggggtgtagtagtctatcttcgtggccatgagggtaggggtattgggctgggtcacaagcttcaagcatacaacttacaagatgatgggcgcgatactgtcgaggcaaacttggagctagggctgcctgctgactcgcgggagtacggtataggtgcacagatattacgccatcttggtgccaggaccatgcggctgatgactaacaaccctgccaagtacactggactcaagggctatggtttaagtgtccttggtagagtgccattgctaacaccgataaccaccgagaataggcgctatatggaaacaaagcgattgaagatggggcatgtttatggaagccgctccagtaatcatgcaaacggcagtggcttggctggtgctggcgagagagaggagcaggatcagaatgacagtgctggcgtgcaagagcgaactccagaagcttgagtgcctaactctgcgttccttagagctgctccaatgggagtcttaaaaagagatgcatcttaaaatatagggctccatggcaaaaaaatcactccaacggggacctcattttacaaaaactcaggaaacaaatttgggctccggtctcattggtcccaaatgtaggacttgaaactatcggccctattctcgttcccacgcccccacgaccttcggtcttttcctgttgcattcgttctcaagccgtctctcccacaaaccaaaccctctgcctgtcgagaagcattggcgagatggatggacggccaccgccttttcctcgttcacggccaacaggttggcctcgttgaacttccatggagatggcactagatgtgatagggagatcatcagctgtgtcttctccgccagatttgcgcaggcctcctgtggccgtggctgcagagcgaaggcctgcaagtatgtctgcaacttcccaacagacacaaggacaagcgtcttggcatcgaatcgctgcagaccatgccgatcggagtttatcagtggcaccgatgatgtatcaagatccattgtcaatgattgatgactatagatgtatttgcctgccaagaaaatatggagagcgaaaatgaggtcatggagtcaccaccattgaatgattcaaattcacagtcaaaaccaaagggtcgatccaagaattttaatgaagctgaagacattttgttgatgtcagcttatcttaacatacgtaaagatgcaattactggaagggatcaataagaaggcaacttttgggaaagagttgagaagtactttaacgttaacaggacatttgagtcagatcgtaactggtcatcgttgaagcatcggtggggtataattcacaaataagttagtagtttccaaggtttccatgacagtatcgaaaggaaaaatgaaagtgggaagacaagtgatgataagctggctgaagcaaatgtaatgttccatcaatttaaaaataaggccttttctttgttccatgcgtggaacattctcagacatgagccaaagtgggctgaagataaaacatctaatgaagggaatgcaaatggggacagtcatcccaatgctcaaagacctgcaggaaggaaagctgaaaaggaaaagatgaaagcaaaaaggcgcaacagtgatgaagagtctgatcctttcattgaagaggtaaaaaaatttgagagaatcgagagagaaaactgagagcgaacgaaaggagcgtgatgaaagatactttgagctgcataagaaaaaagtagacttggagcaagaccagcatgacaagttgataatggcacttgagtcttgacacgagcacaatggatgaccaaggaaaacagtattttcagttgatgaaagaagatattttagctcgacgctttgggagtaggcagccatagttatttagtttttaatactttagacttttttccattcaaaacagattatcttgatgttcatgtaatgtaagaacatattttcattcaaagcagattatcttgatgtttgcaacaatctgtgttgacattgttttctggttactgtaaaagttgagttgaaattttgcttctgaaa

SEQ ID NO: 3172 - DNA, 4924 bp, Zea Mays
cttctcttcctcctacccacccaccgccccactccaccttttccttccccgccggccgccgcgcagcgcgagcggagtcgccctctccagtagagtaggagtgacgtctctacctatccacctcagccccctcttttcattccccacccgcgccgcgcgagcggagtttcgcagcacgctgcggctcgcttcgccagaattcctggcgagggtacagaattccgcatcgaaacggaagggttccgctcaccgagaaaattggcctcaatcgcgcgtccgtcctcagcgtcgatgccaaggagggaacaacaactggggtttcagcaaaggattggacaaacacaatattggcacttgtgtctcctaattccaaaccggaggacttcaaccgcccagttctttgtgaaattgttgatgatgatgatggctccatggctttgttaccaaaactgcaacaatttgcaaagagggagaacctgaagataatatcaattgcagacctgataagcgaggggggcaccgacacgaagccacgagatggtttggagagaaacagttgaagcatctcccgcggaggttcacactggtccctctccgcgccgaagcacaacgagactgctttctgctcttcaccacctgccagccatcctcctgaagaccccaggtgtacttggaaaaaaatgaatgattgtacttggagtcttggatgtgaaatttttttatgatagccttcttgacttcttgcattgtaattctaagctttgaacattcccatttgcagatataggagaaagagagtgttatggtcgttagatcggtgaggaattggagaggggtatcgatgggcaggaacaccagccgggggcctctgcccacgaccgagcaagaggagggtttctcccttctaattcttgcctgctttatttttcatccattgattacataaataggccggctgaccgcccctatctagctagagatccttatctccttaaaactctcctaaaaactctcaacaaactactaactgataacctatctagataatctcaactaatcttctaaataatctcaactaatcttctaatcttatctctaactatccttatctaatcccccttggagggcccatggctgctgctgccgcagcccctccgtggacctccttaggccctgacactacacccctcctggacaagcagctcgtcctcgagctacagcatgacgatgctcaaagaccgagtctacttgactcaaaaccagaaacctagaagacaaaccttttacatctcggcttatcttattattccgaatatgttttttttgaccccataagataaggcggacaccctccgcgcattggacttgcacgtgtgcagccacctggatcccatggactccatctagacgaaaggggagcacatggacgggcacctggaataggtcgcaacaataaccagcggaggcgctctcgtggcggccggtagcggaatgtggtggcgccaaatagtgcgcccttgtcgatgacgaggggagtgccttccctaccgccgctgccgtagagttgaagttcgtcgcccgcgggacacgtaccatgctcgcacttggtgacttggagatagcggcccggtgacgctgctgatggccgtccgacagggcgaggtcgcgcccccgtgtgccgaggtcaaccgtcaccaaggctgcctcgagcatccgctggcgcatctcccgcactctctgtcgtgcaaggaagccacgagcaacaacttgtatgcccacagccgccgacgtctggagacgtgcggacaacgccaactggtggtgcccatgttgcactgctgccttgatttgcagcagcccttgcttaaccttctggagcgtggcttgcatctttgcgagatcagcccttatgttggtccacaagtcgcccgtcgatggagctggtgattgctgagtcgtggctgcccctagtggcgttgcccatggggacggacacgccgtcaacgaagatgatgtgacgaaatttggcgttgttcctggggatgggcgcgccaacgtccaggacgtggtgacaaaattggcaggtgatggtgcccatggagatagggacgccggttgccaagatggtgtgacgaaggtggcatgtggcgcaacccatagagatggcgacgtcggttgccaggacggcgtgatgaaggtgacatgcggcgcagtccatggagatggggacgccggttgccaggatgacaccacgaaattggcagcagaagccataggatcagatcgaaacccaaggtagccaataccagatgttatggtcgttagatcgatgagggattggagaggggtatcgatgggcaggaacaccggccgggggcctctgcccacagtaaattttatgttcagcagaaggatggctacatttaatgttatgttcattagagtgatggctactacttcaaacatcaggtccaaaaagtttgaatgtgcatgggcagcttatgaactttgaaaaacaaggacctccttgcatgatgtaggaatgtaaagtcacatgctttgggctgaagggtgtaaaaatgttgctcccaaatgaaccacaatatgacgagacattttgccagctacatccactacactggatgagtaaaagatctgattttctttatcttgaggtggtatcccggatatgatctgcttgcagacaaccaaaaagggtgatgttggggatggacaagagatcttagtacgagtgcattcggagtgcctaactggggacatatttggatcagcgagatgcgattatgggaattaacttgctctggcaatgaccatgattgagaaaactggccggggtgtagtagtctatcttcgtggccatgagggtaggggtattgggctgggtcacaagcttcaagcatacaacttacaagatgatgggcgcgatactgtcgaggcaaacttggagctagggctgcctgctgactcgcgggagtacggtataggtgcacagatattacgccatcttggtgccaggaccatgcggctgatgactaacaaccctgccaagtacactggactcaagggctatggtttaagtgtccttggtagagtgccattgctaacaccgataaccaccgagaataggcgctatatggaaacaaagcgattgaagatggggcatgtttatggaagccgctccagtaatcatgcaaacggcagtggcttggctggtgctggcgagagagaggagcaggatcagaatgacagtgctggcgtgcaagagcgaactccagaagcttgagtgcctaactctgcgttccttagagctgctccaatgggagtcttaaaaagagatgcatcttaaaatatagggctccatggcaaaaaaatcactccaacggggacctcattttacaaaaactcaggaaacaaatttgggctccggtctcattggtcccaaatgtaggacttgaaactatcggccctattctcgttcccacgcccccacgaccttcggtcttttcctgttgcattcgttctcaagccgtctctcccacaaaccaaaccctctgcctgtcgagaagcattggcgagatggatggacggccaccgccttttcctcgttcacggccaacaggttggcctcgttgaacttccatggagatggcactagatgtgatagggagatcatcagctgtgtcttctccgccagatttgcgcaggcctcctgtggccgtggctgcagagcgaaggcctgcaagtatgtctgcaacttcccaacagacacaaggacaagcgtcttggcatcgaatcgctgcagaccatgccgatcggagtttatcagtggcaccgatgatgtatcaagatccattgtcaatgattgatgactatagaacctgaagatgtatttgcctgccaagaaaatatggagagcgaaaatgaggtcatggagtcaccaccattgaatgattcaaattcacagtcaaaaccaaagggtcgatccaagaattttaatgaagctgaagacattttgttgatgtcagcttatcttaacatacgtaaagatgcaattactggaagggatcaataagaaggcaacttttgggaaagagttgagaagtactttaacgttaacaggacatttgagtcagatcgtaactggtcatcgttgaagcatcggtggggtataattcacaaataagttagtagtttccaaggtttccatgacagtatcgaaaggaaaaatgaaagtgggaagacaagtgatgataagctggctgaagcaaatgtaatgttccatcaatttaaaaataaggccttttctttgttccatgcgtggaacattctcagacatgagccaaagtgggctgaagataaaacatctaatgaagggaatgcaaatggggacagtcatcccaatgctcaaagacctgcaggaaggaaagctgaaaaggaaaagatgaaagcaaaaaggcgcaacagtgatgaagagtctgatcctttcattgaagaggtaaaaaaatttgagagaatcgagagagaaaactgagagcgaacgaaaggagcgtgatgaaagatactttgagctgcataagaaaaaagtagacttggagcaagaccagcatgacaagttgataatggcacttgagtcttgacacgagcacaatggatgaccaaggaaaacagtattttcagttgatgaaagaagatattttagctcgacgctttgggagtaggcagccatagttatttagtttttaatactttagacttttttccattcaaaacagattatcttgatgttcatgtaatgtaagaacatattttcattcaaagcagattatcttgatgtttgcaacaatctgtgttgacattgttttctggttactgtaaaagttgagttgaaattttgcttctgaaa

SEQ ID NO: 3173 - DNA, 2893 bp, Zea Mays
cttctcttcctcctacccacccaccgccccactccaccttttccttccccgccggccgccgcgcagcgcgagcggagtcgccctctccagtagagtaggagtgacgtctctacctatccacctcagccccctcttttcattccccacccgcgccgcgcgagcggagtttcgcagcacgctgcggctcgcttcgccagaattcctggcgagggtacagaattccgcatcgaaacggaagggttccgctcaccgagaaaattggcctcaatcgcgcgtccgtcctcagcgtcgtgcgttcggatgccaaggagggaacaacaactggggtttcagcaaaggattggacaaacacaatattggcacttgtgtctcctaattccaaaccggaggacttcaaccgcccagctgggttacctccttttgcagttctttgtgaaattgttgatgatgatgatggctccatggctttgttaccaaaactgcaacaatttgcaaagagggagaacctgaagataatatcaattgcagacctgataagcgaggggggcaccgacacgaagccacgagatggtttggagagaaacagttgaagcatctcccgcggaggttcacactggtccctctccgcgccgaagcacaacgagactgctttctgctcttcaccacctgccagccatcctcctgaagaccccagggtgatgttggggatggacaagagatcttagtacgagtgcattcggagtgcctaactggggacatatttggatcagcgagatgcgattatgggaattaacttgctctggcaatgaccatgattgagaaaactggccggggtgtagtagtctatcttcgtggccatgagggtaggggtattgggctgggtcacaagcttcaagcatacaacttacaagatgatgggcgcgatactgtcgaggcaaacttggagctagggctgcctgctgactcgcgggagtacggtataggtgcacagatattacgccatcttggtgccaggaccatgcggctgatgactaacaaccctgccaagtacactggactcaagggctatggtttaagtgtccttggtagagtgccattgctaacaccgataaccaccgagaataggcgctatatggaaacaaagcgattgaagatggggcatgtttatggaagccgctccagtaatcatgcaaacggcagtggcttggctggtgctggcgagagagaggagcaggatcagaatgacagtgctggcgtgcaagagcgaactccagaagcttgagtgcctaactctgcgttccttagagctgctccaatgggagtcttaaaaagagatgcatcttaaaatatagggctccatggcaaaaaaatcactccaacggggacctcattttacaaaaactcaggaaacaaatttgggctccggtctcattggtcccaaatgtaggacttgaaactatcggccctattctcgttcccacgcccccacgaccttcggtcttttcctgttgcattcgttctcaagccgtctctcccacaaaccaaaccctctgcctgtcgagaagcattggcgagatggatggacggccaccgccttttcctcgttcacggccaacaggttggcctcgttgaacttccatggagatggcactagatgtgatagggagatcatcagctgtgtcttctccgccagatttgcgcaggcctcctgtggccgtggctgcagagcgaaggcctgcaagtatgtctgcaacttcccaacagacacaaggacaagcgtcttggcatcgaatcgctgcagaccatgccgatcggagtttatcagtggcaccgatgatgtatcaagatccattgtcaatgattgatgactatagatgtatttgcctgccaagaaaatatggagagcgaaaatgaggtcatggagtcaccaccattgaatgattcaaattcacagtcaaaaccaaagggtcgatccaagaattttaatgaagctgaagacattttgttgatgtcagcttatcttaacatacgtaaagatgcaattactggaagggatcaataagaaggcaacttttgggaaagagttgagaagtactttaacgttaacaggacatttgagtcagatcgtaactggtcatcgttgaagcatcggtggggtataattcacaaataagttagtagtttccaaggtttccatgacagtatcgaaaggaaaaatgaaagtgggaagacaagtgatgataagctggctgaagcaaatgtaatgttccatcaatttaaaaataaggccttttctttgttccatgcgtggaacattctcagacatgagccaaagtgggctgaagataaaacatctaatgaagggaatgcaaatggggacagtcatcccaatgctcaaagacctgcaggaaggaaagctgaaaaggaaaagatgaaagcaaaaaggcgcaacagtgatgaagagtctgatcctttcattgaagaggtaaaaaaatttgagagaatcgagagagaaaactgagagcgaacgaaaggagcgtgatgaaagatactttgagctgcataagaaaaaagtagacttggagcaagaccagcatgacaagttgataatggcacttgagtcttgacacgagcacaatggatgaccaaggaaaacagtattttcagttgatgaaagaagatattttagctcgacgctttgggagtaggcagccatagttatttagtttttaatactttagacttttttccattcaaaacagattatcttgatgttcatgtaatgtaagaacatattttcattcaaagcagattatcttgatgtttgcaacaatctgtgttgacattgttttctggttactgtaaaagttgagttgaaattttgcttctgaaa

SEQ ID NO: 3174 - DNA, 5039 bp, Zea Mays
cttctcttcctcctacccacccaccgccccactccaccttttccttccccgccggccgccgcgcagcgcgagcggagtcgccctctccagtagagtaggagtgacgtctctacctatccacctcagccccctcttttcattccccacccgcgccgcgcgagcggagtttcgcagcacgctgcggctcgcttcgccagaattcctggcgagggtacagaattccgcatcgaaacggaagggttccgctcaccgagaaaattggcctcaatcgcgcgtccgtcctcagcgtcgtgcgttcggatgccaaggagggaacaacaactggggtttcagcaaaggattggacaaacacaatattggcacttgtgtctcctaattccaaaccggaggacttcaaccgcccagctgggttacctccttttgcagttctttgtgaaattgttgatgatgatgatggctccatggctttgttaccaaaactgcaacaatttgcaaagagggagaacctgaagataatatcaattgcagacctgataagcgaggggggcaccgacacgaagccacgagatggtttggagagaaacagttgaagcatctcccgcggaggttcacactggtccctctccgcgccgaagcacaacgagactgctttctgctcttcaccacctgccagccatcctcctgaagaccccaggtgtacttggaaaaaaatgaatgattgtacttggagtcttggatgtgaaatttttttatgatagccttcttgacttcttgcattgtaattctaagctttgaacattcccatttgcagatataggagaaagagagtgttatggtcgttagatcggtgaggaattggagaggggtatcgatgggcaggaacaccagccgggggcctctgcccacgaccgagcaagaggagggtttctcccttctaattcttgcctgctttatttttcatccattgattacataaataggccggctgaccgcccctatctagctagagatccttatctccttaaaactctcctaaaaactctcaacaaactactaactgataacctatctagataatctcaactaatcttctaaataatctcaactaatcttctaatcttatctctaactatccttatctaatcccccttggagggcccatggctgctgctgccgcagcccctccgtggacctccttaggccctgacactacacccctcctggacaagcagctcgtcctcgagctacagcatgacgatgctcaaagaccgagtctacttgactcaaaaccagaaacctagaagacaaaccttttacatctcggcttatcttattattccgaatatgttttttttgaccccataagataaggcggacaccctccgcgcattggacttgcacgtgtgcagccacctggatcccatggactccatctagacgaaaggggagcacatggacgggcacctggaataggtcgcaacaataaccagcggaggcgctctcgtggcggccggtagcggaatgtggtggcgccaaatagtgcgcccttgtcgatgacgaggggagtgccttccctaccgccgctgccgtagagttgaagttcgtcgcccgcgggacacgtaccatgctcgcacttggtgacttggagatagcggcccggtgacgctgctgatggccgtccgacagggcgaggtcgcgcccccgtgtgccgaggtcaaccgtcaccaaggctgcctcgagcatccgctggcgcatctcccgcactctctgtcgtgcaaggaagccacgagcaacaacttgtatgcccacagccgccgacgtctggagacgtgcggacaacgccaactggtggtgcccatgttgcactgctgccttgatttgcagcagcccttgcttaaccttctggagcgtggcttgcatctttgcgagatcagcccttatgttggtccacaagtcgcccgtcgatggagctggtgattgctgagtcgtggctgcccctagtggcgttgcccatggggacggacacgccgtcaacgaagatgatgtgacgaaatttggcgttgttcctggggatgggcgcgccaacgtccaggacgtggtgacaaaattggcaggtgatggtgcccatggagatagggacgccggttgccaagatggtgtgacgaaggtggcatgtggcgcaacccatagagatggcgacgtcggttgccaggacggcgtgatgaaggtgacatgcggcgcagtccatggagatggggacgccggttgccaggatgacaccacgaaattggcagcagaagccataggatcagatcgaaacccaaggtagccaataccagatgttatggtcgttagatcgatgagggattggagaggggtatcgatgggcaggaacaccggccgggggcctctgcccacagtaaattttatgttcagcagaaggatggctacatttaatgttatgttcattagagtgatggctactacttcaaacatcaggtccaaaaagtttgaatgtgcatgggcagcttatgaactttgaaaaacaaggacctccttgcatgatgtaggaatgtaaagtcacatgctttgggctgaagggtgtaaaaatgttgctcccaaatgaaccacaatatgacgagacattttgccagctacatccactacactggatgagtaaaagatctgattttctttatcttgaggtggtatcccggatatgatctgcttgcagacaaccaaaaaggcaaaaacatctcctttgttttcgaatttagtctagtgattgtctaaatgataaacatgtttcccccagcaatatgtttggaattttagaatggttcttttcactcatgcagggtgatgttggggatggacaagagatcttagtacgagtgcattcggagtgcctaactggggacatatttggatcagcgagatgcgattatgggaattaacttgctctggcaatgaccatgattgagaaaactggccggggtgtagtagtctatcttcgtggccatgagggtaggggtattgggctgggtcacaagcttcaagcatacaacttacaagatgatgggcgcgatactgtcgaggcaaacttggagctagggctgcctgctgactcgcgggagtacggtataggtgcacagatattacgccatcttggtgccaggaccatgcggctgatgactaacaaccctgccaagtacactggactcaagggctatggtttaagtgtccttggtagagtgccattgctaacaccgataaccaccgagaataggcgctatatggaaacaaagcgattgaagatggggcatgtttatggaagccgctccagtaatcatgcaaacggcagtggcttggctggtgctggcgagagagaggagcaggatcagaatgacagtgctggcgtgcaagagcgaactccagaagcttgagtgcctaactctgcgttccttagagctgctccaatgggagtcttaaaaagagatgcatcttaaaatatagggctccatggcaaaaaaatcactccaacggggacctcattttacaaaaactcaggaaacaaatttgggctccggtctcattggtcccaaatgtaggacttgaaactatcggccctattctcgttcccacgcccccacgaccttcggtcttttcctgttgcattcgttctcaagccgtctctcccacaaaccaaaccctctgcctgtcgagaagcattggcgagatggatggacggccaccgccttttcctcgttcacggccaacaggttggcctcgttgaacttccatggagatggcactagatgtgatagggagatcatcagctgtgtcttctccgccagatttgcgcaggcctcctgtggccgtggctgcagagcgaaggcctgcaagtatgtctgcaacttcccaacagacacaaggacaagcgtcttggcatcgaatcgctgcagaccatgccgatcggagtttatcagtggcaccgatgatgtatcaagatccattgtcaatgattgatgactatagaaaatatggagagcgaaaatgaggtcatggagtcaccaccattgaatgattcaaattcacagtcaaaaccaaagggtcgatccaagaattttaatgaagctgaagacattttgttgatgtcagcttatcttaacatacgtaaagatgcaattactggaagggatcaataagaaggcaacttttgggaaagagttgagaagtactttaacgttaacaggacatttgagtcagatcgtaactggtcatcgttgaagcatcggtggggtataattcacaaataagttagtagtttccaaggtttccatgacagtatcgaaaggaaaaatgaaagtgggaagacaagtgatgataagctggctgaagcaaatgtaatgttccatcaatttaaaaataaggccttttctttgttccatgcgtggaacattctcagacatgagccaaagtgggctgaagataaaacatctaatgaagggaatgcaaatggggacagtcatcccaatgctcaaagacctgcaggaaggaaagctgaaaaggaaaagatgaaagcaaaaaggcgcaacagtgatgaagagtctgatcctttcattgaagaggtaaaaaaatttgagagaatcgagagagaaaactgagagcgaacgaaaggagcgtgatgaaagatactttgagctgcataagaaaaaagtagacttggagcaagaccagcatgacaagttgataatggcacttgagtcttgacacgagcacaatggatgaccaaggaaaacagtattttcagttgatgaaagaagatattttagctcgacgctttgggagtaggcagccatagttatttagtttttaatactttagacttttttccattcaaaacagattatcttgatgttcatgtaatgtaagaacatattttcattcaaagcagattatcttgatgtttgcaacaatctgtgttgacattgttttctggttactgtaaaagttgagttgaaattttgcttctgaaa

SEQ ID NO: 3175 - DNA, 5036 bp, Zea Mays
cttctcttcctcctacccacccaccgccccactccaccttttccttccccgccggccgccgcgcagcgcgagcggagtcgccctctccagtagagtaggagtgacgtctctacctatccacctcagccccctcttttcattccccacccgcgccgcgcgagcggagtttcgcagcacgctgcggctcgcttcgccagaattcctggcgagggtacagaattccgcatcgaaacggaagggttccgctcaccgagaaaattggcctcaatcgcgcgtccgtcctcagcgtcgtgcgttcggatgccaaggagggaacaacaactggggtttcagcaaaggattggacaaacacaatattggcacttgtgtctcctaattccaaaccggaggacttcaaccgcccagttctttgtgaaattgttgatgatgatgatggctccatggctttgttaccaaaactgcaacaatttgcaaagagggagaacctgaagataatatcaattgcagacctgataagcgaggggggcaccgacacgaagccacgagatggtttggagagaaacagttgaagcatctcccgcggaggttcacactggtccctctccgcgccgaagcacaacgagactgctttctgctcttcaccacctgccagccatcctcctgaagaccccaggtgtacttggaaaaaaatgaatgattgtacttggagtcttggatgtgaaatttttttatgatagccttcttgacttcttgcattgtaattctaagctttgaacattcccatttgcagatataggagaaagagagtgttatggtcgttagatcggtgaggaattggagaggggtatcgatgggcaggaacaccagccgggggcctctgcccacgaccgagcaagaggagggtttctcccttctaattcttgcctgctttatttttcatccattgattacataaataggccggctgaccgcccctatctagctagagatccttatctccttaaaactctcctaaaaactctcaacaaactactaactgataacctatctagataatctcaactaatcttctaaataatctcaactaatcttctaatcttatctctaactatccttatctaatcccccttggagggcccatggctgctgctgccgcagcccctccgtggacctccttaggccctgacactacacccctcctggacaagcagctcgtcctcgagctacagcatgacgatgctcaaagaccgagtctacttgactcaaaaccagaaacctagaagacaaaccttttacatctcggcttatcttattattccgaatatgttttttttgaccccataagataaggcggacaccctccgcgcattggacttgcacgtgtgcagccacctggatcccatggactccatctagacgaaaggggagcacatggacgggcacctggaataggtcgcaacaataaccagcggaggcgctctcgtggcggccggtagcggaatgtggtggcgccaaatagtgcgcccttgtcgatgacgaggggagtgccttccctaccgccgctgccgtagagttgaagttcgtcgcccgcgggacacgtaccatgctcgcacttggtgacttggagatagcggcccggtgacgctgctgatggccgtccgacagggcgaggtcgcgcccccgtgtgccgaggtcaaccgtcaccaaggctgcctcgagcatccgctggcgcatctcccgcactctctgtcgtgcaaggaagccacgagcaacaacttgtatgcccacagccgccgacgtctggagacgtgcggacaacgccaactggtggtgcccatgttgcactgctgccttgatttgcagcagcccttgcttaaccttctggagcgtggcttgcatctttgcgagatcagcccttatgttggtccacaagtcgcccgtcgatggagctggtgattgctgagtcgtggctgcccctagtggcgttgcccatggggacggacacgccgtcaacgaagatgatgtgacgaaatttggcgttgttcctggggatgggcgcgccaacgtccaggacgtggtgacaaaattggcaggtgatggtgcccatggagatagggacgccggttgccaagatggtgtgacgaaggtggcatgtggcgcaacccatagagatggcgacgtcggttgccaggacggcgtgatgaaggtgacatgcggcgcagtccatggagatggggacgccggttgccaggatgacaccacgaaattggcagcagaagccataggatcagatcgaaacccaaggtagccaataccagatgttatggtcgttagatcgatgagggattggagaggggtatcgatgggcaggaacaccggccgggggcctctgcccacagtaaattttatgttcagcagaaggatggctacatttaatgttatgttcattagagtgatggctactacttcaaacatcaggtccaaaaagtttgaatgtgcatgggcagcttatgaactttgaaaaacaaggacctccttgcatgatgtaggaatgtaaagtcacatgctttgggctgaagggtgtaaaaatgttgctcccaaatgaaccacaatatgacgagacattttgccagctacatccactacactggatgagtaaaagatctgattttctttatcttgaggtggtatcccggatatgatctgcttgcagacaaccaaaaaggcaaaaacatctcctttgttttcgaatttagtctagtgattgtctaaatgataaacatgtttcccccagcaatatgtttggaattttagaatggttcttttcactcatgcagggtgatgttggggatggacaagagatcttagtacgagtgcattcggagtgcctaactggggacatatttggatcagcgagatgcgattatgggaattaacttgctctggcaatgaccatgattgagaaaactggccggggtgtagtagtctatcttcgtggccatgagggtaggggtattgggctgggtcacaagcttcaagcatacaacttacaagatgatgggcgcgatactgtcgaggcaaacttggagctagggctgcctgctgactcgcgggagtacggtataggtgcacagatattacgccatcttggtgccaggaccatgcggctgatgactaacaaccctgccaagtacactggactcaagggctatggtttaagtgtccttggtagagtgccattgctaacaccgataaccaccgagaataggcgctatatggaaacaaagcgattgaagatggggcatgtttatggaagccgctccagtaatcatgcaaacggcagtggcttggctggtgctggcgagagagaggagcaggatcagaatgacagtgctggcgtgcaagagcgaactccagaagcttgagtgcctaactctgcgttccttagagctgctccaatgggagtcttaaaaagagatgcatcttaaaatatagggctccatggcaaaaaaatcactccaacggggacctcattttacaaaaactcaggaaacaaatttgggctccggtctcattggtcccaaatgtaggacttgaaactatcggccctattctcgttcccacgcccccacgaccttcggtcttttcctgttgcattcgttctcaagccgtctctcccacaaaccaaaccctctgcctgtcgagaagcattggcgagatggatggacggccaccgccttttcctcgttcacggccaacaggttggcctcgttgaacttccatggagatggcactagatgtgatagggagatcatcagctgtgtcttctccgccagatttgcgcaggcctcctgtggccgtggctgcagagcgaaggcctgcaagtatgtctgcaacttcccaacagacacaaggacaagcgtcttggcatcgaatcgctgcagaccatgccgatcggagtttatcagtggcaccgatgatgtatcaagatccattgtcaatgattgatgactatagatgtatttgcctgccaagaaaatatggagagcgaaaatgaggtcatggagtcaccaccattgaatgattcaaattcacagtcaaaaccaaagggtcgatccaagaattttaatgaagctgaagacattttgttgatgtcagcttatcttaacatacgtaaagatgcaattactggaagggatcaataagaaggcaacttttgggaaagagttgagaagtactttaacgttaacaggacatttgagtcagatcgtaactggtcatcgttgaagcatcggtggggtataattcacaaataagttagtagtttccaaggtttccatgacagtatcgaaaggaaaaatgaaagtgggaagacaagtgatgataagctggctgaagcaaatgtaatgttccatcaatttaaaaataaggccttttctttgttccatgcgtggaacattctcagacatgagccaaagtgggctgaagataaaacatctaatgaagggaatgcaaatggggacagtcatcccaatgctcaaagacctgcaggaaggaaagctgaaaaggaaaagatgaaagcaaaaaggcgcaacagtgatgaagagtctgatcctttcattgaagaggtaaaaaaatttgagagaatcgagagagaaaactgagagcgaacgaaaggagcgtgatgaaagatactttgagctgcataagaaaaaagtagacttggagcaagaccagcatgacaagttgataatggcacttgagtcttgacacgagcacaatggatgaccaaggaaaacagtattttcagttgatgaaagaagatattttagctcgacgctttgggagtaggcagccatagttatttagtttttaatactttagacttttttccattcaaaacagattatcttgatgttcatgtaatgtaagaacatattttcattcaaagcagattatcttgatgtttgcaacaatctgtgttgacattgttttctggttactgtaaaagttgagttgaaattttgcttctgaaa

SEQ ID NO: 3176 - DNA, 5460 bp, Zea Mays
cttctcttcctcctacccacccaccgccccactccaccttttccttccccgccggccgccgcgcagcgcgagcggagtcgccctctccagtagagtaggagtgacgtctctacctatccacctcagccccctcttttcattccccacccgcgccgcgcgagcggagtttcgcagcacgctgcggctcgcttcgccagaattcctggcgagggtacagaattccgcatcgaaacggaagggttccgctcaccgagaaaattggcctcaatcgcgcgtccgtcctcagcgtcgtgcgttcggatgccaaggagggaacaacaactggggtttcagcaaaggattggacaaacacaatattggcacttgtgtctcctaattccaaaccggaggacttcaaccgcccagctgggttacctccttttgcagttctttgtgaaattgttgatgatgatgatggctccatggctttgttaccaaaactgcaacaatttgcaaagagggagaacctgaagataatatcaattgcagacctgataagcgaggggggcaccgacacgaagccacgagatggtttggagagaaacagttgaagcatctcccgcggaggttcacactggtccctctccgcgccgaagcacaacgagactgctttctgctcttcaccacctgccagccatcctcctgaagaccccaggtgtacttggaaaaaaatgaatgattgtacttggagtcttggatgtgaaatttttttatgatagccttcttgacttcttgcattgtaattctaagctttgaacattcccatttgcagatataggagaaagagagtgttatggtcgttagatcggtgaggaattggagaggggtatcgatgggcaggaacaccagccgggggcctctgcccacgaccgagcaagaggagggtttctcccttctaattcttgcctgctttatttttcatccattgattacataaataggccggctgaccgcccctatctagctagagatccttatctccttaaaactctcctaaaaactctcaacaaactactaactgataacctatctagataatctcaactaatcttctaaataatctcaactaatcttctaatcttatctctaactatccttatctaatcccccttggagggcccatggctgctgctgccgcagcccctccgtggacctccttaggccctgacactacacccctcctggacaagcagctcgtcctcgagctacagcatgacgatgctcaaagaccgagtctacttgactcaaaaccagaaacctagaagacaaaccttttacatctcggcttatcttattattccgaatatgttttttttgaccccataagataaggcggacaccctccgcgcattggacttgcacgtgtgcagccacctggatcccatggactccatctagacgaaaggggagcacatggacgggcacctggaataggtcgcaacaataaccagcggaggcgctctcgtggcggccggtagcggaatgtggtggcgccaaatagtgcgcccttgtcgatgacgaggggagtgccttccctaccgccgctgccgtagagttgaagttcgtcgcccgcgggacacgtaccatgctcgcacttggtgacttggagatagcggcccggtgacgctgctgatggccgtccgacagggcgaggtcgcgcccccgtgtgccgaggtcaaccgtcaccaaggctgcctcgagcatccgctggcgcatctcccgcactctctgtcgtgcaaggaagccacgagcaacaacttgtatgcccacagccgccgacgtctggagacgtgcggacaacgccaactggtggtgcccatgttgcactgctgccttgatttgcagcagcccttgcttaaccttctggagcgtggcttgcatctttgcgagatcagcccttatgttggtccacaagtcgcccgtcgatggagctggtgattgctgagtcgtggctgcccctagtggcgttgcccatggggacggacacgccgtcaacgaagatgatgtgacgaaatttggcgttgttcctggggatgggcgcgccaacgtccaggacgtggtgacaaaattggcaggtgatggtgcccatggagatagggacgccggttgccaagatggtgtgacgaaggtggcatgtggcgcaacccatagagatggcgacgtcggttgccaggacggcgtgatgaaggtgacatgcggcgcagtccatggagatggggacgccggttgccaggatgacaccacgaaattggcagcagaagccataggatcagatcgaaacccaaggtagccaataccagatgttatggtcgttagatcgatgagggattggagaggggtatcgatgggcaggaacaccggccgggggcctctgcccacagtaaattttatgttcagcagaaggatggctacatttaatgttatgttcattagagtgatggctactacttcaaacatcaggtccaaaaagtttgaatgtgcatgggcagcttatgaactttgaaaaacaaggacctccttgcatgatgtaggaatgtaaagtcacatgctttgggctgaagggtgtaaaaatgttgctcccaaatgaaccacaatatgacgagacattttgccagctacatccactacactggatgagtaaaagatctgattttctttatcttgaggtggtatcccggatatgatctgcttgcagacaaccaaaaagggtgatgttggggatggacaagagatcttagtacgagtgcattcggagtgcctaactggggacatatttggatcagcgagatgcgattatgggaattaacttgctctggcaatgaccatgattgagaaaactggccggggtgtagtagtctatcttcgtggccatgagggtaggggtattgggctgggtcacaagcttcaagcatacaacttacaagatgatgggcgcgatactgtcgaggcaaacttggagctagggctgcctgctgactcgcgggagtacggtataggtgcacagatattacgccatcttggtgccaggaccatgcggctgatgactaacaaccctgccaagtacactggactcaagggctatggtttaagtgtccttggtagagtgccattgctaacaccgataaccaccgagaataggcgctatatggaaacaaagcgattgaagatggggcatgtttatggaagccgctccagtaatcatgcaaacggcagtggcttggctggtgctggcgagagagaggagcaggatcagaatgacagtgctggcgtgcaagagcgaactccagaagcttgagtgcctaactctgcgttccttagagctgctccaatgggagtcttaaaaagagatgcatcttaaaatatagggctccatggcaaaaaaatcactccaacggggacctcattttacaaaaactcaggaaacaaatttgggctccggtctcattggtcccaaatgtaggacttgaaactatcggccctattctcgttcccacgcccccacgaccttcggtcttttcctgttgcattcgttctcaagccgtctctcccacaaaccaaaccctctgcctgtcgagaagcattggcgagatggatggacggccaccgccttttcctcgttcacggccaacaggttggcctcgttgaacttccatggagatggcactagatgtgatagggagatcatcagctgtgtcttctccgccagatttgcgcaggcctcctgtggccgtggctgcagagcgaaggcctgcaagtatgtctgcaacttcccaacagacacaaggacaagcgtcttggcatcgaatcgctgcagaccatgccgatcggagtttatcagtggcaccgatgatgtatcaagatccattgtcaatgattgatgactataggtaataacctttctgttgagattagtagtcgattatatttgctcatgaattcaatcgatggtgatctgggatctccatggttgagaaattgaagtcaaggcctggtgaggttacttgtactggtaggtgctgatagatgtagtgctcaccgatgcttgtgaattgaattattggttctgaaaatatcctcacttcaaccatgcatacgagattatgagtaaatgtgaattccatacactctgttgccccagtccaatacaaccttgctgaaccttgcatatttgtgtgagcaggtacatttttgggagtctctttaatgtttttcttgtttggtctcataattagtggagtacttcaacttatgtgcattattatatcaatttgattaccaaactttattgtgtatagcgtcaaagctgttttgaatgtcttgtgtttgtgtatatttcattctaattccataaccagagtctgctcatatttttacactactctattgaaccaagaacctgaagatgtatttgcctgccaagaaaatatggagagcgaaaatgaggtcatggagtcaccaccattgaatgattcaaattcacagtcaaaaccaaagggtcgatccaagaattttaatgaagctgaagacattttgttgatgtcagcttatcttaacatacgtaaagatgcaattactggaagggatcaataagaaggcaacttttgggaaagagttgagaagtactttaacgttaacaggacatttgagtcagatcgtaactggtcatcgttgaagcatcggtggggtataattcacaaataagttagtagtttccaaggtttccatgacagtatcgaaaggaaaaatgaaagtgggaagacaagtgatgataagctggctgaagcaaatgtaatgttccatcaatttaaaaataaggccttttctttgttccatgcgtggaacattctcagacatgagccaaagtgggctgaagataaaacatctaatgaagggaatgcaaatggggacagtcatcccaatgctcaaagacctgcaggaaggaaagctgaaaaggaaaagatgaaagcaaaaaggcgcaacagtgatgaagagtctgatcctttcattgaagaggtaaaaaaatttgagagaatcgagagagaaaactgagagcgaacgaaaggagcgtgatgaaagatactttgagctgcataagaaaaaagtagacttggagcaagaccagcatgacaagttgataatggcacttgagtcttgacacgagcacaatggatgaccaaggaaaacagtattttcagttgatgaaagaagatattttagctcgacgctttgggagtaggcagccatagttatttagtttttaatactttagacttttttccattcaaaacagattatcttgatgttcatgtaatgtaagaacatattttcattcaaagcagattatcttgatgtttgcaacaatctgtgttgacattgttttctggttactgtaaaagttgagttgaaattttgcttctgaaa

SEQ ID NO: 3177 - DNA, 5045 bp, Zea Mays
cttctcttcctcctacccacccaccgccccactccaccttttccttccccgccggccgccgcgcagcgcgagcggagtcgccctctccagtagagtaggagtgacgtctctacctatccacctcagccccctcttttcattccccacccgcgccgcgcgagcggagtttcgcagcacgctgcggctcgcttcgccagaattcctggcgagggtacagaattccgcatcgaaacggaagggttccgctcaccgagaaaattggcctcaatcgcgcgtccgtcctcagcgtcgtgcgttcggatgccaaggagggaacaacaactggggtttcagcaaaggattggacaaacacaatattggcacttgtgtctcctaattccaaaccggaggacttcaaccgcccagttctttgtgaaattgttgatgatgatgatggctccatggctttgttaccaaaactgcaacaatttgcaaagagggagaacctgaagataatatcaattgcagacctgataagcgaggggggcaccgacacgaagccacgagatggtttggagagaaacagttgaagcatctcccgcggaggttcacactggtccctctccgcgccgaagcacaacgagactgctttctgctcttcaccacctgccagccatcctcctgaagaccccaggtgtacttggaaaaaaatgaatgattgtacttggagtcttggatgtgaaatttttttatgatagccttcttgacttcttgcattgtaattctaagctttgaacattcccatttgcagatataggagaaagagagtgttatggtcgttagatcggtgaggaattggagaggggtatcgatgggcaggaacaccagccgggggcctctgcccacgaccgagcaagaggagggtttctcccttctaattcttgcctgctttatttttcatccattgattacataaataggccggctgaccgcccctatctagctagagatccttatctccttaaaactctcctaaaaactctcaacaaactactaactgataacctatctagataatctcaactaatcttctaaataatctcaactaatcttctaatcttatctctaactatccttatctaatcccccttggagggcccatggctgctgctgccgcagcccctccgtggacctccttaggccctgacactacacccctcctggacaagcagctcgtcctcgagctacagcatgacgatgctcaaagaccgagtctacttgactcaaaaccagaaacctagaagacaaaccttttacatctcggcttatcttattattccgaatatgttttttttgaccccataagataaggcggacaccctccgcgcattggacttgcacgtgtgcagccacctggatcccatggactccatctagacgaaaggggagcacatggacgggcacctggaataggtcgcaacaataaccagcggaggcgctctcgtggcggccggtagcggaatgtggtggcgccaaatagtgcgcccttgtcgatgacgaggggagtgccttccctaccgccgctgccgtagagttgaagttcgtcgcccgcgggacacgtaccatgctcgcacttggtgacttggagatagcggcccggtgacgctgctgatggccgtccgacagggcgaggtcgcgcccccgtgtgccgaggtcaaccgtcaccaaggctgcctcgagcatccgctggcgcatctcccgcactctctgtcgtgcaaggaagccacgagcaacaacttgtatgcccacagccgccgacgtctggagacgtgcggacaacgccaactggtggtgcccatgttgcactgctgccttgatttgcagcagcccttgcttaaccttctggagcgtggcttgcatctttgcgagatcagcccttatgttggtccacaagtcgcccgtcgatggagctggtgattgctgagtcgtggctgcccctagtggcgttgcccatggggacggacacgccgtcaacgaagatgatgtgacgaaatttggcgttgttcctggggatgggcgcgccaacgtccaggacgtggtgacaaaattggcaggtgatggtgcccatggagatagggacgccggttgccaagatggtgtgacgaaggtggcatgtggcgcaacccatagagatggcgacgtcggttgccaggacggcgtgatgaaggtgacatgcggcgcagtccatggagatggggacgccggttgccaggatgacaccacgaaattggcagcagaagccataggatcagatcgaaacccaaggtagccaataccagatgttatggtcgttagatcgatgagggattggagaggggtatcgatgggcaggaacaccggccgggggcctctgcccacagtaaattttatgttcagcagaaggatggctacatttaatgttatgttcattagagtgatggctactacttcaaacatcaggtccaaaaagtttgaatgtgcatgggcagcttatgaactttgaaaaacaaggacctccttgcatgatgtaggaatgtaaagtcacatgctttgggctgaagggtgtaaaaatgttgctcccaaatgaaccacaatatgacgagacattttgccagctacatccactacactggatgagtaaaagatctgattttctttatcttgaggtggtatcccggatatgatctgcttgcagacaaccaaaaaggcaaaaacatctcctttgttttcgaatttagtctagtgattgtctaaatgataaacatgtttcccccagcaatatgtttggaattttagaatggttcttttcactcatgcagggtgatgttggggatggacaagagatcttagtacgagtgcattcggagtgcctaactggggacatatttggatcagcgagatgcgattatgggaattaacttgctctggcaatgaccatgattgagaaaactggccggggtgtagtagtctatcttcgtggccatgagggtaggggtattgggctgggtcacaagcttcaagcatacaacttacaagatgatgggcgcgatactgtcgaggcaaacttggagctagggctgcctgctgactcgcgggagtacggtataggtgcacagatattacgccatcttggtgccaggaccatgcggctgatgactaacaaccctgccaagtacactggactcaagggctatggtttaagtgtccttggtagagtgccattgctaacaccgataaccaccgagaataggcgctatatggaaacaaagcgattgaagatggggcatgtttatggaagccgctccagtaatcatgcaaacggcagtggcttggctggtgctggcgagagagaggagcaggatcagaatgacagtgctggcgtgcaagagcgaactccagaagcttgagtgcctaactctgcgttccttagagctgctccaatgggagtcttaaaaagagatgcatcttaaaatatagggctccatggcaaaaaaatcactccaacggggacctcattttacaaaaactcaggaaacaaatttgggctccggtctcattggtcccaaatgtaggacttgaaactatcggccctattctcgttcccacgcccccacgaccttcggtcttttcctgttgcattcgttctcaagccgtctctcccacaaaccaaaccctctgcctgtcgagaagcattggcgagatggatggacggccaccgccttttcctcgttcacggccaacaggttggcctcgttgaacttccatggagatggcactagatgtgatagggagatcatcagctgtgtcttctccgccagatttgcgcaggcctcctgtggccgtggctgcagagcgaaggcctgcaagtatgtctgcaacttcccaacagacacaaggacaagcgtcttggcatcgaatcgctgcagaccatgccgatcggagtttatcagtggcaccgatgatgtatcaagatccattgtcaatgattgatgactatagaacctgaagatgtatttgcctgccaagaaaatatggagagcgaaaatgaggtcatggagtcaccaccattgaatgattcaaattcacagtcaaaaccaaagggtcgatccaagaattttaatgaagctgaagacattttgttgatgtcagcttatcttaacatacgtaaagatgcaattactggaagggatcaataagaaggcaacttttgggaaagagttgagaagtactttaacgttaacaggacatttgagtcagatcgtaactggtcatcgttgaagcatcggtggggtataattcacaaataagttagtagtttccaaggtttccatgacagtatcgaaaggaaaaatgaaagtgggaagacaagtgatgataagctggctgaagcaaatgtaatgttccatcaatttaaaaataaggccttttctttgttccatgcgtggaacattctcagacatgagccaaagtgggctgaagataaaacatctaatgaagggaatgcaaatggggacagtcatcccaatgctcaaagacctgcaggaaggaaagctgaaaaggaaaagatgaaagcaaaaaggcgcaacagtgatgaagagtctgatcctttcattgaagaggtaaaaaaatttgagagaatcgagagagaaaactgagagcgaacgaaaggagcgtgatgaaagatactttgagctgcataagaaaaaagtagacttggagcaagaccagcatgacaagttgataatggcacttgagtcttgacacgagcacaatggatgaccaaggaaaacagtattttcagttgatgaaagaagatattttagctcgacgctttgggagtaggcagccatagttatttagtttttaatactttagacttttttccattcaaaacagattatcttgatgttcatgtaatgtaagaacatattttcattcaaagcagattatcttgatgtttgcaacaatctgtgttgacattgttttctggttactgtaaaagttgagttgaaattttgcttctgaaa

SEQ ID NO: 3178 - DNA, 4954 bp, Zea Mays
cttctcttcctcctacccacccaccgccccactccaccttttccttccccgccggccgccgcgcagcgcgagcggagtcgccctctccagtagagtaggagtgacgtctctacctatccacctcagccccctcttttcattccccacccgcgccgcgcgagcggagtttcgcagcacgctgcggctcgcttcgccagaattcctggcgagggtacagaattccgcatcgaaacggaagggttccgctcaccgagaaaattggcctcaatcgcgcgtccgtcctcagcgtcgtgcgttcggatgccaaggagggaacaacaactggggtttcagcaaaggattggacaaacacaatattggcacttgtgtctcctaattccaaaccggaggacttcaaccgcccagctgggttacctccttttgcagttctttgtgaaattgttgatgatgatgatggctccatggctttgttaccaaaactgcaacaatttgcaaagagggagaacctgaagataatatcaattgcagacctgataagcgaggggggcaccgacacgaagccacgagatggtttggagagaaacagttgaagcatctcccgcggaggttcacactggtccctctccgcgccgaagcacaacgagactgctttctgctcttcaccacctgccagccatcctcctgaagaccccaggtgtacttggaaaaaaatgaatgattgtacttggagtcttggatgtgaaatttttttatgatagccttcttgacttcttgcattgtaattctaagctttgaacattcccatttgcagatataggagaaagagagtgttatggtcgttagatcggtgaggaattggagaggggtatcgatgggcaggaacaccagccgggggcctctgcccacgaccgagcaagaggagggtttctcccttctaattcttgcctgctttatttttcatccattgattacataaataggccggctgaccgcccctatctagctagagatccttatctccttaaaactctcctaaaaactctcaacaaactactaactgataacctatctagataatctcaactaatcttctaaataatctcaactaatcttctaatcttatctctaactatccttatctaatcccccttggagggcccatggctgctgctgccgcagcccctccgtggacctccttaggccctgacactacacccctcctggacaagcagctcgtcctcgagctacagcatgacgatgctcaaagaccgagtctacttgactcaaaaccagaaacctagaagacaaaccttttacatctcggcttatcttattattccgaatatgttttttttgaccccataagataaggcggacaccctccgcgcattggacttgcacgtgtgcagccacctggatcccatggactccatctagacgaaaggggagcacatggacgggcacctggaataggtcgcaacaataaccagcggaggcgctctcgtggcggccggtagcggaatgtggtggcgccaaatagtgcgcccttgtcgatgacgaggggagtgccttccctaccgccgctgccgtagagttgaagttcgtcgcccgcgggacacgtaccatgctcgcacttggtgacttggagatagcggcccggtgacgctgctgatggccgtccgacagggcgaggtcgcgcccccgtgtgccgaggtcaaccgtcaccaaggctgcctcgagcatccgctggcgcatctcccgcactctctgtcgtgcaaggaagccacgagcaacaacttgtatgcccacagccgccgacgtctggagacgtgcggacaacgccaactggtggtgcccatgttgcactgctgccttgatttgcagcagcccttgcttaaccttctggagcgtggcttgcatctttgcgagatcagcccttatgttggtccacaagtcgcccgtcgatggagctggtgattgctgagtcgtggctgcccctagtggcgttgcccatggggacggacacgccgtcaacgaagatgatgtgacgaaatttggcgttgttcctggggatgggcgcgccaacgtccaggacgtggtgacaaaattggcaggtgatggtgcccatggagatagggacgccggttgccaagatggtgtgacgaaggtggcatgtggcgcaacccatagagatggcgacgtcggttgccaggacggcgtgatgaaggtgacatgcggcgcagtccatggagatggggacgccggttgccaggatgacaccacgaaattggcagcagaagccataggatcagatcgaaacccaaggtagccaataccagatgttatggtcgttagatcgatgagggattggagaggggtatcgatgggcaggaacaccggccgggggcctctgcccacagtaaattttatgttcagcagaaggatggctacatttaatgttatgttcattagagtgatggctactacttcaaacatcaggtccaaaaagtttgaatgtgcatgggcagcttatgaactttgaaaaacaaggacctccttgcatgatgtaggaatgtaaagtcacatgctttgggctgaagggtgtaaaaatgttgctcccaaatgaaccacaatatgacgagacattttgccagctacatccactacactggatgagtaaaagatctgattttctttatcttgaggtggtatcccggatatgatctgcttgcagacaaccaaaaagggtgatgttggggatggacaagagatcttagtacgagtgcattcggagtgcctaactggggacatatttggatcagcgagatgcgattatgggaattaacttgctctggcaatgaccatgattgagaaaactggccggggtgtagtagtctatcttcgtggccatgagggtaggggtattgggctgggtcacaagcttcaagcatacaacttacaagatgatgggcgcgatactgtcgaggcaaacttggagctagggctgcctgctgactcgcgggagtacggtataggtgcacagatattacgccatcttggtgccaggaccatgcggctgatgactaacaaccctgccaagtacactggactcaagggctatggtttaagtgtccttggtagagtgccattgctaacaccgataaccaccgagaataggcgctatatggaaacaaagcgattgaagatggggcatgtttatggaagccgctccagtaatcatgcaaacggcagtggcttggctggtgctggcgagagagaggagcaggatcagaatgacagtgctggcgtgcaagagcgaactccagaagcttgagtgcctaactctgcgttccttagagctgctccaatgggagtcttaaaaagagatgcatcttaaaatatagggctccatggcaaaaaaatcactccaacggggacctcattttacaaaaactcaggaaacaaatttgggctccggtctcattggtcccaaatgtaggacttgaaactatcggccctattctcgttcccacgcccccacgaccttcggtcttttcctgttgcattcgttctcaagccgtctctcccacaaaccaaaccctctgcctgtcgagaagcattggcgagatggatggacggccaccgccttttcctcgttcacggccaacaggttggcctcgttgaacttccatggagatggcactagatgtgatagggagatcatcagctgtgtcttctccgccagatttgcgcaggcctcctgtggccgtggctgcagagcgaaggcctgcaagtatgtctgcaacttcccaacagacacaaggacaagcgtcttggcatcgaatcgctgcagaccatgccgatcggagtttatcagtggcaccgatgatgtatcaagatccattgtcaatgattgatgactatagaacctgaagatgtatttgcctgccaagaaaatatggagagcgaaaatgaggtcatggagtcaccaccattgaatgattcaaattcacagtcaaaaccaaagggtcgatccaagaattttaatgaagctgaagacattttgttgatgtcagcttatcttaacatacgtaaagatgcaattactggaagggatcaataagaaggcaacttttgggaaagagttgagaagtactttaacgttaacaggacatttgagtcagatcgtaactggtcatcgttgaagcatcggtggggtataattcacaaataagttagtagtttccaaggtttccatgacagtatcgaaaggaaaaatgaaagtgggaagacaagtgatgataagctggctgaagcaaatgtaatgttccatcaatttaaaaataaggccttttctttgttccatgcgtggaacattctcagacatgagccaaagtgggctgaagataaaacatctaatgaagggaatgcaaatggggacagtcatcccaatgctcaaagacctgcaggaaggaaagctgaaaaggaaaagatgaaagcaaaaaggcgcaacagtgatgaagagtctgatcctttcattgaagaggtaaaaaaatttgagagaatcgagagagaaaactgagagcgaacgaaaggagcgtgatgaaagatactttgagctgcataagaaaaaagtagacttggagcaagaccagcatgacaagttgataatggcacttgagtcttgacacgagcacaatggatgaccaaggaaaacagtattttcagttgatgaaagaagatattttagctcgacgctttgggagtaggcagccatagttatttagtttttaatactttagacttttttccattcaaaacagattatcttgatgttcatgtaatgtaagaacatattttcattcaaagcagattatcttgatgtttgcaacaatctgtgttgacattgttttctggttactgtaaaagttgagttgaaattttgcttctgaaa

SEQ ID NO: 3179 - DNA, 3687 bp, Zea Mays
cttctcttcctcctacccacccaccgccccactccaccttttccttccccgccggccgccgcgcagcgcgagcggagtcgccctctccagtagagtaggagtgacgtctctacctatccacctcagccccctcttttcattccccacccgcgccgcgcgagcggagtttcgcagcacgctgcggctcgcttcgccagaattcctggcgagggtacagaattccgcatcgaaacggaagggttccgctcaccgagaaaattggcctcaatcgcgcgtccgtcctcagcgtcgatgccaaggagggaacaacaactggggtttcagcaaaggattggacaaacacaatattggcacttgtgtctcctaattccaaaccggaggacttcaaccgcccagctgggttacctccttttgcagttctttgtgaaattgttgatgatgatgatggctccatggctttgttaccaaaactgcaacaatttgcaaagagggagaacctgaagataatatcaattgcagacctgataagcgaggggggcaccgacacgaagccacgagatggtttggagagaaacagttgaagcatctcccgcggaggttcacactggtccctctccgcgccgaagcacaacgagactgctttctgctcttcaccacctgccagccatcctcctgaagaccccaggaatgtaaagtcacatgctttgggctgaagggtgtaaaaatgttgctcccaaatgaaccacaatatgacgagacattttgccagctacatccactacactggatgagtaaaagatctgattttctttatcttgaggtggtatcccggatatgatctgcttgcagacaaccaaaaaggcaaaaacatctcctttgttttcgaatttagtctagtgattgtctaaatgataaacatgtttcccccagcaatatgtttggaattttagaatggttcttttcactcatgcagggtgatgttggggatggacaagagatcttagtacgagtgcattcggagtgcctaactggggacatatttggatcagcgagatgcgattatgggaattaacttgctctggcaatgaccatgattgagaaaactggccggggtgtagtagtctatcttcgtggccatgagggtaggggtattgggctgggtcacaagcttcaagcatacaacttacaagatgatgggcgcgatactgtcgaggcaaacttggagctagggctgcctgctgactcgcgggagtacggtataggtgcacagatattacgccatcttggtgccaggaccatgcggctgatgactaacaaccctgccaagtacactggactcaagggctatggtttaagtgtccttggtagagtgccattgctaacaccgataaccaccgagaataggcgctatatggaaacaaagcgattgaagatggggcatgtttatggaagccgctccagtaatcatgcaaacggcagtggcttggctggtgctggcgagagagaggagcaggatcagaatgacagtgctggcgtgcaagagcgaactccagaagcttgagtgcctaactctgcgttccttagagctgctccaatgggagtcttaaaaagagatgcatcttaaaatatagggctccatggcaaaaaaatcactccaacggggacctcattttacaaaaactcaggaaacaaatttgggctccggtctcattggtcccaaatgtaggacttgaaactatcggccctattctcgttcccacgcccccacgaccttcggtcttttcctgttgcattcgttctcaagccgtctctcccacaaaccaaaccctctgcctgtcgagaagcattggcgagatggatggacggccaccgccttttcctcgttcacggccaacaggttggcctcgttgaacttccatggagatggcactagatgtgatagggagatcatcagctgtgtcttctccgccagatttgcgcaggcctcctgtggccgtggctgcagagcgaaggcctgcaagtatgtctgcaacttcccaacagacacaaggacaagcgtcttggcatcgaatcgctgcagaccatgccgatcggagtttatcagtggcaccgatgatgtatcaagatccattgtcaatgattgatgactataggtaataacctttctgttgagattagtagtcgattatatttgctcatgaattcaatcgatggtgatctgggatctccatggttgagaaattgaagtcaaggcctggtgaggttacttgtactggtaggtgctgatagatgtagtgctcaccgatgcttgtgaattgaattattggttctgaaaatatcctcacttcaaccatgcatacgagattatgagtaaatgtgaattccatacactctgttgccccagtccaatacaaccttgctgaaccttgcatatttgtgtgagcaggtacatttttgggagtctctttaatgtttttcttgtttggtctcataattagtggagtacttcaacttatgtgcattattatatcaatttgattaccaaactttattgtgtatagcgtcaaagctgttttgaatgtcttgtgtttgtgtatatttcattctaattccataaccagagtctgctcatatttttacactactctattgaaccaagaacctgaagatgtatttgcctgccaagaaaatatggagagcgaaaatgaggtcatggagtcaccaccattgaatgattcaaattcacagtcaaaaccaaagggtcgatccaagaattttaatgaagctgaagacattttgttgatgtcagcttatcttaacatacgtaaagatgcaattactggaagggatcaataagaaggcaacttttgggaaagagttgagaagtactttaacgttaacaggacatttgagtcagatcgtaactggtcatcgttgaagcatcggtggggtataattcacaaataagttagtagtttccaaggtttccatgacagtatcgaaaggaaaaatgaaagtgggaagacaagtgatgataagctggctgaagcaaatgtaatgttccatcaatttaaaaataaggccttttctttgttccatgcgtggaacattctcagacatgagccaaagtgggctgaagataaaacatctaatgaagggaatgcaaatggggacagtcatcccaatgctcaaagacctgcaggaaggaaagctgaaaaggaaaagatgaaagcaaaaaggcgcaacagtgatgaagagtctgatcctttcattgaagaggtaaaaaaatttgagagaatcgagagagaaaactgagagcgaacgaaaggagcgtgatgaaagatactttgagctgcataagaaaaaagtagacttggagcaagaccagcatgacaagttgataatggcacttgagtcttgacacgagcacaatggatgaccaaggaaaacagtattttcagttgatgaaagaagatattttagctcgacgctttgggagtaggcagccatagttatttagtttttaatactttagacttttttccattcaaaacagattatcttgatgttcatgtaatgtaagaacatattttcattcaaagcagattatcttgatgtttgcaacaatctgtgttgacattgttttctggttactgtaaaagttgagttgaaattttgcttctgaaa

SEQ ID NO: 3180 - DNA, 3384 bp, Zea Mays
ctcttcctcctacccacccaccgccccactccaccttttccttccccgccggccgccgcgcagcgcgagcggagtcgccctctccagtagagtaggagtgacgtctctacctatccacctcagccccctcttttcattccccacccgcgccgcgcgagcggagtttcgcagcacgctgcggctcgcttcgccagaattcctggcgagggtacagaattccgcatcgaaacggaagggttccgctcaccgagaaaattggcctcaatcgcgcgtccgtcctcagcgtcgtgcgttcggatgccaaggagggaacaacaactggggtttcagcaaaggattggacaaacacaatattggcacttgtgtctcctaattccaaaccggaggacttcaaccgcccagttctttgtgaaattgttgatgatgatgatggctccatggctttgttaccaaaactgcaacaatttgcaaagagggagaacctgaagataatatcaattgcagacctgataagcgaggggggcaccgacacgaagccacgagatggtttggagagaaacagttgaagcatctcccgcggaggttcacactggtccctctccgcgccgaagcacaacgagactgctttctgctcttcaccacctgccagccatcctcctgaagaccccagggtgatgttggggatggacaagagatcttagtacgagtgcattcggagtgcctaactggggacatatttggatcagcgagatgcgattatgggaattaacttgctctggcaatgaccatgattgagaaaactggccggggtgtagtagtctatcttcgtggccatgagggtaggggtattgggctgggtcacaagcttcaagcatacaacttacaagatgatgggcgcgatactgtcgaggcaaacttggagctagggctgcctgctgactcgcgggagtacggtataggtgcacagatattacgccatcttggtgccaggaccatgcggctgatgactaacaaccctgccaagtacactggactcaagggctatggtttaagtgtccttggtagagtgccattgctaacaccgataaccaccgagaataggcgctatatggaaacaaagcgattgaagatggggcatgtttatggaagccgctccagtaatcatgcaaacggcagtggcttggctggtgctggcgagagagaggagcaggatcagaatgacagtgctggcgtgcaagagcgaactccagaagcttgagtgcctaactctgcgttccttagagctgctccaatgggagtcttaaaaagagatgcatcttaaaatatagggctccatggcaaaaaaatcactccaacggggacctcattttacaaaaactcaggaaacaaatttgggctccggtctcattggtcccaaatgtaggacttgaaactatcggccctattctcgttcccacgcccccacgaccttcggtcttttcctgttgcattcgttctcaagccgtctctcccacaaaccaaaccctctgcctgtcgagaagcattggcgagatggatggacggccaccgccttttcctcgttcacggccaacaggttggcctcgttgaacttccatggagatggcactagatgtgatagggagatcatcagctgtgtcttctccgccagatttgcgcaggcctcctgtggccgtggctgcagagcgaaggcctgcaagtatgtctgcaacttcccaacagacacaaggacaagcgtcttggcatcgaatcgctgcagaccatgccgatcggagtttatcagtggcaccgatgatgtatcaagatccattgtcaatgattgatgactataggtaataacctttctgttgagattagtagtcgattatatttgctcatgaattcaatcgatggtgatctgggatctccatggttgagaaattgaagtcaaggcctggtgaggttacttgtactggtaggtgctgatagatgtagtgctcaccgatgcttgtgaattgaattattggttctgaaaatatcctcacttcaaccatgcatacgagattatgagtaaatgtgaattccatacactctgttgccccagtccaatacaaccttgctgaaccttgcatatttgtgtgagcaggtacatttttgggagtctctttaatgtttttcttgtttggtctcataattagtggagtacttcaacttatgtgcattattatatcaatttgattaccaaactttattgtgtatagcgtcaaagctgttttgaatgtcttgtgtttgtgtatatttcattctaattccataaccagagtctgctcatatttttacactactctattgaaccaagaacctgaagatgtatttgcctgccaagaaaatatggagagcgaaaatgaggtcatggagtcaccaccattgaatgattcaaattcacagtcaaaaccaaagggtcgatccaagaattttaatgaagctgaagacattttgttgatgtcagcttatcttaacatacgtaaagatgcaattactggaagggatcaataagaaggcaacttttgggaaagagttgagaagtactttaacgttaacaggacatttgagtcagatcgtaactggtcatcgttgaagcatcggtggggtataattcacaaataagttagtagtttccaaggtttccatgacagtatcgaaaggaaaaatgaaagtgggaagacaagtgatgataagctggctgaagcaaatgtaatgttccatcaatttaaaaataaggccttttctttgttccatgcgtggaacattctcagacatgagccaaagtgggctgaagataaaacatctaatgaagggaatgcaaatggggacagtcatcccaatgctcaaagacctgcaggaaggaaagctgaaaaggaaaagatgaaagcaaaaaggcgcaacagtgatgaagagtctgatcctttcattgaagaggtaaaaaaatttgagagaatcgagagagaaaactgagagcgaacgaaaggagcgtgatgaaagatactttgagctgcataagaaaaaagtagacttggagcaagaccagcatgacaagttgataatggcacttgagtcttgacacgagcacaatggatgaccaaggaaaacagtattttcagttgatgaaagaagatattttagctcgacgctttgggagtaggcagccatagttatttagtttttaatactttagacttttttccattcaaaacagattatcttgatgttcatgtaatgtaagaacatattttcattcaaagcagattatcttgatgtttgcaacaatctgtgttgacattgttttctggttactgtaaaagttgagttgaaattttgcttctgaaa

SEQ ID NO: 3181 - DNA, 3405 bp, Zea Mays
ctcttcctcctacccacccaccgccccactccaccttttccttccccgccggccgccgcgcagcgcgagcggagtcgccctctccagtagagtaggagtgacgtctctacctatccacctcagccccctcttttcattccccacccgcgccgcgcgagcggagtttcgcagcacgctgcggctcgcttcgccagaattcctggcgagggtacagaattccgcatcgaaacggaagggttccgctcaccgagaaaattggcctcaatcgcgcgtccgtcctcagcgtcgtgcgttcggatgccaaggagggaacaacaactggggtttcagcaaaggattggacaaacacaatattggcacttgtgtctcctaattccaaaccggaggacttcaaccgcccagctgggttacctccttttgcagttctttgtgaaattgttgatgatgatgatggctccatggctttgttaccaaaactgcaacaatttgcaaagagggagaacctgaagataatatcaattgcagacctgataagcgaggggggcaccgacacgaagccacgagatggtttggagagaaacagttgaagcatctcccgcggaggttcacactggtccctctccgcgccgaagcacaacgagactgctttctgctcttcaccacctgccagccatcctcctgaagaccccagggtgatgttggggatggacaagagatcttagtacgagtgcattcggagtgcctaactggggacatatttggatcagcgagatgcgattatgggaattaacttgctctggcaatgaccatgattgagaaaactggccggggtgtagtagtctatcttcgtggccatgagggtaggggtattgggctgggtcacaagcttcaagcatacaacttacaagatgatgggcgcgatactgtcgaggcaaacttggagctagggctgcctgctgactcgcgggagtacggtataggtgcacagatattacgccatcttggtgccaggaccatgcggctgatgactaacaaccctgccaagtacactggactcaagggctatggtttaagtgtccttggtagagtgccattgctaacaccgataaccaccgagaataggcgctatatggaaacaaagcgattgaagatggggcatgtttatggaagccgctccagtaatcatgcaaacggcagtggcttggctggtgctggcgagagagaggagcaggatcagaatgacagtgctggcgtgcaagagcgaactccagaagcttgagtgcctaactctgcgttccttagagctgctccaatgggagtcttaaaaagagatgcatcttaaaatatagggctccatggcaaaaaaatcactccaacggggacctcattttacaaaaactcaggaaacaaatttgggctccggtctcattggtcccaaatgtaggacttgaaactatcggccctattctcgttcccacgcccccacgaccttcggtcttttcctgttgcattcgttctcaagccgtctctcccacaaaccaaaccctctgcctgtcgagaagcattggcgagatggatggacggccaccgccttttcctcgttcacggccaacaggttggcctcgttgaacttccatggagatggcactagatgtgatagggagatcatcagctgtgtcttctccgccagatttgcgcaggcctcctgtggccgtggctgcagagcgaaggcctgcaagtatgtctgcaacttcccaacagacacaaggacaagcgtcttggcatcgaatcgctgcagaccatgccgatcggagtttatcagtggcaccgatgatgtatcaagatccattgtcaatgattgatgactataggtaataacctttctgttgagattagtagtcgattatatttgctcatgaattcaatcgatggtgatctgggatctccatggttgagaaattgaagtcaaggcctggtgaggttacttgtactggtaggtgctgatagatgtagtgctcaccgatgcttgtgaattgaattattggttctgaaaatatcctcacttcaaccatgcatacgagattatgagtaaatgtgaattccatacactctgttgccccagtccaatacaaccttgctgaaccttgcatatttgtgtgagcaggtacatttttgggagtctctttaatgtttttcttgtttggtctcataattagtggagtacttcaacttatgtgcattattatatcaatttgattaccaaactttattgtgtatagcgtcaaagctgttttgaatgtcttgtgtttgtgtatatttcattctaattccataaccagagtctgctcatatttttacactactctattgaaccaagaacctgaagatgtatttgcctgccaagaaaatatggagagcgaaaatgaggtcatggagtcaccaccattgaatgattcaaattcacagtcaaaaccaaagggtcgatccaagaattttaatgaagctgaagacattttgttgatgtcagcttatcttaacatacgtaaagatgcaattactggaagggatcaataagaaggcaacttttgggaaagagttgagaagtactttaacgttaacaggacatttgagtcagatcgtaactggtcatcgttgaagcatcggtggggtataattcacaaataagttagtagtttccaaggtttccatgacagtatcgaaaggaaaaatgaaagtgggaagacaagtgatgataagctggctgaagcaaatgtaatgttccatcaatttaaaaataaggccttttctttgttccatgcgtggaacattctcagacatgagccaaagtgggctgaagataaaacatctaatgaagggaatgcaaatggggacagtcatcccaatgctcaaagacctgcaggaaggaaagctgaaaaggaaaagatgaaagcaaaaaggcgcaacagtgatgaagagtctgatcctttcattgaagaggtaaaaaaatttgagagaatcgagagagaaaactgagagcgaacgaaaggagcgtgatgaaagatactttgagctgcataagaaaaaagtagacttggagcaagaccagcatgacaagttgataatggcacttgagtcttgacacgagcacaatggatgaccaaggaaaacagtattttcagttgatgaaagaagatattttagctcgacgctttgggagtaggcagccatagttatttagtttttaatactttagacttttttccattcaaaacagattatcttgatgttcatgtaatgtaagaacatattttcattcaaagcagattatcttgatgtttgcaacaatctgtgttgacattgttttctggttactgtaaaagttgagttgaaattttgcttctgaaa

SEQ ID NO: 3182 - DNA, 2872 bp, Zea Mays
ctcctacccacccaccgccccactccaccttttccttccccgccggccgccgcgcagcgcgagcggagtcgccctctccagtagagtaggagtgacgtctctacctatccacctcagccccctcttttcattccccacccgcgccgcgcgagcggagtttcgcagcacgctgcggctcgcttcgccagaattcctggcgagggtacagaattccgcatcgaaacggaagggttccgctcaccgagaaaattggcctcaatcgcgcgtccgtcctcagcgtcgtgcgttcggatgccaaggagggaacaacaactggggtttcagcaaaggattggacaaacacaatattggcacttgtgtctcctaattccaaaccggaggacttcaaccgcccagttctttgtgaaattgttgatgatgatgatggctccatggctttgttaccaaaactgcaacaatttgcaaagagggagaacctgaagataatatcaattgcagacctgataagcgaggggggcaccgacacgaagccacgagatggtttggagagaaacagttgaagcatctcccgcggaggttcacactggtccctctccgcgccgaagcacaacgagactgctttctgctcttcaccacctgccagccatcctcctgaagaccccagggtgatgttggggatggacaagagatcttagtacgagtgcattcggagtgcctaactggggacatatttggatcagcgagatgcgattatgggaattaacttgctctggcaatgaccatgattgagaaaactggccggggtgtagtagtctatcttcgtggccatgagggtaggggtattgggctgggtcacaagcttcaagcatacaacttacaagatgatgggcgcgatactgtcgaggcaaacttggagctagggctgcctgctgactcgcgggagtacggtataggtgcacagatattacgccatcttggtgccaggaccatgcggctgatgactaacaaccctgccaagtacactggactcaagggctatggtttaagtgtccttggtagagtgccattgctaacaccgataaccaccgagaataggcgctatatggaaacaaagcgattgaagatggggcatgtttatggaagccgctccagtaatcatgcaaacggcagtggcttggctggtgctggcgagagagaggagcaggatcagaatgacagtgctggcgtgcaagagcgaactccagaagcttgagtgcctaactctgcgttccttagagctgctccaatgggagtcttaaaaagagatgcatcttaaaatatagggctccatggcaaaaaaatcactccaacggggacctcattttacaaaaactcaggaaacaaatttgggctccggtctcattggtcccaaatgtaggacttgaaactatcggccctattctcgttcccacgcccccacgaccttcggtcttttcctgttgcattcgttctcaagccgtctctcccacaaaccaaaccctctgcctgtcgagaagcattggcgagatggatggacggccaccgccttttcctcgttcacggccaacaggttggcctcgttgaacttccatggagatggcactagatgtgatagggagatcatcagctgtgtcttctccgccagatttgcgcaggcctcctgtggccgtggctgcagagcgaaggcctgcaagtatgtctgcaacttcccaacagacacaaggacaagcgtcttggcatcgaatcgctgcagaccatgccgatcggagtttatcagtggcaccgatgatgtatcaagatccattgtcaatgattgatgactatagaacctgaagatgtatttgcctgccaagaaaatatggagagcgaaaatgaggtcatggagtcaccaccattgaatgattcaaattcacagtcaaaaccaaagggtcgatccaagaattttaatgaagctgaagacattttgttgatgtcagcttatcttaacatacgtaaagatgcaattactggaagggatcaataagaaggcaacttttgggaaagagttgagaagtactttaacgttaacaggacatttgagtcagatcgtaactggtcatcgttgaagcatcggtggggtataattcacaaataagttagtagtttccaaggtttccatgacagtatcgaaaggaaaaatgaaagtgggaagacaagtgatgataagctggctgaagcaaatgtaatgttccatcaatttaaaaataaggccttttctttgttccatgcgtggaacattctcagacatgagccaaagtgggctgaagataaaacatctaatgaagggaatgcaaatggggacagtcatcccaatgctcaaagacctgcaggaaggaaagctgaaaaggaaaagatgaaagcaaaaaggcgcaacagtgatgaagagtctgatcctttcattgaagaggtaaaaaaatttgagagaatcgagagagaaaactgagagcgaacgaaaggagcgtgatgaaagatactttgagctgcataagaaaaaagtagacttggagcaagaccagcatgacaagttgataatggcacttgagtcttgacacgagcacaatggatgaccaaggaaaacagtattttcagttgatgaaagaagatattttagctcgacgctttgggagtaggcagccatagttatttagtttttaatactttagacttttttccattcaaaacagattatcttgatgttcatgtaatgtaagaacatattttcattcaaagcagattatcttgatgtttgcaacaatctgtgttgacattgttttctggttactgtaaaagttgagttgaaattttgcttctgaaa

SEQ ID NO: 3183 - DNA, 2910 bp, Zea Mays
caccgccccactccaccttttccttccccgccggccgccgcgcagcgcgagcggagtcgccctctccagtagagtaggagtgacgtctctacctatccacctcagccccctcttttcattccccacccgcgccgcgcgagcggagtttcgcagcacgctgcggctcgcttcgccagaattcctggcgagggtacagaattccgcatcgaaacggaagggttccgctcaccgagaaaattggcctcaatcgcgcgtccgtcctcagcgtcgatgccaaggagggaacaacaactggggtttcagcaaaggattggacaaacacaatattggcacttgtgtctcctaattccaaaccggaggacttcaaccgcccagctgggttacctccttttgcagttctttgtgaaattgttgatgatgatgatggctccatggctttgttaccaaaactgcaacaatttgcaaagagggagaacctgaagataatatcaattgcagacctgataagcgaggggggcaccgacacgaagccacgagatggtttggagagaaacagttgaagcatctcccgcggaggttcacactggtccctctccgcgccgaagcacaacgagactgctttctgctcttcaccacctgccagccatcctcctgaagaccccagggtgatgttggggatggacaagagatcttagtacgagtgcattcggagtgcctaactggggacatatttggatcagcgagatgcgattatgggaattaacttgctctggcaatgaccatgattgagaaaactggccggggtgtagtagtctatcttcgtggccatgagggtaggggtattgggctgggtcacaagcttcaagcatacaacttacaagatgatgggcgcgatactgtcgaggcaaacttggagctagggctgcctgctgactcgcgggagtacggtataggtgcacagatattacgccatcttggtgccaggaccatgcggctgatgactaacaaccctgccaagtacactggactcaagggctatggtttaagtgtccttggtagagtgccattgctaacaccgataaccaccgagaataggcgctatatggaaacaaagcgattgaagatggggcatgtttatggaagccgctccagtaatcatgcaaacggcagtggcttggctggtgctggcgagagagaggagcaggatcagaatgacagtgctggcgtgcaagagcgaactccagaagcttgagtgcctaactctgcgttccttagagctgctccaatgggagtcttaaaaagagatgcatcttaaaatatagggctccatggcaaaaaaatcactccaacggggacctcattttacaaaaactcaggaaacaaatttgggctccggtctcattggtcccaaatgtaggacttgaaactatcggccctattctcgttcccacgcccccacgaccttcggtcttttcctgttgcattcgttctcaagccgtctctcccacaaaccaaaccctctgcctgtcgagaagcattggcgagatggatggacggccaccgccttttcctcgttcacggccaacaggttggcctcgttgaacttccatggagatggcactagatgtgatagggagatcatcagctgtgtcttctccgccagatttgcgcaggcctcctgtggccgtggctgcagagcgaaggcctgcaagtatgtctgcaacttcccaacagacacaaggacaagcgtcttggcatcgaatcgctgcagaccatgccgatcggagtttatcagtggcaccgatgatgtatcaagatccattgtcaatgattgatgactatagagtctgctcatatttttacactactctattgaaccaagaacctgaagatgtatttgcctgccaagaaaatatggagagcgaaaatgaggtcatggagtcaccaccattgaatgattcaaattcacagtcaaaaccaaagggtcgatccaagaattttaatgaagctgaagacattttgttgatgtcagcttatcttaacatacgtaaagatgcaattactggaagggatcaataagaaggcaacttttgggaaagagttgagaagtactttaacgttaacaggacatttgagtcagatcgtaactggtcatcgttgaagcatcggtggggtataattcacaaataagttagtagtttccaaggtttccatgacagtatcgaaaggaaaaatgaaagtgggaagacaagtgatgataagctggctgaagcaaatgtaatgttccatcaatttaaaaataaggccttttctttgttccatgcgtggaacattctcagacatgagccaaagtgggctgaagataaaacatctaatgaagggaatgcaaatggggacagtcatcccaatgctcaaagacctgcaggaaggaaagctgaaaaggaaaagatgaaagcaaaaaggcgcaacagtgatgaagagtctgatcctttcattgaagaggtaaaaaaatttgagagaatcgagagagaaaactgagagcgaacgaaaggagcgtgatgaaagatactttgagctgcataagaaaaaagtagacttggagcaagaccagcatgacaagttgataatggcacttgagtcttgacacgagcacaatggatgaccaaggaaaacagtattttcagttgatgaaagaagatattttagctcgacgctttgggagtaggcagccatagttatttagtttttaatactttagacttttttccattcaaaacagattatcttgatgttcatgtaatgtaagaacatattttcattcaaagcagattatcttgatgtttgcaacaatctgtgttgacattgttttctggttactgtaaaagttgagttgaaattttgcttctgaaa

SEQ ID NO: 3184 - DNA, 2872 bp, Zea Mays
caccgccccactccaccttttccttccccgccggccgccgcgcagcgcgagcggagtcgccctctccagtagagtaggagtgacgtctctacctatccacctcagccccctcttttcattccccacccgcgccgcgcgagcggagtttcgcagcacgctgcggctcgcttcgccagaattcctggcgagggtacagaattccgcatcgaaacggaagggttccgctcaccgagaaaattggcctcaatcgcgcgtccgtcctcagcgtcgatgccaaggagggaacaacaactggggtttcagcaaaggattggacaaacacaatattggcacttgtgtctcctaattccaaaccggaggacttcaaccgcccagctgggttacctccttttgcagttctttgtgaaattgttgatgatgatgatggctccatggctttgttaccaaaactgcaacaatttgcaaagagggagaacctgaagataatatcaattgcagacctgataagcgaggggggcaccgacacgaagccacgagatggtttggagagaaacagttgaagcatctcccgcggaggttcacactggtccctctccgcgccgaagcacaacgagactgctttctgctcttcaccacctgccagccatcctcctgaagaccccagggtgatgttggggatggacaagagatcttagtacgagtgcattcggagtgcctaactggggacatatttggatcagcgagatgcgattatgggaattaacttgctctggcaatgaccatgattgagaaaactggccggggtgtagtagtctatcttcgtggccatgagggtaggggtattgggctgggtcacaagcttcaagcatacaacttacaagatgatgggcgcgatactgtcgaggcaaacttggagctagggctgcctgctgactcgcgggagtacggtataggtgcacagatattacgccatcttggtgccaggaccatgcggctgatgactaacaaccctgccaagtacactggactcaagggctatggtttaagtgtccttggtagagtgccattgctaacaccgataaccaccgagaataggcgctatatggaaacaaagcgattgaagatggggcatgtttatggaagccgctccagtaatcatgcaaacggcagtggcttggctggtgctggcgagagagaggagcaggatcagaatgacagtgctggcgtgcaagagcgaactccagaagcttgagtgcctaactctgcgttccttagagctgctccaatgggagtcttaaaaagagatgcatcttaaaatatagggctccatggcaaaaaaatcactccaacggggacctcattttacaaaaactcaggaaacaaatttgggctccggtctcattggtcccaaatgtaggacttgaaactatcggccctattctcgttcccacgcccccacgaccttcggtcttttcctgttgcattcgttctcaagccgtctctcccacaaaccaaaccctctgcctgtcgagaagcattggcgagatggatggacggccaccgccttttcctcgttcacggccaacaggttggcctcgttgaacttccatggagatggcactagatgtgatagggagatcatcagctgtgtcttctccgccagatttgcgcaggcctcctgtggccgtggctgcagagcgaaggcctgcaagtatgtctgcaacttcccaacagacacaaggacaagcgtcttggcatcgaatcgctgcagaccatgccgatcggagtttatcagtggcaccgatgatgtatcaagatccattgtcaatgattgatgactatagaacctgaagatgtatttgcctgccaagaaaatatggagagcgaaaatgaggtcatggagtcaccaccattgaatgattcaaattcacagtcaaaaccaaagggtcgatccaagaattttaatgaagctgaagacattttgttgatgtcagcttatcttaacatacgtaaagatgcaattactggaagggatcaataagaaggcaacttttgggaaagagttgagaagtactttaacgttaacaggacatttgagtcagatcgtaactggtcatcgttgaagcatcggtggggtataattcacaaataagttagtagtttccaaggtttccatgacagtatcgaaaggaaaaatgaaagtgggaagacaagtgatgataagctggctgaagcaaatgtaatgttccatcaatttaaaaataaggccttttctttgttccatgcgtggaacattctcagacatgagccaaagtgggctgaagataaaacatctaatgaagggaatgcaaatggggacagtcatcccaatgctcaaagacctgcaggaaggaaagctgaaaaggaaaagatgaaagcaaaaaggcgcaacagtgatgaagagtctgatcctttcattgaagaggtaaaaaaatttgagagaatcgagagagaaaactgagagcgaacgaaaggagcgtgatgaaagatactttgagctgcataagaaaaaagtagacttggagcaagaccagcatgacaagttgataatggcacttgagtcttgacacgagcacaatggatgaccaaggaaaacagtattttcagttgatgaaagaagatattttagctcgacgctttgggagtaggcagccatagttatttagtttttaatactttagacttttttccattcaaaacagattatcttgatgttcatgtaatgtaagaacatattttcattcaaagcagattatcttgatgtttgcaacaatctgtgttgacattgttttctggttactgtaaaagttgagttgaaattttgcttctgaaa

SEQ ID NO: 3185 - DNA, 1787 bp, Zea Mays
accgccccactccaccttttccttccccgccggccgccgcgcagcgcgagcggagtcgccctctccagtagagtaggagtgacgtctctacctatccacctcagccccctcttttcattccccacccgcgccgcgcgagcggagtttcgcagcacgctgcggctcgcttcgccagaattcctggcgagggtacagaattccgcatcgaaacggaagggttccgctcaccgagaaaattggcctcaatcgcgcgtccgtcctcagcgtcgtgcgttcggatgccaaggagggaacaacaactggggtttcagcaaaggattggacaaacacaatattggcacttgtgtctcctaattccaaaccggaggacttcaaccgcccaggtcatatttttcctcttaaatacagagaaggtggtgtgttaaaaagggctggacatactgaagcatcggtggaccttgctatgttagctgggttacctccttttgcagttctttgtgaaattgttgatgatgatgatggctccatggctttgttaccaaaactgcaacaatttgcaaagagggagaacctgaagataatatcaattgcagacctgataagcgaggggggcaccgacacgaagccacgagatggtttggagagaaacagttgaagcatctcccgcggaggttcacactggtccctctccgcgccgaagcacaacgagactgctttctgctcttcaccacctgccagccatcctcctgaagaccccagaacctgaagatgtatttgcctgccaagaaaatatggagagcgaaaatgaggtcatggagtcaccaccattgaatgattcaaattcacagtcaaaaccaaagggtcgatccaagaattttaatgaagctgaagacattttgttgatgtcagcttatcttaacatacgtaaagatgcaattactggaagggatcaataagaaggcaacttttgggaaagagttgagaagtactttaacgttaacaggacatttgagtcagatcgtaactggtcatcgttgaagcatcggtggggtataattcacaaataagttagtagtttccaaggtttccatgacagtatcgaaaggaaaaatgaaagtgggaagacaagtgatgataagctggctgaagcaaatgtaatgttccatcaatttaaaaataaggccttttctttgttccatgcgtggaacattctcagacatgagccaaagtgggctgaagataaaacatctaatgaagggaatgcaaatggggacagtcatcccaatgctcaaagacctgcaggaaggaaagctgaaaaggaaaagatgaaagcaaaaaggcgcaacagtgatgaagagtctgatcctttcattgaagaggtaaaaaaatttgagagaatcgagagagaaaactgagagcgaacgaaaggagcgtgatgaaagatactttgagctgcataagaaaaaagtagacttggagcaagaccagcatgacaagttgataatggcacttgagtcttgacacgagcacaatggatgaccaaggaaaacagtattttcagttgatgaaagaagatattttagctcgacgctttgggagtaggcagccatagttatttagtttttaatactttagacttttttccattcaaaacagattatcttgatgttcatgtaatgtaagaacatattttcattcaaagcagattatcttgatgtttgcaacaatctgtgttgacattgttttctggttactgtaaaagttgagttgaaattttgcttctgaaa

SEQ ID NO: 3186 - DNA, 5463 bp, Zea Mays
ccgccccactccaccttttccttccccgccggccgccgcgcagcgcgagcggagtcgccctctccagtagagtaggagtgacgtctctacctatccacctcagccccctcttttcattccccacccgcgccgcgcgagcggagtttcgcagcacgctgcggctcgcttcgccagaattcctggcgagggtacagaattccgcatcgaaacggaagggttccgctcaccgagaaaattggcctcaatcgcgcgtccgtcctcagcgtcgatgccaaggagggaacaacaactggggtttcagcaaaggattggacaaacacaatattggcacttgtgtctcctaattccaaaccggaggacttcaaccgcccagctgggttacctccttttgcagttctttgtgaaattgttgatgatgatgatggctccatggctttgttaccaaaactgcaacaatttgcaaagagggagaacctgaagataatatcaattgcagacctgataagcgaggggggcaccgacacgaagccacgagatggtttggagagaaacagttgaagcatctcccgcggaggttcacactggtccctctccgcgccgaagcacaacgagactgctttctgctcttcaccacctgccagccatcctcctgaagaccccaggtgtacttggaaaaaaatgaatgattgtacttggagtcttggatgtgaaatttttttatgatagccttcttgacttcttgcattgtaattctaagctttgaacattcccatttgcagatataggagaaagagagtgttatggtcgttagatcggtgaggaattggagaggggtatcgatgggcaggaacaccagccgggggcctctgcccacgaccgagcaagaggagggtttctcccttctaattcttgcctgctttatttttcatccattgattacataaataggccggctgaccgcccctatctagctagagatccttatctccttaaaactctcctaaaaactctcaacaaactactaactgataacctatctagataatctcaactaatcttctaaataatctcaactaatcttctaatcttatctctaactatccttatctaatcccccttggagggcccatggctgctgctgccgcagcccctccgtggacctccttaggccctgacactacacccctcctggacaagcagctcgtcctcgagctacagcatgacgatgctcaaagaccgagtctacttgactcaaaaccagaaacctagaagacaaaccttttacatctcggcttatcttattattccgaatatgttttttttgaccccataagataaggcggacaccctccgcgcattggacttgcacgtgtgcagccacctggatcccatggactccatctagacgaaaggggagcacatggacgggcacctggaataggtcgcaacaataaccagcggaggcgctctcgtggcggccggtagcggaatgtggtggcgccaaatagtgcgcccttgtcgatgacgaggggagtgccttccctaccgccgctgccgtagagttgaagttcgtcgcccgcgggacacgtaccatgctcgcacttggtgacttggagatagcggcccggtgacgctgctgatggccgtccgacagggcgaggtcgcgcccccgtgtgccgaggtcaaccgtcaccaaggctgcctcgagcatccgctggcgcatctcccgcactctctgtcgtgcaaggaagccacgagcaacaacttgtatgcccacagccgccgacgtctggagacgtgcggacaacgccaactggtggtgcccatgttgcactgctgccttgatttgcagcagcccttgcttaaccttctggagcgtggcttgcatctttgcgagatcagcccttatgttggtccacaagtcgcccgtcgatggagctggtgattgctgagtcgtggctgcccctagtggcgttgcccatggggacggacacgccgtcaacgaagatgatgtgacgaaatttggcgttgttcctggggatgggcgcgccaacgtccaggacgtggtgacaaaattggcaggtgatggtgcccatggagatagggacgccggttgccaagatggtgtgacgaaggtggcatgtggcgcaacccatagagatggcgacgtcggttgccaggacggcgtgatgaaggtgacatgcggcgcagtccatggagatggggacgccggttgccaggatgacaccacgaaattggcagcagaagccataggatcagatcgaaacccaaggtagccaataccagatgttatggtcgttagatcgatgagggattggagaggggtatcgatgggcaggaacaccggccgggggcctctgcccacagtaaattttatgttcagcagaaggatggctacatttaatgttatgttcattagagtgatggctactacttcaaacatcaggtccaaaaagtttgaatgtgcatgggcagcttatgaactttgaaaaacaaggacctccttgcatgatgtaggaatgtaaagtcacatgctttgggctgaagggtgtaaaaatgttgctcccaaatgaaccacaatatgacgagacattttgccagctacatccactacactggatgagtaaaagatctgattttctttatcttgaggtggtatcccggatatgatctgcttgcagacaaccaaaaaggcaaaaacatctcctttgttttcgaatttagtctagtgattgtctaaatgataaacatgtttcccccagcaatatgtttggaattttagaatggttcttttcactcatgcagggtgatgttggggatggacaagagatcttagtacgagtgcattcggagtgcctaactggggacatatttggatcagcgagatgcgattatgggaattaacttgctctggcaatgaccatgattgagaaaactggccggggtgtagtagtctatcttcgtggccatgagggtaggggtattgggctgggtcacaagcttcaagcatacaacttacaagatgatgggcgcgatactgtcgaggcaaacttggagctagggctgcctgctgactcgcgggagtacggtataggtgcacagatattacgccatcttggtgccaggaccatgcggctgatgactaacaaccctgccaagtacactggactcaagggctatggtttaagtgtccttggtagagtgccattgctaacaccgataaccaccgagaataggcgctatatggaaacaaagcgattgaagatggggcatgtttatggaagccgctccagtaatcatgcaaacggcagtggcttggctggtgctggcgagagagaggagcaggatcagaatgacagtgctggcgtgcaagagcgaactccagaagcttgagtgcctaactctgcgttccttagagctgctccaatgggagtcttaaaaagagatgcatcttaaaatatagggctccatggcaaaaaaatcactccaacggggacctcattttacaaaaactcaggaaacaaatttgggctccggtctcattggtcccaaatgtaggacttgaaactatcggccctattctcgttcccacgcccccacgaccttcggtcttttcctgttgcattcgttctcaagccgtctctcccacaaaccaaaccctctgcctgtcgagaagcattggcgagatggatggacggccaccgccttttcctcgttcacggccaacaggttggcctcgttgaacttccatggagatggcactagatgtgatagggagatcatcagctgtgtcttctccgccagatttgcgcaggcctcctgtggccgtggctgcagagcgaaggcctgcaagtatgtctgcaacttcccaacagacacaaggacaagcgtcttggcatcgaatcgctgcagaccatgccgatcggagtttatcagtggcaccgatgatgtatcaagatccattgtcaatgattgatgactataggtaataacctttctgttgagattagtagtcgattatatttgctcatgaattcaatcgatggtgatctgggatctccatggttgagaaattgaagtcaaggcctggtgaggttacttgtactggtaggtgctgatagatgtagtgctcaccgatgcttgtgaattgaattattggttctgaaaatatcctcacttcaaccatgcatacgagattatgagtaaatgtgaattccatacactctgttgccccagtccaatacaaccttgctgaaccttgcatatttgtgtgagcaggtacatttttgggagtctctttaatgtttttcttgtttggtctcataattagtggagtacttcaacttatgtgcattattatatcaatttgattaccaaactttattgtgtatagcgtcaaagctgttttgaatgtcttgtgtttgtgtatatttcattctaattccataaccagagtctgctcatatttttacactactctattgaaccaagaacctgaagatgtatttgcctgccaagaaaatatggagagcgaaaatgaggtcatggagtcaccaccattgaatgattcaaattcacagtcaaaaccaaagggtcgatccaagaattttaatgaagctgaagacattttgttgatgtcagcttatcttaacatacgtaaagatgcaattactggaagggatcaataagaaggcaacttttgggaaagagttgagaagtactttaacgttaacaggacatttgagtcagatcgtaactggtcatcgttgaagcatcggtggggtataattcacaaataagttagtagtttccaaggtttccatgacagtatcgaaaggaaaaatgaaagtgggaagacaagtgatgataagacatgagccaaagtgggctgaagataaaacatctaatgaagggaatgcaaatggggacagtcatcccaatgctcaaagacctgcaggaaggaaagctgaaaaggaaaagatgaaagcaaaaaggcgcaacagtgatgaagagtctgatcctttcattgaagaggtaaaaaaatttgagagaatcgagagagaaaactgagagcgaacgaaaggagcgtgatgaaagatactttgagctgcataagaaaaaagtagacttggagcaagaccagcatgacaagttgataatggcacttgagtcttgacacgagcacaatggatgaccaaggaaaacagtattttcagttgatgaaagaagatattttagctcgacgctttgggagtaggcagccatagttatttagtttttaatactttagacttttttccattcaaaacagattatcttgatgttcatgtaatgtaagaacatattttcattcaaagcagattatcttgatgtttgcaacaatctgtgttgacattgttttctggttactgtaaaagttgagttgaaattttgcttctgaaa

SEQ ID NO: 3187 - DNA, 2849 bp, Zea Mays
ccgccccactccaccttttccttccccgccggccgccgcgcagcgcgagcggagtcgccctctccagtagagtaggagtgacgtctctacctatccacctcagccccctcttttcattccccacccgcgccgcgcgagcggagtttcgcagcacgctgcggctcgcttcgccagaattcctggcgagggtacagaattccgcatcgaaacggaagggttccgctcaccgagaaaattggcctcaatcgcgcgtccgtcctcagcgtcgatgccaaggagggaacaacaactggggtttcagcaaaggattggacaaacacaatattggcacttgtgtctcctaattccaaaccggaggacttcaaccgcccagttctttgtgaaattgttgatgatgatgatggctccatggctttgttaccaaaactgcaacaatttgcaaagagggagaacctgaagataatatcaattgcagacctgataagcgaggggggcaccgacacgaagccacgagatggtttggagagaaacagttgaagcatctcccgcggaggttcacactggtccctctccgcgccgaagcacaacgagactgctttctgctcttcaccacctgccagccatcctcctgaagaccccagggtgatgttggggatggacaagagatcttagtacgagtgcattcggagtgcctaactggggacatatttggatcagcgagatgcgattatgggaattaacttgctctggcaatgaccatgattgagaaaactggccggggtgtagtagtctatcttcgtggccatgagggtaggggtattgggctgggtcacaagcttcaagcatacaacttacaagatgatgggcgcgatactgtcgaggcaaacttggagctagggctgcctgctgactcgcgggagtacggtataggtgcacagatattacgccatcttggtgccaggaccatgcggctgatgactaacaaccctgccaagtacactggactcaagggctatggtttaagtgtccttggtagagtgccattgctaacaccgataaccaccgagaataggcgctatatggaaacaaagcgattgaagatggggcatgtttatggaagccgctccagtaatcatgcaaacggcagtggcttggctggtgctggcgagagagaggagcaggatcagaatgacagtgctggcgtgcaagagcgaactccagaagcttgagtgcctaactctgcgttccttagagctgctccaatgggagtcttaaaaagagatgcatcttaaaatatagggctccatggcaaaaaaatcactccaacggggacctcattttacaaaaactcaggaaacaaatttgggctccggtctcattggtcccaaatgtaggacttgaaactatcggccctattctcgttcccacgcccccacgaccttcggtcttttcctgttgcattcgttctcaagccgtctctcccacaaaccaaaccctctgcctgtcgagaagcattggcgagatggatggacggccaccgccttttcctcgttcacggccaacaggttggcctcgttgaacttccatggagatggcactagatgtgatagggagatcatcagctgtgtcttctccgccagatttgcgcaggcctcctgtggccgtggctgcagagcgaaggcctgcaagtatgtctgcaacttcccaacagacacaaggacaagcgtcttggcatcgaatcgctgcagaccatgccgatcggagtttatcagtggcaccgatgatgtatcaagatccattgtcaatgattgatgactatagaacctgaagatgtatttgcctgccaagaaaatatggagagcgaaaatgaggtcatggagtcaccaccattgaatgattcaaattcacagtcaaaaccaaagggtcgatccaagaattttaatgaagctgaagacattttgttgatgtcagcttatcttaacatacgtaaagatgcaattactggaagggatcaataagaaggcaacttttgggaaagagttgagaagtactttaacgttaacaggacatttgagtcagatcgtaactggtcatcgttgaagcatcggtggggtataattcacaaataagttagtagtttccaaggtttccatgacagtatcgaaaggaaaaatgaaagtgggaagacaagtgatgataagctggctgaagcaaatgtaatgttccatcaatttaaaaataaggccttttctttgttccatgcgtggaacattctcagacatgagccaaagtgggctgaagataaaacatctaatgaagggaatgcaaatggggacagtcatcccaatgctcaaagacctgcaggaaggaaagctgaaaaggaaaagatgaaagcaaaaaggcgcaacagtgatgaagagtctgatcctttcattgaagaggtaaaaaaatttgagagaatcgagagagaaaactgagagcgaacgaaaggagcgtgatgaaagatactttgagctgcataagaaaaaagtagacttggagcaagaccagcatgacaagttgataatggcacttgagtcttgacacgagcacaatggatgaccaaggaaaacagtattttcagttgatgaaagaagatattttagctcgacgctttgggagtaggcagccatagttatttagtttttaatactttagacttttttccattcaaaacagattatcttgatgttcatgtaatgtaagaacatattttcattcaaagcagattatcttgatgtttgcaacaatctgtgttgacattgttttctggttactgtaaaagttgagttgaaattttgcttctgaaa

SEQ ID NO: 3188 - DNA, 3714 bp, Zea Mays
ccgccccactccaccttttccttccccgccggccgccgcgcagcgcgagcggagtcgccctctccagtagagtaggagtgacgtctctacctatccacctcagccccctcttttcattccccacccgcgccgcgcgagcggagtttcgcagcacgctgcggctcgcttcgccagaattcctggcgagggtacagaattccgcatcgaaacggaagggttccgctcaccgagaaaattggcctcaatcgcgcgtccgtcctcagcgtcgatgccaaggagggaacaacaactggggtttcagcaaaggattggacaaacacaatattggcacttgtgtctcctaattccaaaccggaggacttcaaccgcccagttctttgtgaaattgttgatgatgatgatggctccatggctttgttaccaaaactgcaacaatttgcaaagagggagaacctgaagataatatcaattgcagacctgataagcgaggggggcaccgacacgaagccacgagatggtttggagagaaacagttgaagcatctcccgcggaggttcacactggtccctctccgcgccgaagcacaacgagactgctttctgctcttcaccacctgccagccatcctcctgaagaccccaggtccaaaaagtttgaatgtgcatgggcagcttatgaactttgaaaaacaaggacctccttgcatgatgtaggaatgtaaagtcacatgctttgggctgaagggtgtaaaaatgttgctcccaaatgaaccacaatatgacgagacattttgccagctacatccactacactggatgagtaaaagatctgattttctttatcttgaggtggtatcccggatatgatctgcttgcagacaaccaaaaaggcaaaaacatctcctttgttttcgaatttagtctagtgattgtctaaatgataaacatgtttcccccagcaatatgtttggaattttagaatggttcttttcactcatgcagggtgatgttggggatggacaagagatcttagtacgagtgcattcggagtgcctaactggggacatatttggatcagcgagatgcgattatgggaattaacttgctctggcaatgaccatgattgagaaaactggccggggtgtagtagtctatcttcgtggccatgagggtaggggtattgggctgggtcacaagcttcaagcatacaacttacaagatgatgggcgcgatactgtcgaggcaaacttggagctagggctgcctgctgactcgcgggagtacggtataggtgcacagatattacgccatcttggtgccaggaccatgcggctgatgactaacaaccctgccaagtacactggactcaagggctatggtttaagtgtccttggtagagtgccattgctaacaccgataaccaccgagaataggcgctatatggaaacaaagcgattgaagatggggcatgtttatggaagccgctccagtaatcatgcaaacggcagtggcttggctggtgctggcgagagagaggagcaggatcagaatgacagtgctggcgtgcaagagcgaactccagaagcttgagtgcctaactctgcgttccttagagctgctccaatgggagtcttaaaaagagatgcatcttaaaatatagggctccatggcaaaaaaatcactccaacggggacctcattttacaaaaactcaggaaacaaatttgggctccggtctcattggtcccaaatgtaggacttgaaactatcggccctattctcgttcccacgcccccacgaccttcggtcttttcctgttgcattcgttctcaagccgtctctcccacaaaccaaaccctctgcctgtcgagaagcattggcgagatggatggacggccaccgccttttcctcgttcacggccaacaggttggcctcgttgaacttccatggagatggcactagatgtgatagggagatcatcagctgtgtcttctccgccagatttgcgcaggcctcctgtggccgtggctgcagagcgaaggcctgcaagtatgtctgcaacttcccaacagacacaaggacaagcgtcttggcatcgaatcgctgcagaccatgccgatcggagtttatcagtggcaccgatgatgtatcaagatccattgtcaatgattgatgactataggtaataacctttctgttgagattagtagtcgattatatttgctcatgaattcaatcgatggtgatctgggatctccatggttgagaaattgaagtcaaggcctggtgaggttacttgtactggtaggtgctgatagatgtagtgctcaccgatgcttgtgaattgaattattggttctgaaaatatcctcacttcaaccatgcatacgagattatgagtaaatgtgaattccatacactctgttgccccagtccaatacaaccttgctgaaccttgcatatttgtgtgagcaggtacatttttgggagtctctttaatgtttttcttgtttggtctcataattagtggagtacttcaacttatgtgcattattatatcaatttgattaccaaactttattgtgtatagcgtcaaagctgttttgaatgtcttgtgtttgtgtatatttcattctaattccataaccagagtctgctcatatttttacactactctattgaaccaagaacctgaagatgtatttgcctgccaagaaaatatggagagcgaaaatgaggtcatggagtcaccaccattgaatgattcaaattcacagtcaaaaccaaagggtcgatccaagaattttaatgaagctgaagacattttgttgatgtcagcttatcttaacatacgtaaagatgcaattactggaagggatcaataagaaggcaacttttgggaaagagttgagaagtactttaacgttaacaggacatttgagtcagatcgtaactggtcatcgttgaagcatcggtggggtataattcacaaataagttagtagtttccaaggtttccatgacagtatcgaaaggaaaaatgaaagtgggaagacaagtgatgataagctggctgaagcaaatgtaatgttccatcaatttaaaaataaggccttttctttgttccatgcgtggaacattctcagacatgagccaaagtgggctgaagataaaacatctaatgaagggaatgcaaatggggacagtcatcccaatgctcaaagacctgcaggaaggaaagctgaaaaggaaaagatgaaagcaaaaaggcgcaacagtgatgaagagtctgatcctttcattgaagaggtaaaaaaatttgagagaatcgagagagaaaactgagagcgaacgaaaggagcgtgatgaaagatactttgagctgcataagaaaaaagtagacttggagcaagaccagcatgacaagttgataatggcacttgagtcttgacacgagcacaatggatgaccaaggaaaacagtattttcagttgatgaaagaagatattttagctcgacgctttgggagtaggcagccatagttatttagtttttaatactttagacttttttccattcaaaacagattatcttgatgttcatgtaatgtaagaacatattttcattcaaagcagattatcttgatgtttgcaacaatctgtgttgacattgttttctggttactgtaaaagttgagttgaaattttgcttctgaaa

SEQ ID NO: 3189 - DNA, 3307 bp, Zea Mays
ccgccccactccaccttttccttccccgccggccgccgcgcagcgcgagcggagtcgccctctccagtagagtaggagtgacgtctctacctatccacctcagccccctcttttcattccccacccgcgccgcgcgagcggagtttcgcagcacgctgcggctcgcttcgccagaattcctggcgagggtacagaattccgcatcgaaacggaagggttccgctcaccgagaaaattggcctcaatcgcgcgtccgtcctcagcgtcgatgccaaggagggaacaacaactggggtttcagcaaaggattggacaaacacaatattggcacttgtgtctcctaattccaaaccggaggacttcaaccgcccaggtcatatttttcctcttaaatacagagaaggtggtgtgttaaaaagggctggacatactgaagcatcggtggaccttgctatgttagctgggttacctccttttgcagttctttgtgaaattgttgatgatgatgatggctccatggctttgttaccaaaactgcaacaatttgcaaagagggagaacctgaagataatatcaattgcagacctgataagggtgatgttggggatggacaagagatcttagtacgagtgcattcggagtgcctaactggggacatatttggatcagcgagatgcgattatgggaattaacttgctctggcaatgaccatgattgagaaaactggccggggtgtagtagtctatcttcgtggccatgagggtaggggtattgggctgggtcacaagcttcaagcatacaacttacaagatgatgggcgcgatactgtcgaggcaaacttggagctagggctgcctgctgactcgcgggagtacggtataggtgcacagatattacgccatcttggtgccaggaccatgcggctgatgactaacaaccctgccaagtacactggactcaagggctatggtttaagtgtccttggtagagtgccattgctaacaccgataaccaccgagaataggcgctatatggaaacaaagcgattgaagatggggcatgtttatggaagccgctccagtaatcatgcaaacggcagtggcttggctggtgctggcgagagagaggagcaggatcagaatgacagtgctggcgtgcaagagcgaactccagaagcttgagtgcctaactctgcgttccttagagctgctccaatgggagtcttaaaaagagatgcatcttaaaatatagggctccatggcaaaaaaatcactccaacggggacctcattttacaaaaactcaggaaacaaatttgggctccggtctcattggtcccaaatgtaggacttgaaactatcggccctattctcgttcccacgcccccacgaccttcggtcttttcctgttgcattcgttctcaagccgtctctcccacaaaccaaaccctctgcctgtcgagaagcattggcgagatggatggacggccaccgccttttcctcgttcacggccaacaggttggcctcgttgaacttccatggagatggcactagatgtgatagggagatcatcagctgtgtcttctccgccagatttgcgcaggcctcctgtggccgtggctgcagagcgaaggcctgcaagtatgtctgcaacttcccaacagacacaaggacaagcgtcttggcatcgaatcgctgcagaccatgccgatcggagtttatcagtggcaccgatgatgtatcaagatccattgtcaatgattgatgactataggtaataacctttctgttgagattagtagtcgattatatttgctcatgaattcaatcgatggtgatctgggatctccatggttgagaaattgaagtcaaggcctggtgaggttacttgtactggtaggtgctgatagatgtagtgctcaccgatgcttgtgaattgaattattggttctgaaaatatcctcacttcaaccatgcatacgagattatgagtaaatgtgaattccatacactctgttgccccagtccaatacaaccttgctgaaccttgcatatttgtgtgagcaggtacatttttgggagtctctttaatgtttttcttgtttggtctcataattagtggagtacttcaacttatgtgcattattatatcaatttgattaccaaactttattgtgtatagcgtcaaagctgttttgaatgtcttgtgtttgtgtatatttcattctaattccataaccagagtctgctcatatttttacactactctattgaaccaagaacctgaagatgtatttgcctgccaagaaaatatggagagcgaaaatgaggtcatggagtcaccaccattgaatgattcaaattcacagtcaaaaccaaagggtcgatccaagaattttaatgaagctgaagacattttgttgatgtcagcttatcttaacatacgtaaagatgcaattactggaagggatcaataagaaggcaacttttgggaaagagttgagaagtactttaacgttaacaggacatttgagtcagatcgtaactggtcatcgttgaagcatcggtggggtataattcacaaataagttagtagtttccaaggtttccatgacagtatcgaaaggaaaaatgaaagtgggaagacaagtgatgataagctggctgaagcaaatgtaatgttccatcaatttaaaaataaggccttttctttgttccatgcgtggaacattctcagacatgagccaaagtgggctgaagataaaacatctaatgaagggaatgcaaatggggacagtcatcccaatgctcaaagacctgcaggaaggaaagctgaaaaggaaaagatgaaagcaaaaaggcgcaacagtgatgaagagtctgatcctttcattgaagaggtaaaaaaatttgagagaatcgagagagaaaactgagagcgaacgaaaggagcgtgatgaaagatactttgagctgcataagaaaaaagtagacttggagcaagaccagcatgacaagttgataatggcacttgagtcttgacacgagcacaatggatgaccaaggaaaacagtattttcagttgatgaaagaagatattttagctcgacgctttgggagtaggcagccatagttatttagtttttaatactttagacttttttccattcaaaacagattatcttgatgttcatgtaatgtaagaacatattttcattcaaagcagattatcttgatgtttgcaacaatctgtgttgacattgttttctggttactgtaaaagttgagttgaaattttgcttctgaaa

SEQ ID NO: 3190 - DNA, 3199 bp, Zea Mays
ccgccccactccaccttttccttccccgccggccgccgcgcagcgcgagcggagtcgccctctccagtagagtaggagtgacgtctctacctatccacctcagccccctcttttcattccccacccgcgccgcgcgagcggagtttcgcagcacgctgcggctcgcttcgccagaattcctggcgagggtacagaattccgcatcgaaacggaagggttccgctcaccgagaaaattggcctcaatcgcgcgtccgtcctcagcgtcgatgccaaggagggaacaacaactggggtttcagcaaaggattggacaaacacaatattggcacttgtgtctcctaattccaaaccggaggacttcaaccgcccagttctttgtgaaattgttgatgatgatgatggctccatggctttgttaccaaaactgcaacaatttgcaaagagggagaacctgaagataatatcaattgcagacctgataagcgaggggggcaccgacacgaagccacgagatggtttggagagaaacagttgaagcatctcccgcggaggttcacactggtccctctccgcgccgaagcacaacgagactgctttctgctcttcaccacctgccagccatcctcctgaagaccccaggtccaaaaagtttgaatgtgcatgggcagcttatgaactttgaaaaacaaggacctccttgcatgatgtaggaatgtaaagtcacatgctttgggctgaagggtgtaaaaatgttgctcccaaatgaaccacaatatgacgagacattttgccagctacatccactacactggatgagtaaaagatctgattttctttatcttgaggtggtatcccggatatgatctgcttgcagacaaccaaaaaggcaaaaacatctcctttgttttcgaatttagtctagtgattgtctaaatgataaacatgtttcccccagcaatatgtttggaattttagaatggttcttttcactcatgcagggtgatgttggggatggacaagagatcttagtacgagtgcattcggagtgcctaactggggacatatttggatcagcgagatgcgattatgggaattaacttgctctggcaatgaccatgattgagaaaactggccggggtgtagtagtctatcttcgtggccatgagggtaggggtattgggctgggtcacaagcttcaagcatacaacttacaagatgatgggcgcgatactgtcgaggcaaacttggagctagggctgcctgctgactcgcgggagtacggtataggtgcacagatattacgccatcttggtgccaggaccatgcggctgatgactaacaaccctgccaagtacactggactcaagggctatggtttaagtgtccttggtagagtgccattgctaacaccgataaccaccgagaataggcgctatatggaaacaaagcgattgaagatggggcatgtttatggaagccgctccagtaatcatgcaaacggcagtggcttggctggtgctggcgagagagaggagcaggatcagaatgacagtgctggcgtgcaagagcgaactccagaagcttgagtgcctaactctgcgttccttagagctgctccaatgggagtcttaaaaagagatgcatcttaaaatatagggctccatggcaaaaaaatcactccaacggggacctcattttacaaaaactcaggaaacaaatttgggctccggtctcattggtcccaaatgtaggacttgaaactatcggccctattctcgttcccacgcccccacgaccttcggtcttttcctgttgcattcgttctcaagccgtctctcccacaaaccaaaccctctgcctgtcgagaagcattggcgagatggatggacggccaccgccttttcctcgttcacggccaacaggttggcctcgttgaacttccatggagatggcactagatgtgatagggagatcatcagctgtgtcttctccgccagatttgcgcaggcctcctgtggccgtggctgcagagcgaaggcctgcaagtatgtctgcaacttcccaacagacacaaggacaagcgtcttggcatcgaatcgctgcagaccatgccgatcggagtttatcagtggcaccgatgatgtatcaagatccattgtcaatgattgatgactatagatgtatttgcctgccaagaaaatatggagagcgaaaatgaggtcatggagtcaccaccattgaatgattcaaattcacagtcaaaaccaaagggtcgatccaagaattttaatgaagctgaagacattttgttgatgtcagcttatcttaacatacgtaaagatgcaattactggaagggatcaataagaaggcaacttttgggaaagagttgagaagtactttaacgttaacaggacatttgagtcagatcgtaactggtcatcgttgaagcatcggtggggtataattcacaaataagttagtagtttccaaggtttccatgacagtatcgaaaggaaaaatgaaagtgggaagacaagtgatgataagctggctgaagcaaatgtaatgttccatcaatttaaaaataaggccttttctttgttccatgcgtggaacattctcagacatgagccaaagtgggctgaagataaaacatctaatgaagggaatgcaaatggggacagtcatcccaatgctcaaagacctgcaggaaggaaagctgaaaaggaaaagatgaaagcaaaaaggcgcaacagtgatgaagagtctgatcctttcattgaagaggtaaaaaaatttgagagaatcgagagagaaaactgagagcgaacgaaaggagcgtgatgaaagatactttgagctgcataagaaaaaagtagacttggagcaagaccagcatgacaagttgataatggcacttgagtcttgacacgagcacaatggatgaccaaggaaaacagtattttcagttgatgaaagaagatattttagctcgacgctttgggagtaggcagccatagttatttagtttttaatactttagacttttttccattcaaaacagattatcttgatgttcatgtaatgtaagaacatattttcattcaaagcagattatcttgatgtttgcaacaatctgtgttgacattgttttctggttactgtaaaagttgagttgaaattttgcttctgaaa

SEQ ID NO: 3191 - DNA, 3145 bp, Zea Mays
cgccccactccaccttttccttccccgccggccgccgcgcagcgcgagcggagtcgccctctccagtagagtaggagtgacgtctctacctatccacctcagccccctcttttcattccccacccgcgccgcgcgagcggagtttcgcagcacgctgcggctcgcttcgccagaattcctggcgagggtacagaattccgcatcgaaacggaagggttccgctcaccgagaaaattggcctcaatcgcgcgtccgtcctcagcgtcgtgcgttcggatgccaaggagggaacaacaactggggtttcagcaaaggattggacaaacacaatattggcacttgtgtctcctaattccaaaccggaggacttcaaccgcccagttctttgtgaaattgttgatgatgatgatggctccatggctttgttaccaaaactgcaacaatttgcaaagagggagaacctgaagataatatcaattgcagacctgataagcgaggggggcaccgacacgaagccacgagatggtttggagagaaacagttgaagcatctcccgcggaggttcacactggtccctctccgcgccgaagcacaacgagactgctttctgctcttcaccacctgccagccatcctcctgaagaccccaggaatgtaaagtcacatgctttgggctgaagggtgtaaaaatgttgctcccaaatgaaccacaatatgacgagacattttgccagctacatccactacactggatgagtaaaagatctgattttctttatcttgaggtggtatcccggatatgatctgcttgcagacaaccaaaaaggcaaaaacatctcctttgttttcgaatttagtctagtgattgtctaaatgataaacatgtttcccccagcaatatgtttggaattttagaatggttcttttcactcatgcagggtgatgttggggatggacaagagatcttagtacgagtgcattcggagtgcctaactggggacatatttggatcagcgagatgcgattatgggaattaacttgctctggcaatgaccatgattgagaaaactggccggggtgtagtagtctatcttcgtggccatgagggtaggggtattgggctgggtcacaagcttcaagcatacaacttacaagatgatgggcgcgatactgtcgaggcaaacttggagctagggctgcctgctgactcgcgggagtacggtataggtgcacagatattacgccatcttggtgccaggaccatgcggctgatgactaacaaccctgccaagtacactggactcaagggctatggtttaagtgtccttggtagagtgccattgctaacaccgataaccaccgagaataggcgctatatggaaacaaagcgattgaagatggggcatgtttatggaagccgctccagtaatcatgcaaacggcagtggcttggctggtgctggcgagagagaggagcaggatcagaatgacagtgctggcgtgcaagagcgaactccagaagcttgagtgcctaactctgcgttccttagagctgctccaatgggagtcttaaaaagagatgcatcttaaaatatagggctccatggcaaaaaaatcactccaacggggacctcattttacaaaaactcaggaaacaaatttgggctccggtctcattggtcccaaatgtaggacttgaaactatcggccctattctcgttcccacgcccccacgaccttcggtcttttcctgttgcattcgttctcaagccgtctctcccacaaaccaaaccctctgcctgtcgagaagcattggcgagatggatggacggccaccgccttttcctcgttcacggccaacaggttggcctcgttgaacttccatggagatggcactagatgtgatagggagatcatcagctgtgtcttctccgccagatttgcgcaggcctcctgtggccgtggctgcagagcgaaggcctgcaagtatgtctgcaacttcccaacagacacaaggacaagcgtcttggcatcgaatcgctgcagaccatgccgatcggagtttatcagtggcaccgatgatgtatcaagatccattgtcaatgattgatgactatagaacctgaagatgtatttgcctgccaagaaaatatggagagcgaaaatgaggtcatggagtcaccaccattgaatgattcaaattcacagtcaaaaccaaagggtcgatccaagaattttaatgaagctgaagacattttgttgatgtcagcttatcttaacatacgtaaagatgcaattactggaagggatcaataagaaggcaacttttgggaaagagttgagaagtactttaacgttaacaggacatttgagtcagatcgtaactggtcatcgttgaagcatcggtggggtataattcacaaataagttagtagtttccaaggtttccatgacagtatcgaaaggaaaaatgaaagtgggaagacaagtgatgataagctggctgaagcaaatgtaatgttccatcaatttaaaaataaggccttttctttgttccatgcgtggaacattctcagacatgagccaaagtgggctgaagataaaacatctaatgaagggaatgcaaatggggacagtcatcccaatgctcaaagacctgcaggaaggaaagctgaaaaggaaaagatgaaagcaaaaaggcgcaacagtgatgaagagtctgatcctttcattgaagaggtaaaaaaatttgagagaatcgagagagaaaactgagagcgaacgaaaggagcgtgatgaaagatactttgagctgcataagaaaaaagtagacttggagcaagaccagcatgacaagttgataatggcacttgagtcttgacacgagcacaatggatgaccaaggaaaacagtattttcagttgatgaaagaagatattttagctcgacgctttgggagtaggcagccatagttatttagtttttaatactttagacttttttccattcaaaacagattatcttgatgttcatgtaatgtaagaacatattttcattcaaagcagattatcttgatgtttgcaacaatctgtgttgacattgttttctggttactgtaaaagttgagttgaaattttgcttctgaaa

SEQ ID NO: 3192 - DNA, 3365 bp, Zea Mays
cgccccactccaccttttccttccccgccggccgccgcgcagcgcgagcggagtcgccctctccagtagagtaggagtgacgtctctacctatccacctcagccccctcttttcattccccacccgcgccgcgcgagcggagtttcgcagcacgctgcggctcgcttcgccagaattcctggcgagggtacagaattccgcatcgaaacggaagggttccgctcaccgagaaaattggcctcaatcgcgcgtccgtcctcagcgtcgtgcgttcggatgccaaggagggaacaacaactggggtttcagcaaaggattggacaaacacaatattggcacttgtgtctcctaattccaaaccggaggacttcaaccgcccagttctttgtgaaattgttgatgatgatgatggctccatggctttgttaccaaaactgcaacaatttgcaaagagggagaacctgaagataatatcaattgcagacctgataagcgaggggggcaccgacacgaagccacgagatggtttggagagaaacagttgaagcatctcccgcggaggttcacactggtccctctccgcgccgaagcacaacgagactgctttctgctcttcaccacctgccagccatcctcctgaagaccccaggtggtgatgttggggatggacaagagatcttagtacgagtgcattcggagtgcctaactggggacatatttggatcagcgagatgcgattatgggaattaacttgctctggcaatgaccatgattgagaaaactggccggggtgtagtagtctatcttcgtggccatgagggtaggggtattgggctgggtcacaagcttcaagcatacaacttacaagatgatgggcgcgatactgtcgaggcaaacttggagctagggctgcctgctgactcgcgggagtacggtataggtgcacagatattacgccatcttggtgccaggaccatgcggctgatgactaacaaccctgccaagtacactggactcaagggctatggtttaagtgtccttggtagagtgccattgctaacaccgataaccaccgagaataggcgctatatggaaacaaagcgattgaagatggggcatgtttatggaagccgctccagtaatcatgcaaacggcagtggcttggctggtgctggcgagagagaggagcaggatcagaatgacagtgctggcgtgcaagagcgaactccagaagcttgagtgcctaactctgcgttccttagagctgctccaatgggagtcttaaaaagagatgcatcttaaaatatagggctccatggcaaaaaaatcactccaacggggacctcattttacaaaaactcaggaaacaaatttgggctccggtctcattggtcccaaatgtaggacttgaaactatcggccctattctcgttcccacgcccccacgaccttcggtcttttcctgttgcattcgttctcaagccgtctctcccacaaaccaaaccctctgcctgtcgagaagcattggcgagatggatggacggccaccgccttttcctcgttcacggccaacaggttggcctcgttgaacttccatggagatggcactagatgtgatagggagatcatcagctgtgtcttctccgccagatttgcgcaggcctcctgtggccgtggctgcagagcgaaggcctgcaagtatgtctgcaacttcccaacagacacaaggacaagcgtcttggcatcgaatcgctgcagaccatgccgatcggagtttatcagtggcaccgatgatgtatcaagatccattgtcaatgattgatgactataggtaataacctttctgttgagattagtagtcgattatatttgctcatgaattcaatcgatggtgatctgggatctccatggttgagaaattgaagtcaaggcctggtgaggttacttgtactggtaggtgctgatagatgtagtgctcaccgatgcttgtgaattgaattattggttctgaaaatatcctcacttcaaccatgcatacgagattatgagtaaatgtgaattccatacactctgttgccccagtccaatacaaccttgctgaaccttgcatatttgtgtgagcaggtacatttttgggagtctctttaatgtttttcttgtttggtctcataattagtggagtacttcaacttatgtgcattattatatcaatttgattaccaaactttattgtgtatagcgtcaaagctgttttgaatgtcttgtgtttgtgtatatttcattctaattccataaccagagtctgctcatatttttacactactctattgaaccaagaacctgaagatgtatttgcctgccaagaaaatatggagagcgaaaatgaggtcatggagtcaccaccattgaatgattcaaattcacagtcaaaaccaaagggtcgatccaagaattttaatgaagctgaagacattttgttgatgtcagcttatcttaacatacgtaaagatgcaattactggaagggatcaataagaaggcaacttttgggaaagagttgagaagtactttaacgttaacaggacatttgagtcagatcgtaactggtcatcgttgaagcatcggtggggtataattcacaaataagttagtagtttccaaggtttccatgacagtatcgaaaggaaaaatgaaagtgggaagacaagtgatgataagctggctgaagcaaatgtaatgttccatcaatttaaaaataaggccttttctttgttccatgcgtggaacattctcagacatgagccaaagtgggctgaagataaaacatctaatgaagggaatgcaaatggggacagtcatcccaatgctcaaagacctgcaggaaggaaagctgaaaaggaaaagatgaaagcaaaaaggcgcaacagtgatgaagagtctgatcctttcattgaagaggtaaaaaaatttgagagaatcgagagagaaaactgagagcgaacgaaaggagcgtgatgaaagatactttgagctgcataagaaaaaagtagacttggagcaagaccagcatgacaagttgataatggcacttgagtcttgacacgagcacaatggatgaccaaggaaaacagtattttcagttgatgaaagaagatattttagctcgacgctttgggagtaggcagccatagttatttagtttttaatactttagacttttttccattcaaaacagattatcttgatgttcatgtaatgtaagaacatattttcattcaaagcagattatcttgatgtttgcaacaatctgtgttgacattgttttctggttactgtaaaagttgagttgaaattttgcttctgaaa

SEQ ID NO: 3193 - DNA, 2780 bp, Zea Mays
cgccccactccaccttttccttccccgccggccgccgcgcagcgcgagcggagtcgccctctccagtagagtaggagtgacgtctctacctatccacctcagccccctcttttcattccccacccgcgccgcgcgagcggagtttcgcagcacgctgcggctcgcttcgccagaattcctggcgagggtacagaattccgcatcgaaacggaagggttccgctcaccgagaaaattggcctcaatcgcgcgtccgtcctcagcgtcgtgcgttcggatgccaaggagggaacaacaactggggtttcagcaaaggattggacaaacacaatattggcacttgtgtctcctaattccaaaccggaggacttcaaccgcccagttctttgtgaaattgttgatgatgatgatggctccatggctttgttaccaaaactgcaacaatttgcaaagagggagaacctgaagataatatcaattgcagacctgataagcgaggggggcaccgacacgaagccacgagatggtttggagagaaacagttgaagcatctcccgcggaggttcacactggtccctctccgcgccgaagcacaacgagactgctttctgctcttcaccacctgccagccatcctcctgaagaccccagggtgatgttggggatggacaagagatcttagtacgagtgcattcggagtgcctaactggggacatatttggatcagcgagatgcgattatgggaattaacttgctctggcaatgaccatgattgagaaaactggccggggtgtagtagtctatcttcgtggccatgagggtaggggtattgggctgggtcacaagcttcaagcatacaacttacaagatgatgggcgcgatactgtcgaggcaaacttggagctagggctgcctgctgactcgcgggagtacggtataggtgcacagatattacgccatcttggtgccaggaccatgcggctgatgactaacaaccctgccaagtacactggactcaagggctatggtttaagtgtccttggtagagtgccattgctaacaccgataaccaccgagaataggcgctatatggaaacaaagcgattgaagatggggcatgtttatggaagccgctccagtaatcatgcaaacggcagtggcttggctggtgctggcgagagagaggagcaggatcagaatgacagtgctggcgtgcaagagcgaactccagaagcttgagtgcctaactctgcgttccttagagctgctccaatgggagtcttaaaaagagatgcatcttaaaatatagggctccatggcaaaaaaatcactccaacggggacctcattttacaaaaactcaggaaacaaatttgggctccggtctcattggtcccaaatgtaggacttgaaactatcggccctattctcgttcccacgcccccacgaccttcggtcttttcctgttgcattcgttctcaagccgtctctcccacaaaccaaaccctctgcctgtcgagaagcattggcgagatggatggacggccaccgccttttcctcgttcacggccaacaggttggcctcgttgaacttccatggagatggcactagatgtgatagggagatcatcagctgtgtcttctccgccagatttgcgcaggcctcctgtggccgtggctgcagagcgaaggcctgcaagtatgtctgcaacttcccaacagacacaaggacaagcgtcttggcatcgaatcgctgcagaccatgccgatcggagtttatcagtggcaccgatgatgtatcaagatccattgtcaatgattgatgactatagaacctgaagatgtatttgcctgccaagaaaatatggagagcgaaaatgaggtcatggagtcaccaccattgaatgattcaaattcacagtcaaaaccaaagggtcgatccaagaattttaatgaagctgaagacattttgttgatgtcagcttatcttaacatacgtaaagatgcaattactggaagggatcaataagaaggcaacttttgggaaagagttgagaagtactttaacgttaacaggacatttgagtcagatcgtaactggtcatcgttgaagcatcggtggggtataattcacaaataagttagtagtttccaaggtttccatgacagtatcgaaaggaaaaatgaaagtgggaagacaagtgatgataagacatgagccaaagtgggctgaagataaaacatctaatgaagggaatgcaaatggggacagtcatcccaatgctcaaagacctgcaggaaggaaagctgaaaaggaaaagatgaaagcaaaaaggcgcaacagtgatgaagagtctgatcctttcattgaagaggtaaaaaaatttgagagaatcgagagagaaaactgagagcgaacgaaaggagcgtgatgaaagatactttgagctgcataagaaaaaagtagacttggagcaagaccagcatgacaagttgataatggcacttgagtcttgacacgagcacaatggatgaccaaggaaaacagtattttcagttgatgaaagaagatattttagctcgacgctttgggagtaggcagccatagttatttagtttttaatactttagacttttttccattcaaaacagattatcttgatgttcatgtaatgtaagaacatattttcattcaaagcagattatcttgatgtttgcaacaatctgtgttgacattgttttctggttactgtaaaagttgagttgaaattttgcttctgaaa

SEQ ID NO: 3194 - DNA, 3026 bp, Zea Mays
cgccccactccaccttttccttccccgccggccgccgcgcagcgcgagcggagtcgccctctccagtagagtaggagtgacgtctctacctatccacctcagccccctcttttcattccccacccgcgccgcgcgagcggagtttcgcagcacgctgcggctcgcttcgccagaattcctggcgagggtacagaattccgcatcgaaacggaagggttccgctcaccgagaaaattggcctcaatcgcgcgtccgtcctcagcgtcgtgcgttcggatgccaaggagggaacaacaactggggtttcagcaaaggattggacaaacacaatattggcacttgtgtctcctaattccaaaccggaggacttcaaccgcccagttctttgtgaaattgttgatgatgatgatggctccatggctttgttaccaaaactgcaacaatttgcaaagagggagaacctgaagataatatcaattgcagacctgataagcgaggggggcaccgacacgaagccacgagatggtttggagagaaacagttgaagcatctcccgcggaggttcacactggtccctctccgcgccgaagcacaacgagactgctttctgctcttcaccacctgccagccatcctcctgaagaccccaggtgaatgtaaagtcacatgctttgggctgaagggtgtaaaaatgttgctcccaaatgaaccacaatatgacgagacattttgccagctacatccactacactggatgagtaaaagatctgattttctttatcttgaggtggtatcccggatatgatctgcttgcagacaaccaaaaagggtgatgttggggatggacaagagatcttagtacgagtgcattcggagtgcctaactggggacatatttggatcagcgagatgcgattatgggaattaacttgctctggcaatgaccatgattgagaaaactggccggggtgtagtagtctatcttcgtggccatgagggtaggggtattgggctgggtcacaagcttcaagcatacaacttacaagatgatgggcgcgatactgtcgaggcaaacttggagctagggctgcctgctgactcgcgggagtacggtataggtgcacagatattacgccatcttggtgccaggaccatgcggctgatgactaacaaccctgccaagtacactggactcaagggctatggtttaagtgtccttggtagagtgccattgctaacaccgataaccaccgagaataggcgctatatggaaacaaagcgattgaagatggggcatgtttatggaagccgctccagtaatcatgcaaacggcagtggcttggctggtgctggcgagagagaggagcaggatcagaatgacagtgctggcgtgcaagagcgaactccagaagcttgagtgcctaactctgcgttccttagagctgctccaatgggagtcttaaaaagagatgcatcttaaaatatagggctccatggcaaaaaaatcactccaacggggacctcattttacaaaaactcaggaaacaaatttgggctccggtctcattggtcccaaatgtaggacttgaaactatcggccctattctcgttcccacgcccccacgaccttcggtcttttcctgttgcattcgttctcaagccgtctctcccacaaaccaaaccctctgcctgtcgagaagcattggcgagatggatggacggccaccgccttttcctcgttcacggccaacaggttggcctcgttgaacttccatggagatggcactagatgtgatagggagatcatcagctgtgtcttctccgccagatttgcgcaggcctcctgtggccgtggctgcagagcgaaggcctgcaagtatgtctgcaacttcccaacagacacaaggacaagcgtcttggcatcgaatcgctgcagaccatgccgatcggagtttatcagtggcaccgatgatgtatcaagatccattgtcaatgattgatgactatagatgtatttgcctgccaagaaaatatggagagcgaaaatgaggtcatggagtcaccaccattgaatgattcaaattcacagtcaaaaccaaagggtcgatccaagaattttaatgaagctgaagacattttgttgatgtcagcttatcttaacatacgtaaagatgcaattactggaagggatcaataagaaggcaacttttgggaaagagttgagaagtactttaacgttaacaggacatttgagtcagatcgtaactggtcatcgttgaagcatcggtggggtataattcacaaataagttagtagtttccaaggtttccatgacagtatcgaaaggaaaaatgaaagtgggaagacaagtgatgataagctggctgaagcaaatgtaatgttccatcaatttaaaaataaggccttttctttgttccatgcgtggaacattctcagacatgagccaaagtgggctgaagataaaacatctaatgaagggaatgcaaatggggacagtcatcccaatgctcaaagacctgcaggaaggaaagctgaaaaggaaaagatgaaagcaaaaaggcgcaacagtgatgaagagtctgatcctttcattgaagaggtaaaaaaatttgagagaatcgagagagaaaactgagagcgaacgaaaggagcgtgatgaaagatactttgagctgcataagaaaaaagtagacttggagcaagaccagcatgacaagttgataatggcacttgagtcttgacacgagcacaatggatgaccaaggaaaacagtattttcagttgatgaaagaagatattttagctcgacgctttgggagtaggcagccatagttatttagtttttaatactttagacttttttccattcaaaacagattatcttgatgttcatgtaatgtaagaacatattttcattcaaagcagattatcttgatgtttgcaacaatctgtgttgacattgttttctggttactgtaaaagttgagttgaaattttgcttctgaaa

SEQ ID NO: 3195 - DNA, 3558 bp, Zea Mays
ccccactccaccttttccttccccgccggccgccgcgcagcgcgagcggagtcgccctctccagtagagtaggagtgacgtctctacctatccacctcagccccctcttttcattccccacccgcgccgcgcgagcggagtttcgcagcacgctgcggctcgcttcgccagaattcctggcgagggtacagaattccgcatcgaaacggaagggttccgctcaccgagaaaattggcctcaatcgcgcgtccgtcctcagcgtcgtgcgttcggatgccaaggagggaacaacaactggggtttcagcaaaggattggacaaacacaatattggcacttgtgtctcctaattccaaaccggaggacttcaaccgcccagctgggttacctccttttgcagttctttgtgaaattgttgatgatgatgatggctccatggctttgttaccaaaactgcaacaatttgcaaagagggagaacctgaagataatatcaattgcagacctgataagcgaggggggcaccgacacgaagccacgagatggtttggagagaaacagttgaagcatctcccgcggaggttcacactggtccctctccgcgccgaagcacaacgagactgctttctgctcttcaccacctgccagccatcctcctgaagaccccaggaatgtaaagtcacatgctttgggctgaagggtgtaaaaatgttgctcccaaatgaaccacaatatgacgagacattttgccagctacatccactacactggatgagtaaaagatctgattttctttatcttgaggtggtatcccggatatgatctgcttgcagacaaccaaaaagggtgatgttggggatggacaagagatcttagtacgagtgcattcggagtgcctaactggggacatatttggatcagcgagatgcgattatgggaattaacttgctctggcaatgaccatgattgagaaaactggccggggtgtagtagtctatcttcgtggccatgagggtaggggtattgggctgggtcacaagcttcaagcatacaacttacaagatgatgggcgcgatactgtcgaggcaaacttggagctagggctgcctgctgactcgcgggagtacggtataggtgcacagatattacgccatcttggtgccaggaccatgcggctgatgactaacaaccctgccaagtacactggactcaagggctatggtttaagtgtccttggtagagtgccattgctaacaccgataaccaccgagaataggcgctatatggaaacaaagcgattgaagatggggcatgtttatggaagccgctccagtaatcatgcaaacggcagtggcttggctggtgctggcgagagagaggagcaggatcagaatgacagtgctggcgtgcaagagcgaactccagaagcttgagtgcctaactctgcgttccttagagctgctccaatgggagtcttaaaaagagatgcatcttaaaatatagggctccatggcaaaaaaatcactccaacggggacctcattttacaaaaactcaggaaacaaatttgggctccggtctcattggtcccaaatgtaggacttgaaactatcggccctattctcgttcccacgcccccacgaccttcggtcttttcctgttgcattcgttctcaagccgtctctcccacaaaccaaaccctctgcctgtcgagaagcattggcgagatggatggacggccaccgccttttcctcgttcacggccaacaggttggcctcgttgaacttccatggagatggcactagatgtgatagggagatcatcagctgtgtcttctccgccagatttgcgcaggcctcctgtggccgtggctgcagagcgaaggcctgcaagtatgtctgcaacttcccaacagacacaaggacaagcgtcttggcatcgaatcgctgcagaccatgccgatcggagtttatcagtggcaccgatgatgtatcaagatccattgtcaatgattgatgactataggtaataacctttctgttgagattagtagtcgattatatttgctcatgaattcaatcgatggtgatctgggatctccatggttgagaaattgaagtcaaggcctggtgaggttacttgtactggtaggtgctgatagatgtagtgctcaccgatgcttgtgaattgaattattggttctgaaaatatcctcacttcaaccatgcatacgagattatgagtaaatgtgaattccatacactctgttgccccagtccaatacaaccttgctgaaccttgcatatttgtgtgagcaggtacatttttgggagtctctttaatgtttttcttgtttggtctcataattagtggagtacttcaacttatgtgcattattatatcaatttgattaccaaactttattgtgtatagcgtcaaagctgttttgaatgtcttgtgtttgtgtatatttcattctaattccataaccagagtctgctcatatttttacactactctattgaaccaagaacctgaagatgtatttgcctgccaagaaaatatggagagcgaaaatgaggtcatggagtcaccaccattgaatgattcaaattcacagtcaaaaccaaagggtcgatccaagaattttaatgaagctgaagacattttgttgatgtcagcttatcttaacatacgtaaagatgcaattactggaagggatcaataagaaggcaacttttgggaaagagttgagaagtactttaacgttaacaggacatttgagtcagatcgtaactggtcatcgttgaagcatcggtggggtataattcacaaataagttagtagtttccaaggtttccatgacagtatcgaaaggaaaaatgaaagtgggaagacaagtgatgataagctggctgaagcaaatgtaatgttccatcaatttaaaaataaggccttttctttgttccatgcgtggaacattctcagacatgagccaaagtgggctgaagataaaacatctaatgaagggaatgcaaatggggacagtcatcccaatgctcaaagacctgcaggaaggaaagctgaaaaggaaaagatgaaagcaaaaaggcgcaacagtgatgaagagtctgatcctttcattgaagaggtaaaaaaatttgagagaatcgagagagaaaactgagagcgaacgaaaggagcgtgatgaaagatactttgagctgcataagaaaaaagtagacttggagcaagaccagcatgacaagttgataatggcacttgagtcttgacacgagcacaatggatgaccaaggaaaacagtattttcagttgatgaaagaagatattttagctcgacgctttgggagtaggcagccatagttatttagtttttaatactttagacttttttccattcaaaacagattatcttgatgttcatgtaatgtaagaacatattttcattcaaagcagattatcttgatgtttgcaacaatctgtgttgacattgttttctggttactgtaaaagttgagttgaaattttgcttctgaaa

SEQ ID NO: 3196 - DNA, 2980 bp, Zea Mays
ccaccttttccttccccgccggccgccgcgcagcgcgagcggagtcgccctctccagtagagtaggagtgacgtctctacctatccacctcagccccctcttttcattccccacccgcgccgcgcgagcggagtttcgcagcacgctgcggctcgcttcgccagaattcctggcgagggtacagaattccgcatcgaaacggaagggttccgctcaccgagaaaattggcctcaatcgcgcgtccgtcctcagcgtcgtgcgttcgggtgatgttggggatggacaagagatcttagtacgagtgcattcggagtgcctaactggggacatatttggatcagcgagatgcgattatgggaattaacttgctctggcaatgaccatgattgagaaaactggccggggtgtagtagtctatcttcgtggccatgagggtaggggtattgggctgggtcacaagcttcaagcatacaacttacaagatgatgggcgcgatactgtcgaggcaaacttggagctagggctgcctgctgactcgcgggagtacggtataggtgcacagatattacgccatcttggtgccaggaccatgcggctgatgactaacaaccctgccaagtacactggactcaagggctatggtttaagtgtccttggtagagtgccattgctaacaccgataaccaccgagaataggcgctatatggaaacaaagcgattgaagatggggcatgtttatggaagccgctccagtaatcatgcaaacggcagtggcttggctggtgctggcgagagagaggagcaggatcagaatgacagtgctggcgtgcaagagcgaactccagaagcttgagtgcctaactctgcgttccttagagctgctccaatgggagtcttaaaaagagatgcatcttaaaatatagggctccatggcaaaaaaatcactccaacggggacctcattttacaaaaactcaggaaacaaatttgggctccggtctcattggtcccaaatgtaggacttgaaactatcggccctattctcgttcccacgcccccacgaccttcggtcttttcctgttgcattcgttctcaagccgtctctcccacaaaccaaaccctctgcctgtcgagaagcattggcgagatggatggacggccaccgccttttcctcgttcacggccaacaggttggcctcgttgaacttccatggagatggcactagatgtgatagggagatcatcagctgtgtcttctccgccagatttgcgcaggcctcctgtggccgtggctgcagagcgaaggcctgcaagtatgtctgcaacttcccaacagacacaaggacaagcgtcttggcatcgaatcgctgcagaccatgccgatcggagtttatcagtggcaccgatgatgtatcaagatccattgtcaatgattgatgactataggtaataacctttctgttgagattagtagtcgattatatttgctcatgaattcaatcgatggtgatctgggatctccatggttgagaaattgaagtcaaggcctggtgaggttacttgtactggtaggtgctgatagatgtagtgctcaccgatgcttgtgaattgaattattggttctgaaaatatcctcacttcaaccatgcatacgagattatgagtaaatgtgaattccatacactctgttgccccagtccaatacaaccttgctgaaccttgcatatttgtgtgagcaggtacatttttgggagtctctttaatgtttttcttgtttggtctcataattagtggagtacttcaacttatgtgcattattatatcaatttgattaccaaactttattgtgtatagcgtcaaagctgttttgaatgtcttgtgtttgtgtatatttcattctaattccataaccagagtctgctcatatttttacactactctattgaaccaagaacctgaagatgtatttgcctgccaagaaaatatggagagcgaaaatgaggtcatggagtcaccaccattgaatgattcaaattcacagtcaaaaccaaagggtcgatccaagaattttaatgaagctgaagacattttgttgatgtcagcttatcttaacatacgtaaagatgcaattactggaagggatcaataagaaggcaacttttgggaaagagttgagaagtactttaacgttaacaggacatttgagtcagatcgtaactggtcatcgttgaagcatcggtggggtataattcacaaataagttagtagtttccaaggtttccatgacagtatcgaaaggaaaaatgaaagtgggaagacaagtgatgataagctggctgaagcaaatgtaatgttccatcaatttaaaaataaggccttttctttgttccatgcgtggaacattctcagacatgagccaaagtgggctgaagataaaacatctaatgaagggaatgcaaatggggacagtcatcccaatgctcaaagacctgcaggaaggaaagctgaaaaggaaaagatgaaagcaaaaaggcgcaacagtgatgaagagtctgatcctttcattgaagaggtaaaaaaatttgagagaatcgagagagaaaactgagagcgaacgaaaggagcgtgatgaaagatactttgagctgcataagaaaaaagtagacttggagcaagaccagcatgacaagttgataatggcacttgagtcttgacacgagcacaatggatgaccaaggaaaacagtattttcagttgatgaaagaagatattttagctcgacgctttgggagtaggcagccatagttatttagtttttaatactttagacttttttccattcaaaacagattatcttgatgttcatgtaatgtaagaacatattttcattcaaagcagattatcttgatgtttgcaacaatctgtgttgacattgttttctggttactgtaaaagttgagttgaaattttgcttctgaaa

SEQ ID NO: 3197 - DNA, 3851 bp, Zea Mays
gtgaacgtgaagcagcgaagcgtcccggcaaaggcacccggtggccgcgtccagcgcctaccgtttccgggggggctcctcgcctcctcttcccccgtccacccattctcctggccgctcttccccttcgtcgtcgcactccgctagctcacctcctcgtccccatataaaccatatccctctccgggccccgcgcagccgccggcgacaagcgcgcaggagcagcagttgtcgcgcctcactgatggcgaccgccgtggcgtcgcagccgtgccaccttcccctcagcgccggcggagatcccagcacttcgaatgttcatactctggagaaagtatatggtttcagattcatatgcagaagcattgttgatgtaaagactcacaaattccactcccgcatttcaaagaggaagtgctacttgaggaactcactgtcggagtgtgacaggaccatccacagtggtagatggttggagtttcggagacacaagggagtcttccagagaactagaaggatggttcacattattccattggcttctgatggtgatggcaaccatatatctgttaatggagctctgcaagttggttctacaagcaacattgatgaaataaagttgaaattgaataaagcattgcagagtgaagatatcagcaatggactcgtccagtcgatacatgatgctgcaagatctattgagttggctctcatagagcacagcaaattgccaaagagctcttggtttccaaagacatggctaggcgttgagaacaatgcttggataaaatcactgtcttaccaggctgctgtagactcattgttgaaagcagttatcgatgtttcatctcgtgggaatgacagagatagagatattaatgtgtttgttcaaaggagtttgtcccgcctgctcaccccccttgagagtgttatcaagaatgaattatctaagagggaacctgcattgtatgaatggtattcatccgatcaaaatcctttggtggtgagacaatttgtaaacatttttgaaaatgatccaatgttttactctgctacagcaatatgccttgaaggcgagccgatgaatactagtgaaagtgatctttctctgcttatgctaggtttgatctgtcttgctgcaatcacaaagtttggatcagcaaaagtttcttgtcagcaattctcttcaatggtgcctgatattattggtcgattcatggatatgcttcttgagtttgcccctctaagtaaagcatataacttggcgaaagatattggtcttcggagagaatttttgtataattttggtcctcgtgctgctgttcctaaacttggcaatgaccatggacttgaaatatcattttggattgaactggtgcagaagcaattactctgggctcttgatcgtgaaaagatatggtcaagactgacaacaagtgaaagcattgaggttctggaaaaggatcttgcaatatttggtttttttgttgctttgggtagaagcacacaaggatatttgtctttcaagggtttgactgatttggatgattcactgaatggtattgtaaggtatcttatcggtgggagtgtactatattatccacagctgtcctcgattagttcatatcaactgtatgtggaggtagtctgtgaagagctcgagtggcttcctttttacaatgatgatgttttaagtgcaaaaactgatactgaaggtagagaagaagtgcctaaaggagaagtcatatcaagagtcctaaatgtgtgctcttactggatgactagttttacaaagtacagctcatggcttgagaacccttcaaatgtgaaggctgcaaagttcctttctaagggacatgtcatgttgagtgactgcatgaaggagcttgacatatcaagaaatatgtcaaacgacagtggcttcctagaacctgaagaagaattggatactggaacagaattagcttcctttgacaagtcgcttgaaaatgttgaagaagctctggttaagttagaaaatttgcttcaagaattacatgtttccagttcgcactctggtaaggaggatctgaaggctgcatgctctgatcttgaaatgataagaagactgaagaaagaagctgagcttcttgaggcatcctttctagcaaaagcagaatatctggaggccgatgcaagtagcggatcactatctcctgcagaggaaggacctgtaaagacaagtagcaggacgaacgatacatcagcaccacaaaaaacaggaagcagggtggataataaacgtcgcccattttgggacttctttggtcggtctttgaaagttgatccagctcttgcagatcaggatctgatcactgtcgccaatgtggagaaggaaggcatggagtcaaatgacatcctccgcttcgaacagttaagacgtgagctgattgagttagaaaagagagtgcagaagagtgcggatgaagctcaaaaggaggaggagatggttgtcgcagaaaaaacaactgcaccatcgcctggatcatcagtttcttctcgtcagactaccaagaaagaaaatgtcataactaaatcagtggagaaggtcaaagagactacaacgactgtgttgcaggggacacaactattagcaattgatacaggagctgctatgggtttgctaaaaagagctcttattggggatgaactaactcagaaggaaaagcaggctcttcaaagaacattgacagatttggcgtctgtcgttcctataggaatactcatgcttttgccacttaccgccgttggtcatgctgctattttggctttcatccagagatatgtgccatcgatgatcccgtccacatatgcccccggtaggttggatctccttaggcagattgagaaggttaaggaaatggaagttgctgaaggcagcagaaccaagcctactacatgcattattgtctgtacccaaatgccaagttcagtgatctcctacgggattgagtggtgcgggcattttctaataataagccaagcccgtgagcaagatgtaggcgtgaacagtgttcgtcagtcgccgccaccgtctcccctcctgatccaatccaatggcgcgcctccacctcgtagccgtggcaatgggcttgctcttggccttgacgacggcgcaggcaccgggcgcgtccacgatgcccgcgcccatggcgcagcctccggcgacctcggcgcctcctcgtcccgcgccatccccgacccagaagaccgctccagctccggcgcccaatgccacggtacccgcccccgcctcgccgccggcgccgagctctatcgggcagacgccgaccgaggcgccgtcctcccctccgccgcccagcgccgcgtccagcgttgcctccgccttgtacgtggccgccgctatggcggctgtcgtgtttttcttctgaggtcggtactcggcgccgatggatccgccgcctatggtatggtacggtgcggtgtggatttgacacgatggctcccgctaccgctggtcgagtttgcttattaggatactagtagttaattaatagttgggttgatcagatcagatctagcgtttttgttgagtggggatattatttcttctacggatctgcacactagggttatgtcactatggttgccattgttattagggaaggtgcaaacttctaatttgaatcacatgatgttgatccaagggacgcataagggacgccaagcttattaaaacgataaaacgatggaacgctcatgggtgaaattttgacttttaaacgtttaaactttgtttaaacatagttttaaacaacataggaaaaataccaatatatcataatttcaga

SEQ ID NO: 3198 - DNA, 4237 bp, Zea Mays
gcgaagcgtcccggcaaaggcacccggtggccgcgtccagcgcctaccgtttccgggggggctcctcgcctcctcttcccccgtccacccattctcctggccgctcttccccttcgtcgtcgcactccgctagctcacctcctcgtccccatataaaccatatccctctccgggccccgcgcagccgccggcgacaagcgcgcaggagcagcagttgtcgcgcctcactgatggcgaccgccgtggcgtcgcagccgtgccaccttcccctcagcgccggcggagatcccagcacttcgaatgttcatactctggagaaagtatatggtttcagattcatatgcagaagcattgttgatgtaaagactcacaaattccactcccgcatttcaaagaggaagtgctacttgaggaactcactgtcggagtgtgacaggaccatccacagtggtagatggttggagtttcggagacacaagggagtcttccagagaactagaaggatggttcacattattccattggcttctgatggtgatggcaaccatatatctgttaatggagctctgcaagttggttctacaagcaacattgatgaaataaagttgaaattgaataaagcattgcagagtgaagatatcagcaatggactcgtccagtcgatacatgatgctgcaagatctattgagttggctctcatagagcacagcaaattgccaaagagctcttggtttccaaagacatggctaggcgttgagaacaatgcttggataaaatcactgtcttaccaggctgctgtagactcattgttgaaagcagttatcgatgtttcatctcgtgggaatgacagagatagagatattaatgtgtttgttcaaaggagtttgtcccgcctgctcaccccccttgagagtgttatcaagaatgaattatctaagagggaacctgcattgtatgaatggtattcatccgatcaaaatcctttggtggtgagacaatttgtaaacatttttgaaaatgatccaatgttttactctgctacagcaatatgccttgaaggcgagccgatgaatactagtgaaagtgatctttctctgcttatgctaggtttgatctgtcttgctgcaatcacaaagtttggatcagcaaaagtttcttgtcagcaattctcttcaatggtgcctgatattattggtcgattcatggatatgcttcttgagtttgcccctctaagtaaagcatataacttggcgaaagatattggtcttcggagagaatttttgtataattttggtcctcgtgctgctgttcctaaacttggcaatgaccatggacttgaaatatcattttggattgaactggtgcagaagcaattactctgggctcttgatcgtgaaaagatatggtcaagactgacaacaagtgaaagcattgaggttctggaaaaggatcttgcaatatttggtttttttgttgctttgggtagaagcacacaaggatatttgtctttcaagggtttgactgatttggatgattcactgaatggtattgtaaggtatcttatcggtgggagtgtactatattatccacagctgtcctcgattagttcatatcaactgtatgtggaggtagtctgtgaagagctcgagtggcttcctttttacaatgatgatgttttaagtgcaaaaactgatactgaaggtagagaagaagtgcctaaaggagaagtcatatcaagagtcctaaatgtgtgctcttactggatgactagttttacaaagtacagctcatggcttgagaacccttcaaatgtgaaggctgcaaagttcctttctaagggacatgtcatgttgagtgactgcatgaaggagcttgacatatcaagtggcttcctagaacctgaagaagaattggatactggaacagaattagcttcctttgacaagtcgcttgaaaatgttgaagaagctctggttaagttagaaaatttgcttcaagaattacatgtttccagttcgcactctggtaaggaggatctgaaggctgcatgctctgatcttgaaatgataagaagactgaagaaagaagctgagcttcttgaggcatcctttctagcaaaagcagaatatctggaggccgatgcaagtagcggatcactatctcctgcagaggaaggacctgtaaagacaagtagcaggacgaacgatacatcagcaccacaaaaaacaggaagcagggtggataataaacgtcgcccattttgggacttctttggtcggtctttgaaagttgatccagctcttgcagatcaggatctgatcactgtcgccaatgtggagaaggaaggcatggagtcaaatgacatcctccgcttcgaacagttaagacgtgagctgattgagttagaaaagagagtgcagaagagtgcggatgaagctcaaaaggaggaggagatggttgtcgcagaaaaaacaactgcaccatcgcctggatcatcagtttcttctcgtcagactaccaagaaagaaaatgtcataactaaatcagtggagaaggtcaaagagactacaacgactgtgttgcaggggacacaactattagcaattgatacaggagctgctatgggtttgctaaaaagagctcttattggggatgaactaactcagaaggaaaagcaggctcttcaaagaacattgacagatttggcgtctgtcgttcctataggaatactcatgcttttgccacttaccgccgttggtcatgctgctattttggctttcatccagagatatgtgccatcgatgatcccgtccacatatgcccccggtaggttggatctccttaggcagattgagaaggttaaggaaatggaagttgctgaaggcagcagtgaagatatattggaggaactgaacaaatgaaataagctgggcatgtacagatggacatgattatactgcttagcttacggtctttcctgtaaagttgttttggaacaagacatttgagggggtttgttttatctaaagattctttgaatggcatacccgctggaaacagaagtgcaaggccctaggaataagtaaccaatcattgtgtcgacaaatgttccacgtctgcaggctggtgtatacataaaacatactccacattatacattacatgggcggctcacggtgcccttcaacatagtagaggatgaatgtccaagttcctcctggacagtgttctgtgtagggtagtggttttgatagaggattgtatatctagttggtatgttggtgatcacctttgttttgttttttaggaaccaagcctactacatgcattattgtctgtacccaaatgccaagttcagtgatctcctacgggattgagtggtgcgggcattttctaataataagccaagcccgtgagcaagatgtaggcgtgaacagtgttcgtcagtcgccgccaccgtctcccctcctgatccaatccaatggcgcgcctccacctcgtagccgtggcaatgggcttgctcttggccttgacgacggcgcaggcaccgggcgcgtccacgatgcccgcgcccatggcgcagcctccggcgacctcggcgcctcctcgtcccgcgccatccccgacccagaagaccgctccagctccggcgcccaatgccacggtacccgcccccgcctcgccgccggcgccgagctctatcgggcagacgccgaccgaggcgccgtcctcccctccgccgcccagcgccgcgtccagcgttgcctccgccttgtacgtggccgccgctatggcggctgtcgtgtttttcttctgaggtcggtactcggcgccgatggatccgccgcctatggtatggtacggtgcggtgtggatttgacacgatggctcccgctaccgctggtcgagtttgcttattaggatactagtagttaattaatagttgggttgatcagatcagatctagcgtttttgttgagtggggatattatttcttctacggatctgcacactagggttatgtcactatggttgccattgttattagggaaggtgcaaacttctaatttgaatcacatgatgttgatccaagggacgcataagggacgccaagcttattaaaacgataaaacgatggaacgctcatgggtgaaattttgacttttaaacgtttaaactttgtttaaacatagttttaaacaacataggaaaaataccaatatatcataatttcaga

SEQ ID NO: 3199 - DNA, 4260 bp, Zea Mays
gtcccggcaaaggcacccggtggccgcgtccagcgcctaccgtttccgggggggctcctcgcctcctcttcccccgtccacccattctcctggccgctcttccccttcgtcgtcgcactccgctagctcacctcctcgtccccatataaaccatatccctctccgggccccgcgcagccgccggcgacaagcgcgcaggagcagcagttgtcgcgcctcactgatggcgaccgccgtggcgtcgcagccgtgccaccttcccctcagcgccggcggagatcccaggtgcgcggccagcacttcgaatgttcatactctggagaaagtatatggtttcagattcatatgcagaagcattgttgatgtaaagactcacaaattccactcccgcatttcaaagaggaagtgctacttgaggaactcactgtcggagtgtgacaggaccatccacagtggtagatggttggagtttcggagacacaagggagtcttccagagaactagaaggatggttcacattattccattggcttctgatggtgatggcaaccatatatctgttaatggagctctgcaagttggttctacaagcaacattgatgaaataaagttgaaattgaataaagcattgcagagtgaagatatcagcaatggactcgtccagtcgatacatgatgctgcaagatctattgagttggctctcatagagcacagcaaattgccaaagagctcttggtttccaaagacatggctaggcgttgagaacaatgcttggataaaatcactgtcttaccaggctgctgtagactcattgttgaaagcagttatcgatgtttcatctcgtgggaatgacagagatagagatattaatgtgtttgttcaaaggagtttgtcccgcctgctcaccccccttgagagtgttatcaagaatgaattatctaagagggaacctgcattgtatgaatggtattcatccgatcaaaatcctttggtggtgagacaatttgtaaacatttttgaaaatgatccaatgttttactctgctacagcaatatgccttgaaggcgagccgatgaatactagtgaaagtgatctttctctgcttatgctaggtttgatctgtcttgctgcaatcacaaagtttggatcagcaaaagtttcttgtcagcaattctcttcaatggtgcctgatattattggtcgattcatggatatgcttcttgagtttgcccctctaagtaaagcatataacttggcgaaagatattggtcttcggagagaatttttgtataattttggtcctcgtgctgctgttcctaaacttggcaatgaccatggacttgaaatatcattttggattgaactggtgcagaagcaattactctgggctcttgatcgtgaaaagatatggtcaagactgacaacaagtgaaagcattgaggttctggaaaaggatcttgcaatatttggtttttttgttgctttgggtagaagcacacaaggatatttgtctttcaagggtttgactgatttggatgattcactgaatggtattgtaaggtatcttatcggtgggagtgtactatattatccacagctgtcctcgattagttcatatcaactgtatgtggaggtagtctgtgaagagctcgagtggcttcctttttacaatgatgatgttttaagtgcaaaaactgatactgaaggtagagaagaagtgcctaaaggagaagtcatatcaagagtcctaaatgtgtgctcttactggatgactagttttacaaagtacagctcatggcttgagaacccttcaaatgtgaaggctgcaaagttcctttctaagggacatgtcatgttgagtgactgcatgaaggagcttgacatatcaagaaatatgtcaaacgacagtggcttcctagaacctgaagaagaattggatactggaacagaattagcttcctttgacaagtcgcttgaaaatgttgaagaagctctggttaagttagaaaatttgcttcaagaattacatgtttccagttcgcactctggtaaggaggatctgaaggctgcatgctctgatcttgaaatgataagaagactgaagaaagaagctgagcttcttgaggcatcctttctagcaaaagcagaatatctggaggccgatgcaagtagcggatcactatctcctgcagaggaaggacctgtaaagacaagtagcaggacgaacgatacatcagcaccacaaaaaacaggaagcagggtggataataaacgtcgcccattttgggacttctttggtcggtctttgaaagttgatccagctcttgcagatcaggatctgatcactgtcgccaatgtggagaaggaaggcatggagtcaaatgacatcctccgcttcgaacagttaagacgtgagctgattgagttagaaaagagagtgcagaagagtgcggatgaagctcaaaaggaggaggagatggttgtcgcagaaaaaacaactgcaccatcgcctggatcatcagtttcttctcgtcagactaccaagaaagaaaatgtcataactaaatcagtggagaaggtcaaagagactacaacgactgtgttgcaggggacacaactattagcaattgatacaggagctgctatgggtttgctaaaaagagctcttattggggatgaactaactcagaaggaaaagcaggctcttcaaagaacattgacagatttggcgtctgtcgttcctataggaatactcatgcttttgccacttaccgccgttggtcatgctgctattttggctttcatccagagatatgtgccatcgatgatcccgtccacatatgcccccggtaggttggatctccttaggcagattgagaaggttaaggaaatggaagttgctgaaggcagcagtgaagatatattggaggaactgaacaaatgaaataagctgggcatgtacagatggacatgattatactgcttagcttacggtctttcctgtaaagttgttttggaacaagacatttgagggggtttgttttatctaaagattctttgaatggcatacccgctggaaacagaagtgcaaggccctaggaataagtaaccaatcattgtgtcgacaaatgttccacgtctgcaggctggtgtatacataaaacatactccacattatacattacatgggcggctcacggtgcccttcaacatagtagaggatgaatgtccaagttcctcctggacagtgttctgtgtagggtagtggttttgatagaggattgtatatctagttggtatgttggtgatcacctttgttttgttttttaggaaccaagcctactacatgcattattgtctgtacccaaatgccaagttcagtgatctcctacgggattgagtggtgcgggcattttctaataataagccaagcccgtgagcaagatgtaggcgtgaacagtgttcgtcagtcgccgccaccgtctcccctcctgatccaatccaatggcgcgcctccacctcgtagccgtggcaatgggcttgctcttggccttgacgacggcgcaggcaccgggcgcgtccacgatgcccgcgcccatggcgcagcctccggcgacctcggcgcctcctcgtcccgcgccatccccgacccagaagaccgctccagctccggcgcccaatgccacggtacccgcccccgcctcgccgccggcgccgagctctatcgggcagacgccgaccgaggcgccgtcctcccctccgccgcccagcgccgcgtccagcgttgcctccgccttgtacgtggccgccgctatggcggctgtcgtgtttttcttctgaggtcggtactcggcgccgatggatccgccgcctatggtatggtacggtgcggtgtggatttgacacgatggctcccgctaccgctggtcgagtttgcttattaggatactagtagttaattaatagttgggttgatcagatcagatctagcgtttttgttgagtggggatattatttcttctacggatctgcacactagggttatgtcactatggttgccattgttattagggaaggtgcaaacttctaatttgaatcacatgatgttgatccaagggacgcataagggacgccaagcttattaaaacgataaaacgatggaacgctcatgggtgaaattttgacttttaaacgtttaaactttgtttaaacatagttttaaacaacataggaaaaataccaatatatcataatttcaga

SEQ ID NO: 3200 - DNA, 4201 bp, Zea Mays
gtcccggcaaaggcacccggtggccgcgtccagcgcctaccgtttccgggggggctcctcgcctcctcttcccccgtccacccattctcctggccgctcttccccttcgtcgtcgcactccgctagctcacctcctcgtccccatataaaccatatccctctccgggccccgcgcagccgccggcgacaagcgcgcaggagcagcagttgtcgcgcctcactgatggcgaccgccgtggcgtcgcagccgtgccaccttcccctcagcgccggcggagatcccaggtgcgcggccagcacttcgaatgttcatactctggagaaagtatatggtttcagattcatatgcagaagcattgttgatgtaaagactcacaaattccactcccgcatttcaaagaggaagtgctacttgaggaactcactgtcggagtgtgacaggaccatccacagtggtagatggttggagtttcggagacacaagggagtcttccagagaactagaaggatggttcacattattccattggcttctgatggtgatggcaaccatatatctgttaatggagctctgcaagttggttctacaagcaacattgatgaaataaagttgaaattgaataaagcattgcagagtgaagatatcagcaatggactcgtccagtcgatacatgatgctgcaagatctattgagttggctctcatagagcacagcaaattgccaaagagctcttggtttccaaagacatggctaggcgttgagaacaatgcttggataaaatcactgtcttaccaggctgctgtagactcattgttgaaagcagttatcgatgtttcatctcgtgggaatgacagagatagagatattaatgtgtttgttcaaaggagtttgtcccgcctgctcaccccccttgagagtgttatcaagaatgaattatctaagagggaacctgcattgtatgaatggtattcatccgatcaaaatcctttggtggtgagacaatttgtaaacatttttgaaaatgatccaatgttttactctgctacagcaatgtttgatctgtcttgctgcaatcacaaagtttggatcagcaaaagtttcttgtcagcaattctcttcaatggtgcctgatattattggtcgattcatggatatgcttcttgagtttgcccctctaagtaaagcatataacttggcgaaagatattggtcttcggagagaatttttgtataattttggtcctcgtgctgctgttcctaaacttggcaatgaccatggacttgaaatatcattttggattgaactggtgcagaagcaattactctgggctcttgatcgtgaaaagatatggtcaagactgacaacaagtgaaagcattgaggttctggaaaaggatcttgcaatatttggtttttttgttgctttgggtagaagcacacaaggatatttgtctttcaagggtttgactgatttggatgattcactgaatggtattgtaaggtatcttatcggtgggagtgtactatattatccacagctgtcctcgattagttcatatcaactgtatgtggaggtagtctgtgaagagctcgagtggcttcctttttacaatgatgatgttttaagtgcaaaaactgatactgaaggtagagaagaagtgcctaaaggagaagtcatatcaagagtcctaaatgtgtgctcttactggatgactagttttacaaagtacagctcatggcttgagaacccttcaaatgtgaaggctgcaaagttcctttctaagggacatgtcatgttgagtgactgcatgaaggagcttgacatatcaagaaatatgtcaaacgacagtggcttcctagaacctgaagaagaattggatactggaacagaattagcttcctttgacaagtcgcttgaaaatgttgaagaagctctggttaagttagaaaatttgcttcaagaattacatgtttccagttcgcactctggtaaggaggatctgaaggctgcatgctctgatcttgaaatgataagaagactgaagaaagaagctgagcttcttgaggcatcctttctagcaaaagcagaatatctggaggccgatgcaagtagcggatcactatctcctgcagaggaaggacctgtaaagacaagtagcaggacgaacgatacatcagcaccacaaaaaacaggaagcagggtggataataaacgtcgcccattttgggacttctttggtcggtctttgaaagttgatccagctcttgcagatcaggatctgatcactgtcgccaatgtggagaaggaaggcatggagtcaaatgacatcctccgcttcgaacagttaagacgtgagctgattgagttagaaaagagagtgcagaagagtgcggatgaagctcaaaaggaggaggagatggttgtcgcagaaaaaacaactgcaccatcgcctggatcatcagtttcttctcgtcagactaccaagaaagaaaatgtcataactaaatcagtggagaaggtcaaagagactacaacgactgtgttgcaggggacacaactattagcaattgatacaggagctgctatgggtttgctaaaaagagctcttattggggatgaactaactcagaaggaaaagcaggctcttcaaagaacattgacagatttggcgtctgtcgttcctataggaatactcatgcttttgccacttaccgccgttggtcatgctgctattttggctttcatccagagatatgtgccatcgatgatcccgtccacatatgcccccggtaggttggatctccttaggcagattgagaaggttaaggaaatggaagttgctgaaggcagcagtgaagatatattggaggaactgaacaaatgaaataagctgggcatgtacagatggacatgattatactgcttagcttacggtctttcctgtaaagttgttttggaacaagacatttgagggggtttgttttatctaaagattctttgaatggcatacccgctggaaacagaagtgcaaggccctaggaataagtaaccaatcattgtgtcgacaaatgttccacgtctgcaggctggtgtatacataaaacatactccacattatacattacatgggcggctcacggtgcccttcaacatagtagaggatgaatgtccaagttcctcctggacagtgttctgtgtagggtagtggttttgatagaggattgtatatctagttggtatgttggtgatcacctttgttttgttttttaggaaccaagcctactacatgcattattgtctgtacccaaatgccaagttcagtgatctcctacgggattgagtggtgcgggcattttctaataataagccaagcccgtgagcaagatgtaggcgtgaacagtgttcgtcagtcgccgccaccgtctcccctcctgatccaatccaatggcgcgcctccacctcgtagccgtggcaatgggcttgctcttggccttgacgacggcgcaggcaccgggcgcgtccacgatgcccgcgcccatggcgcagcctccggcgacctcggcgcctcctcgtcccgcgccatccccgacccagaagaccgctccagctccggcgcccaatgccacggtacccgcccccgcctcgccgccggcgccgagctctatcgggcagacgccgaccgaggcgccgtcctcccctccgccgcccagcgccgcgtccagcgttgcctccgccttgtacgtggccgccgctatggcggctgtcgtgtttttcttctgaggtcggtactcggcgccgatggatccgccgcctatggtatggtacggtgcggtgtggatttgacacgatggctcccgctaccgctggtcgagtttgcttattaggatactagtagttaattaatagttgggttgatcagatcagatctagcgtttttgttgagtggggatattatttcttctacggatctgcacactagggttatgtcactatggttgccattgttattagggaaggtgcaaacttctaatttgaatcacatgatgttgatccaagggacgcataagggacgccaagcttattaaaacgataaaacgatggaacgctcatgggtgaaattttgacttttaaacgtttaaactttgtttaaacatagttttaaacaacataggaaaaataccaatatatcataatttcaga

SEQ ID NO: 3201 - DNA, 4335 bp, Zea Mays
ggcaaaggcacccggtggccgcgtccagcgcctaccgtttccgggggggctcctcgcctcctcttcccccgtccacccattctcctggccgctcttccccttcgtcgtcgcactccgctagctcacctcctcgtccccatataaaccatatccctctccgggccccgcgcagccgccggcgacaagcgcgcaggagcagcagttgtcgcgcctcactgatggcgaccgccgtggcgtcgcagccgtgccaccttcccctcagcgccggcggagatcccagattcatatgcagaagcattgttgatgtaaagactcacaaattccactcccgcatttcaaagaggaagtgctacttgaggaactcactgtcggagtgtgacaggaccatccacagtggtagatggttggagtttcggagacacaagggagtcttccagagaactagaaggatggttcacattattccattggcttctgatggtgatggcaaccatatatctgttaatggagctctgcaagttggttctacaagcaacattgatgaaataaagttgaaattgaataaagcattgcagagtgaagatatcagcaatggactcgtccagtcgatacatgatgctgcaagatctattgagttggctctcatagagcacagcaaattgccaaagagctcttggtttccaaagacatggctaggcgttgagaacaatgcttggataaaatcactgtcttaccaggctgctgtagactcattgttgaaagcagttatcgatgtttcatctcgtgggaatgacagagatagagatattaatgtgtttgttcaaaggagtttgtcccgcctgctcaccccccttgagagtgttatcaagaatgaattatctaagagggaacctgcattgtatgaatggtattcatccgatcaaaatcctttggtggtgagacaatttgtaaacatttttgaaaatgatccaatgttttactctgctacagcaatatgccttgaaggcgagccgatgaatactagtgaaagtgatctttctctgcttatgctaggtttgatctgtcttgctgcaatcacaaagtttggatcagcaaaagtttcttgtcagcaattctcttcaatggtgcctgatattattggtcgattcatggatatgcttcttgagtttgcccctctaagtaaagcatataacttggcgaaagatattggtcttcggagagaatttttgtataattttggtcctcgtgctgctgttcctaaacttggcaatgaccatggacttgaaatatcattttggattgaactggtgcagaagcaattactctgggctcttgatcgtgaaaagatatggtcaagactgacaacaagtgaaagcattgaggttctggaaaaggatcttgcaatatttggtttttttgttgctttgggtagaagcacacaaggatatttgtctttcaagggtttgactgatttggatgattcactgaatggtattgtaaggtatcttatcggtgggagtgtactatattatccacagctgtcctcgattagttcatatcaactgtatgtggaggtagtctgtgaagagctcgagtggcttcctttttacaatgatgatgttttaagtgcaaaaactgatactgaaggtagagaagaagtgcctaaaggagaagtcatatcaagagtcctaaatgtgtgctcttactggatgactagttttacaaagtacagctcatggcttgagaacccttcaaatgtgaaggctgcaaagttcctttctaaggggtttgtaattatttggtcacgacaatgcgtatctatctcttgtttgcagatagggatttgtttttgtttttctaaaaagcagatacggatttgtgagtactgattaattttctactgcatgttaataattgtagacatgtcatgttgagtgactgcatgaaggagcttgacatatcaagaaatatgtcaaacgacagtggcttcctagaacctgaagaagaattggatactggaacagaattagcttcctttgacaagtcgcttgaaaatgttgaagaagctctggttaagttagaaaatttgcttcaagaattacatgtttccagttcgcactctggtaaggaggatctgaaggctgcatgctctgatcttgaaatgataagaagactgaagaaagaagctgagcttcttgaggcatcctttctagcaaaagcagaatatctggaggccgatgcaagtagcggatcactatctcctgcagaggaaggacctgtaaagacaagtagcaggacgaacgatacatcagcaccacaaaaaacaggaagcagggtggataataaacgtcgcccattttgggacttctttggtcggtctttgaaagttgatccagctcttgcagatcaggatctgatcactgtcgccaatgtggagaaggaaggcatggagtcaaatgacatcctccgcttcgaacagttaagacgtgagctgattgagttagaaaagagagtgcagaagagtgcggatgaagctcaaaaggaggaggagatggttgtcgcagaaaaaacaactgcaccatcgcctggatcatcagtttcttctcgtcagactaccaagaaagaaaatgtcataactaaatcagtggagaaggtcaaagagactacaacgactgtgttgcaggggacacaactattagcaattgatacaggagctgctatgggtttgctaaaaagagctcttattggggatgaactaactcagaaggaaaagcaggctcttcaaagaacattgacagatttggcgtctgtcgttcctataggaatactcatgcttttgccacttaccgccgttggtcatgctgctattttggctttcatccagagatatgtgccatcgatgatcccgtccacatatgcccccggtaggttggatctccttaggcagattgagaaggttaaggaaatggaagttgctgaaggcagcagtgaagatatattggaggaactgaacaaatgaaataagctgggcatgtacagatggacatgattatactgcttagcttacggtctttcctgtaaagttgttttggaacaagacatttgagggggtttgttttatctaaagattctttgaatggcatacccgctggaaacagaagtgcaaggccctaggaataagtaaccaatcattgtgtcgacaaatgttccacgtctgcaggctggtgtatacataaaacatactccacattatacattacatgggcggctcacggtgcccttcaacatagtagaggatgaatgtccaagttcctcctggacagtgttctgtgtagggtagtggttttgatagaggattgtatatctagttggtatgttggtgatcacctttgttttgttttttaggaaccaagcctactacatgcattattgtctgtacccaaatgccaagttcagtgatctcctacgggattgagtggtgcgggcattttctaataataagccaagcccgtgagcaagatgtaggcgtgaacagtgttcgtcagtcgccgccaccgtctcccctcctgatccaatccaatggcgcgcctccacctcgtagccgtggcaatgggcttgctcttggccttgacgacggcgcaggcaccgggcgcgtccacgatgcccgcgcccatggcgcagcctccggcgacctcggcgcctcctcgtcccgcgccatccccgacccagaagaccgctccagctccggcgcccaatgccacggtacccgcccccgcctcgccgccggcgccgagctctatcgggcagacgccgaccgaggcgccgtcctcccctccgccgcccagcgccgcgtccagcgttgcctccgccttgtacgtggccgccgctatggcggctgtcgtgtttttcttctgaggtcggtactcggcgccgatggatccgccgcctatggtatggtacggtgcggtgtggatttgacacgatggctcccgctaccgctggtcgagtttgcttattaggatactagtagttaattaatagttgggttgatcagatcagatctagcgtttttgttgagtggggatattatttcttctacggatctgcacactagggttatgtcactatggttgccattgttattagggaaggtgcaaacttctaatttgaatcacatgatgttgatccaagggacgcataagggacgccaagcttattaaaacgataaaacgatggaacgctcatgggtgaaattttgacttttaaacgtttaaactttgtttaaacatagttttaaacaacataggaaaaataccaatatatcataatttcaga

SEQ ID NO: 3202 - DNA, 4208 bp, Zea Mays
aggcacccggtggccgcgtccagcgcctaccgtttccgggggggctcctcgcctcctcttcccccgtccacccattctcctggccgctcttccccttcgtcgtcgcactccgctagctcacctcctcgtccccatataaaccatatccctctccgggccccgcgcagccgccggcgacaagcgcgcaggagcagcagttgtcgcgcctcactgatggcgaccgccgtggcgtcgcagccgtgccaccttcccctcagcgccggcggagatcccaggtgcgcggccagattcatatgcagaagcattgttgatgtaaagactcacaaattccactcccgcatttcaaagaggaagtgctacttgaggaactcactgtcggagtgtgacaggaccatccacagtggtagatggttggagtttcggagacacaagggagtcttccagagaactagaaggatggttcacattattccattggcttctgatggtgatggcaaccatatatctgttaatggagctctgcaagttggttctacaagcaacattgatgaaataaagttgaaattgaataaagcattgcagagtgaagatatcagcaatggactcgtccagtcgatacatgatgctgcaagatctattgagttggctctcatagagcacagcaaattgccaaagagctcttggtttccaaagacatggctaggcgttgagaacaatgcttggataaaatcactgtcttaccaggctgctgtagactcattgttgaaagcagttatcgatgtttcatctcgtgggaatgacagagatagagatattaatgtgtttgttcaaaggagtttgtcccgcctgctcaccccccttgagagtgttatcaagaatgaattatctaagagggaacctgcattgtatgaatggtattcatccgatcaaaatcctttggtggtgagacaatttgtaaacatttttgaaaatgatccaatgttttactctgctacagcaatatgccttgaaggcgagccgatgaatactagtgaaagtgatctttctctgcttatgctaggtttgatctgtcttgctgcaatcacaaagtttggatcagcaaaagtttcttgtcagcaattctcttcaatggtgcctgatattattggtcgattcatggatatgcttcttgagtttgcccctctaagtaaagcatataacttggcgaaagatattggtcttcggagagaatttttgtataattttggtcctcgtgctgctgttcctaaacttggcaatgaccatggacttgaaatatcattttggattgaactggtgcagaagcaattactctgggctcttgatcgtgaaaagatatggtcaagactgacaacaagtgaaagcattgaggttctggaaaaggatcttgcaatatttggtttttttgttgctttgggtagaagcacacaaggatatttgtctttcaagggtttgactgatttggatgattcactgaatggtattgtaaggtatcttatcggtgggagtgtactatattatccacagctgtcctcgattagttcatatcaactgtatgtggaggtagtctgtgaagagctcgagtggcttcctttttacaatgatgatgttttaagtgcaaaaactgatactgaaggtagagaagaagtgcctaaaggagaagtcatatcaagagtcctaaatgtgtgctcttactggatgactagttttacaaagtacagctcatggcttgagaacccttcaaatgtgaaggctgcaaagttcctttctaagggacatgtcatgttgagtgactgcatgaaggagcttgacatatcaagaaatatgtcaaacgacagtggcttcctagaacctgaagaagaattggatactggaacagaattagcttcctttgacaagtcgcttgaaaatgttgaagaagctctggttaagttagaaaatttgcttcaagaattacatgtttccagttcgcactctggtaaggaggatctgaaggctgcatgctctgatcttgaaatgataagaagactgaagaaagaagctgagcttcttgaggcatcctttctagcaaaagcagaatatctggaggccgatgcaagtagcggatcactatctcctgcagaggaaggacctgtaaagacaagtagcaggacgaacgatacatcagcaccacaaaaaacaggaagcagggtggataataaacgtcgcccattttgggacttctttggtcggtctttgaaagttgatccagctcttgcagatcaggatctgatcactgtcgccaatgtggagaaggaaggcatggagtcaaatgacatcctccgcttcgaacagttaagacgtgagctgattgagttagaaaagagagtgcagaagagtgcggatgaagctcaaaaggaggaggagatggttgtcgcagaaaaaacaactgcaccatcgcctggatcatcagtttcttctcgtcagactaccaagaaagaaaatgtcataactaaatcagtggagaaggtcaaagagactacaacgactgtgttgcaggggacacaactattagcaattgatacaggagctgctatgggtttgctaaaaagagctcttattggggatgaactaactcagaaggaaaagcaggctcttcaaagaacattgacagatttggcgtctgtcgttcctataggaatactcatgcttttgccacttaccgccgttggtcatgctgctattttggctttcatccagagatatgtgccatcgatgatcccgtccacatatgcccccggtaggttggatctccttaggcagattgagaaggttaaggaaatggaagttgctgaaggcagcagtgaagatatattggaggaactgaacaaatgaaataagctgggcatgtacagatggacatgattatactgcttagcttacggtctttcctgtaaagttgttttggaacaagacatttgagggggtttgttttatctaaagattctttgaatggcatacccgctggaaacagaagtgcaaggccctaggaataagtaaccaatcattgtgtcgacaaatgttccacgtctgcaggctggtgtatacataaaacatactccacattatacattacatgggcggctcacggtgcccttcaacatagtagaggatgaatgtccaagttcctcctggacagtgttctgtgtagggtagtggttttgatagaggattgtatatctagttggtatgttggtgatcacctttgttttgttttttaggaaccaagcctactacatgcattattgtctgtacccaaatgccaagttcagtgatctcctacgggattgagtggtgcgggcattttctaataataagccaagcccgtgagcaagatgtaggcgtgaacagtgttcgtcagtcgccgccaccgtctcccctcctgatccaatccaatggcgcgcctccacctcgtagccgtggcaatgggcttgctcttggccttgacgacggcgcaggcaccgggcgcgtccacgatgcccgcgcccatggcgcagcctccggcgacctcggcgcctcctcgtcccgcgccatccccgacccagaagaccgctccagctccggcgcccaatgccacggtacccgcccccgcctcgccgccggcgccgagctctatcgggcagacgccgaccgaggcgccgtcctcccctccgccgcccagcgccgcgtccagcgttgcctccgccttgtacgtggccgccgctatggcggctgtcgtgtttttcttctgaggtcggtactcggcgccgatggatccgccgcctatggtatggtacggtgcggtgtggatttgacacgatggctcccgctaccgctggtcgagtttgcttattaggatactagtagttaattaatagttgggttgatcagatcagatctagcgtttttgttgagtggggatattatttcttctacggatctgcacactagggttatgtcactatggttgccattgttattagggaaggtgcaaacttctaatttgaatcacatgatgttgatccaagggacgcataagggacgccaagcttattaaaacgataaaacgatggaacgctcatgggtgaaattttgacttttaaacgtttaaactttgtttaaacatagttttaaacaacataggaaaaataccaatatatcataatttcaga

SEQ ID NO: 3203 - DNA, 4117 bp, Zea Mays
gcgtccagcgcctaccgtttccgggggggctcctcgcctcctcttcccccgtccacccattctcctggccgctcttccccttcgtcgtcgcactccgctagctcacctcctcgtccccatataaaccatatccctctccgggccccgcgcagccgccggcgacaagcgcgcaggagcagcagttgtcgcgcctcactgatggcgaccgccgtggcgtcgcagccgtgccaccttcccctcagcgccggcggagatcccaggtgcgcggccagcacttcgaatgttcatactctggagaaagtatatggtttcagattcatatgcagaagcattgttgatgtaaagactcacaaattccactcccgcatttcaaagaggaagtgctacttgaggaactcactgtcggagtgtgacaggaccatccacagtggtagatggttggagtttcggagacacaagggagtcttccagagaactagaaggatggttcacattattccattggcttctgatggtgatggcaaccatatatctgttaatggagctctgcaagttggttctacaagcaacattgatgaaataaagttgaaattgaataaagcattgcagagtgaagatatcagcaatggactcgtccagtcgatacatgatgctgcaagatctattgagttggctctcatagagcacagcaaattgccaaagagctcttggtttccaaagacatggctaggcgttgagaacaatgcttggataaaatcactgtcttaccaggctgctgtagactcattgttgaaagcagttatcgatgtttcatctcgtgggaatgacagagatagagatattaatgtgtttgttcaaaggagtttgtcccgcctgctcaccccccttgagagtgttatcaagaatgaattatctaagagggaacctgcattgtatgaatggtattcatccgatcaaaatcctttggtggtttgatctgtcttgctgcaatcacaaagtttggatcagcaaaagtttcttgtcagcaattctcttcaatggtgcctgatattattggtcgattcatggatatgcttcttgagtttgcccctctaagtaaagcatataacttggcgaaagatattggtcttcggagagaatttttgtataattttggtcctcgtgctgctgttcctaaacttggcaatgaccatggacttgaaatatcattttggattgaactggtgcagaagcaattactctgggctcttgatcgtgaaaagatatggtcaagactgacaacaagtgaaagcattgaggttctggaaaaggatcttgcaatatttggtttttttgttgctttgggtagaagcacacaaggatatttgtctttcaagggtttgactgatttggatgattcactgaatggtattgtaaggtatcttatcggtgggagtgtactatattatccacagctgtcctcgattagttcatatcaactgtatgtggaggtagtctgtgaagagctcgagtggcttcctttttacaatgatgatgttttaagtgcaaaaactgatactgaaggtagagaagaagtgcctaaaggagaagtcatatcaagagtcctaaatgtgtgctcttactggatgactagttttacaaagtacagctcatggcttgagaacccttcaaatgtgaaggctgcaaagttcctttctaagggacatgtcatgttgagtgactgcatgaaggagcttgacatatcaagaaatatgtcaaacgacagtggcttcctagaacctgaagaagaattggatactggaacagaattagcttcctttgacaagtcgcttgaaaatgttgaagaagctctggttaagttagaaaatttgcttcaagaattacatgtttccagttcgcactctggtaaggaggatctgaaggctgcatgctctgatcttgaaatgataagaagactgaagaaagaagctgagcttcttgaggcatcctttctagcaaaagcagaatatctggaggccgatgcaagtagcggatcactatctcctgcagaggaaggacctgtaaagacaagtagcaggacgaacgatacatcagcaccacaaaaaacaggaagcagggtggataataaacgtcgcccattttgggacttctttggtcggtctttgaaagttgatccagctcttgcagatcaggatctgatcactgtcgccaatgtggagaaggaaggcatggagtcaaatgacatcctccgcttcgaacagttaagacgtgagctgattgagttagaaaagagagtgcagaagagtgcggatgaagctcaaaaggaggaggagatggttgtcgcagaaaaaacaactgcaccatcgcctggatcatcagtttcttctcgtcagactaccaagaaagaaaatgtcataactaaatcagtggagaaggtcaaagagactacaacgactgtgttgcaggggacacaactattagcaattgatacaggagctgctatgggtttgctaaaaagagctcttattggggatgaactaactcagaaggaaaagcaggctcttcaaagaacattgacagatttggcgtctgtcgttcctataggaatactcatgcttttgccacttaccgccgttggtcatgctgctattttggctttcatccagagatatgtgccatcgatgatcccgtccacatatgcccccggtaggttggatctccttaggcagattgagaaggttaaggaaatggaagttgctgaaggcagcagtgaagatatattggaggaactgaacaaatgaaataagctgggcatgtacagatggacatgattatactgcttagcttacggtctttcctgtaaagttgttttggaacaagacatttgagggggtttgttttatctaaagattctttgaatggcatacccgctggaaacagaagtgcaaggccctaggaataagtaaccaatcattgtgtcgacaaatgttccacgtctgcaggctggtgtatacataaaacatactccacattatacattacatgggcggctcacggtgcccttcaacatagtagaggatgaatgtccaagttcctcctggacagtgttctgtgtagggtagtggttttgatagaggattgtatatctagttggtatgttggtgatcacctttgttttgttttttaggaaccaagcctactacatgcattattgtctgtacccaaatgccaagttcagtgatctcctacgggattgagtggtgcgggcattttctaataataagccaagcccgtgagcaagatgtaggcgtgaacagtgttcgtcagtcgccgccaccgtctcccctcctgatccaatccaatggcgcgcctccacctcgtagccgtggcaatgggcttgctcttggccttgacgacggcgcaggcaccgggcgcgtccacgatgcccgcgcccatggcgcagcctccggcgacctcggcgcctcctcgtcccgcgccatccccgacccagaagaccgctccagctccggcgcccaatgccacggtacccgcccccgcctcgccgccggcgccgagctctatcgggcagacgccgaccgaggcgccgtcctcccctccgccgcccagcgccgcgtccagcgttgcctccgccttgtacgtggccgccgctatggcggctgtcgtgtttttcttctgaggtcggtactcggcgccgatggatccgccgcctatggtatggtacggtgcggtgtggatttgacacgatggctcccgctaccgctggtcgagtttgcttattaggatactagtagttaattaatagttgggttgatcagatcagatctagcgtttttgttgagtggggatattatttcttctacggatctgcacactagggttatgtcactatggttgccattgttattagggaaggtgcaaacttctaatttgaatcacatgatgttgatccaagggacgcataagggacgccaagcttattaaaacgataaaacgatggaacgctcatgggtgaaattttgacttttaaacgtttaaactttgtttaaacatagttttaaacaacataggaaaaataccaatatatcataatttcaga

SEQ ID NO: 3204 - DNA, 4111 bp, Zea Mays
cgtccagcgcctaccgtttccgggggggctcctcgcctcctcttcccccgtccacccattctcctggccgctcttccccttcgtcgtcgcactccgctagctcacctcctcgtccccatataaaccatatccctctccgggccccgcgcagccgccggcgacaagcgcgcaggagcagcagttgtcgcgcctcactgatggcgaccgccgtggcgtcgcagccgtgccaccttcccctcagcgccggcggagatcccaggtgcgcggccagcacttcgaatgttcatactctggagaaagtatatggtttcagattcatatgcagaagcattgttgatgtaaagactcacaaattccactcccgcatttcaaagaggaagtgctacttgaggaactcactgtcggagtgtgacaggaccatccacagtggtagatggttggagtttcggagacacaagggagtcttccagagaactagaaggatggttcacattattccattggcttctgatggtgatggcaaccatatatctgttaatggagctctgcaagttggttctacaagcaacattgatgaaataaagttgaaattgaataaagcattgcagagtgaagatatcagcaatggactcgtccagtcgatacatgatgctgcaagatctattgagttggctctcatagagcacagcaaattgccaaagagctcttggtttccaaagacatggctaggcgttgagaacaatgcttggataaaatcactgtcttaccaggctgctgtagactcattgttgaaagcagttatcgatgtttcatctcgtgggaatgacagagatagagatattaatgtgtttgttcaaaggagtttgtcccgcctgctcaccccccttgagagtgttatcaagaatgaattatctaagagggaacctgcattgtatgaatggtattcatccgatcaaaatcctttggtggtgagacaatttgtaaacatttttgaaaatgatccaatgttttactctgctacagcaatatgccttgaaggcgagccgatgaatactagtgaaagtgatctttctctgcttatgctaggtttgatctgtcttgctgcaatcacaaagtttggatcagcaaaagtttcttgtcagcaattctcttcaatggtgcctgatattattggtcgattcatggatatgcttcttgagtttgcccctctaagtaaagcatataacttggcgaaagatattggtcttcggagagaatttttgtataattttggtcctcgtgctgctgttcctaaacttggcaatgaccatggacttgaaatatcattttggattgaactggtgcagaagcaattactctgggctcttgatcgtgaaaagatatggtcaagactgacaacaagtgaaagcattgaggttctggaaaaggatcttgcaatatttggtttttttgttgctttgggtagaagcacacaaggatatttgtctttcaagggtttgactgatttggatgattcactgaatggtattgtaaggtatcttatcggtgggagtgtactatattatccacagctgtcctcgattagttcatatcaactgtatgtggaggtagtctgtgaagagctcgagtggcttcctttttacaatgatgatgttttaagtgcaaaaactgatactgaaggtagagaagaagtgcctaaaggagaagtcatatcaagagtcctaaatgtgtgctcttactggatgactagttttacaaagtacagctcatggcttgagaacccttcaaatgtgaaggctgcaaagttcctttctaagggacatgtcatgttgagtgactgcatgaaggagcttgacatatcaagaaatatgtcaaacgacagtggcttcctagaacctgaagaagaattggatactggaacagaattagcttcctttgacaagtcgcttgaaaatgttgaagaagctctggttaagttagaaaatttgcttcaagaattacatgtttccagttcgcactctggtaaggaggatctgaaggctgcatgctctgatcttgaaatgataagaagactgaagaaagaagctgagcttcttgaggcatcctttctagcaaaagcagaatatctggaggccgatgcaagtagcggatcactatctcctgcagaggaaggacctgtaaagacaagtagcaggacgaacgatacatcagcaccacaaaaaacaggaagcagggtggataataaacgtcgcccattttgggacttctttggtcggtctttgaaagttgatccagctcttgcagatcaggatctgatcactgtcgccaatgtggagaaggaaggcatggagtcaaatgacatcctccgcttcgaacagttaagacgtgagctgattgagttagaaaagagagtgcagaagagtgcggatgaagctcaaaaggaggagactgtgttgcaggggacacaactattagcaattgatacaggagctgctatgggtttgctaaaaagagctcttattggggatgaactaactcagaaggaaaagcaggctcttcaaagaacattgacagatttggcgtctgtcgttcctataggaatactcatgcttttgccacttaccgccgttggtcatgctgctattttggctttcatccagagatatgtgccatcgatgatcccgtccacatatgcccccggtaggttggatctccttaggcagattgagaaggttaaggaaatggaagttgctgaaggcagcagtgaagatatattggaggaactgaacaaatgaaataagctgggcatgtacagatggacatgattatactgcttagcttacggtctttcctgtaaagttgttttggaacaagacatttgagggggtttgttttatctaaagattctttgaatggcatacccgctggaaacagaagtgcaaggccctaggaataagtaaccaatcattgtgtcgacaaatgttccacgtctgcaggctggtgtatacataaaacatactccacattatacattacatgggcggctcacggtgcccttcaacatagtagaggatgaatgtccaagttcctcctggacagtgttctgtgtagggtagtggttttgatagaggattgtatatctagttggtatgttggtgatcacctttgttttgttttttaggaaccaagcctactacatgcattattgtctgtacccaaatgccaagttcagtgatctcctacgggattgagtggtgcgggcattttctaataataagccaagcccgtgagcaagatgtaggcgtgaacagtgttcgtcagtcgccgccaccgtctcccctcctgatccaatccaatggcgcgcctccacctcgtagccgtggcaatgggcttgctcttggccttgacgacggcgcaggcaccgggcgcgtccacgatgcccgcgcccatggcgcagcctccggcgacctcggcgcctcctcgtcccgcgccatccccgacccagaagaccgctccagctccggcgcccaatgccacggtacccgcccccgcctcgccgccggcgccgagctctatcgggcagacgccgaccgaggcgccgtcctcccctccgccgcccagcgccgcgtccagcgttgcctccgccttgtacgtggccgccgctatggcggctgtcgtgtttttcttctgaggtcggtactcggcgccgatggatccgccgcctatggtatggtacggtgcggtgtggatttgacacgatggctcccgctaccgctggtcgagtttgcttattaggatactagtagttaattaatagttgggttgatcagatcagatctagcgtttttgttgagtggggatattatttcttctacggatctgcacactagggttatgtcactatggttgccattgttattagggaaggtgcaaacttctaatttgaatcacatgatgttgatccaagggacgcataagggacgccaagcttattaaaacgataaaacgatggaacgctcatgggtgaaattttgacttttaaacgtttaaactttgtttaaacatagttttaaacaacataggaaaaataccaatatatcataatttcaga

SEQ ID NO: 3205 - DNA, 4197 bp, Zea Mays
ccgggggggctcctcgcctcctcttcccccgtccacccattctcctggccgctcttccccttcgtcgtcgcactccgctagctcacctcctcgtccccatataaaccatatccctctccgggccccgcgcagccgccggcgacaagcgcgcaggagcagcagttgtcgcgcctcactgatggcgaccgccgtggcgtcgcagccgtgccaccttcccctcagcgccggcggagatcccaggtgcgcggccagcacttcgaatgttcatactctggagaaagtatatggtttcagattcatatgcagaagcattgttgatgtaaagactcacaaattccactcccgcatttcaaagaggaagtgctacttgaggaactcactgtcggagtgtgacaggaccatccacagtggtagatggttggagtttcggagacacaagggagtcttccagagaactagaaggatggttcacattattccattggcttctgatggtgatggcaaccatatatctgttaatggagctctgcaagttggttctacaagcaacattgatgaaataaagttgaaattgaataaagcattgcagagtgaagatatcagcaatggactcgtccagtcgatacatgatgctgcaagatctattgagttggctctcatagagcacagcaaattgccaaagagctcttggtttccaaagacatggctaggcgttgagaacaatgcttggataaaatcactgtcttaccaggctgctgtagactcattgttgaaagcagttatcgatgtttcatctcgtgggaatgacagagatagagatattaatgtgtttgttcaaaggagtttgtcccgcctgctcaccccccttgagagtgttatcaagaatgaattatctaagagggaacctgcattgtatgaatggtattcatccgatcaaaatcctttggtggtgagacaatttgtaaacatttttgaaaatgatccaatgttttactctgctacagcaatatgccttgaaggcgagccgatgaatactagtgaaagtgatctttctctgcttatgctaggtttgatctgtcttgctgcaatcacaaagtttggatcagcaaaagtttcttgtcagcaattctcttcaatggtgcctgatattattggtcgattcatggatatgcttcttgagtttgcccctctaagtaaagcatataacttggcgaaagatattggtcttcggagagaatttttgtataattttggtcctcgtgctgctgttcctaaacttggcaatgaccatggacttgaaatatcattttggattgaactggtgcagaagcaattactctgggctcttgatcgtgaaaagatatggtcaagactgacaacaagtgaaagcattgaggttctggaaaaggatcttgcaatatttggtttttttgttgctttgggtagaagcacacaaggatatttgtctttcaagggtttgactgatttggatgattcactgaatggtattgtaaggtatcttatcggtgggagtgtactatattatccacagctgtcctcgattagttcatatcaactgtatgtggaggtagtctgtgaagagctcgagtggcttcctttttacaatgatgatgttttaagtgcaaaaactgatactgaaggtagagaagaagtgcctaaaggagaagtcatatcaagagtcctaaatgtgtgctcttactggatgactagttttacaaagtacagctcatggcttgagaacccttcaaatgtgaaggctgcaaagttcctttctaagggacatgtcatgttgagtgactgcatgaaggagcttgacatatcaagtggcttcctagaacctgaagaagaattggatactggaacagaattagcttcctttgacaagtcgcttgaaaatgttgaagaagctctggttaagttagaaaatttgcttcaagaattacatgtttccagttcgcactctggtaaggaggatctgaaggctgcatgctctgatcttgaaatgataagaagactgaagaaagaagctgagcttcttgaggcatcctttctagcaaaagcagaatatctggaggccgatgcaagtagcggatcactatctcctgcagaggaaggacctgtaaagacaagtagcaggacgaacgatacatcagcaccacaaaaaacaggaagcagggtggataataaacgtcgcccattttgggacttctttggtcggtctttgaaagttgatccagctcttgcagatcaggatctgatcactgtcgccaatgtggagaaggaaggcatggagtcaaatgacatcctccgcttcgaacagttaagacgtgagctgattgagttagaaaagagagtgcagaagagtgcggatgaagctcaaaaggaggaggagatggttgtcgcagaaaaaacaactgcaccatcgcctggatcatcagtttcttctcgtcagactaccaagaaagaaaatgtcataactaaatcagtggagaaggtcaaagagactacaacgactgtgttgcaggggacacaactattagcaattgatacaggagctgctatgggtttgctaaaaagagctcttattggggatgaactaactcagaaggaaaagcaggctcttcaaagaacattgacagatttggcgtctgtcgttcctataggaatactcatgcttttgccacttaccgccgttggtcatgctgctattttggctttcatccagagatatgtgccatcgatgatcccgtccacatatgcccccggtaggttggatctccttaggcagattgagaaggttaaggaaatggaagttgctgaaggcagcagtgaagatatattggaggaactgaacaaatgaaataagctgggcatgtacagatggacatgattatactgcttagcttacggtctttcctgtaaagttgttttggaacaagacatttgagggggtttgttttatctaaagattctttgaatggcatacccgctggaaacagaagtgcaaggccctaggaataagtaaccaatcattgtgtcgacaaatgttccacgtctgcaggctggtgtatacataaaacatactccacattatacattacatgggcggctcacggtgcccttcaacatagtagaggatgaatgtccaagttcctcctggacagtgttctgtgtagggtagtggttttgatagaggattgtatatctagttggtatgttggtgatcacctttgttttgttttttaggaaccaagcctactacatgcattattgtctgtacccaaatgccaagttcagtgatctcctacgggattgagtggtgcgggcattttctaataataagccaagcccgtgagcaagatgtaggcgtgaacagtgttcgtcagtcgccgccaccgtctcccctcctgatccaatccaatggcgcgcctccacctcgtagccgtggcaatgggcttgctcttggccttgacgacggcgcaggcaccgggcgcgtccacgatgcccgcgcccatggcgcagcctccggcgacctcggcgcctcctcgtcccgcgccatccccgacccagaagaccgctccagctccggcgcccaatgccacggtacccgcccccgcctcgccgccggcgccgagctctatcgggcagacgccgaccgaggcgccgtcctcccctccgccgcccagcgccgcgtccagcgttgcctccgccttgtacgtggccgccgctatggcggctgtcgtgtttttcttctgaggtcggtactcggcgccgatggatccgccgcctatggtatggtacggtgcggtgtggatttgacacgatggctcccgctaccgctggtcgagtttgcttattaggatactagtagttaattaatagttgggttgatcagatcagatctagcgtttttgttgagtggggatattatttcttctacggatctgcacactagggttatgtcactatggttgccattgttattagggaaggtgcaaacttctaatttgaatcacatgatgttgatccaagggacgcataagggacgccaagcttattaaaacgataaaacgatggaacgctcatgggtgaaattttgacttttaaacgtttaaactttgtttaaacatagttttaaacaacataggaaaaataccaatatatcataatttcaga

SEQ ID NO: 3206 - DNA, 4133 bp, Zea Mays
ggggggctcctcgcctcctcttcccccgtccacccattctcctggccgctcttccccttcgtcgtcgcactccgctagctcacctcctcgtccccatataaaccatatccctctccgggccccgcgcagccgccggcgacaagcgcgcaggagcagcagttgtcgcgcctcactgatggcgaccgccgtggcgtcgcagccgtgccaccttcccctcagcgccggcggagatcccaggtgcgcggccagcacttcgaatgttcatactctggagaaagtatatggtttcagattcatatgcagaagcattgttgatgtaaagactcacaaattccactcccgcatttcaaagaggaagtgctacttgaggaactcactgtcggagtgtgacaggaccatccacagtggtagatggttggagtttcggagacacaagggagtcttccagagaactagaaggatggttcacattattccattggcttctgatggtgatggcaaccatatatctgttaatggagctctgcaagttggttctacaagcaacattgatgaaataaagttgaaattgaataaagcattgcagagtgaagatatcagcaatggactcgtccagtcgatacatgatgctgcaagatctattgagttggctctcatagagcacagcaaattgccaaagagctcttggtttccaaagacatggctaggcgttgagaacaatgcttggataaaatcactgtcttaccaggctgctgtagactcattgttgaaagcagttatcgatgtttcatctcgtgggaatgacagagatagagatattaatgtgtttgttcaaaggagtttgtcccgcctgctcaccccccttgagagtgttatcaagaatgaattatctaagagggaacctgcattgtatgaatggtattcatccgatcaaaatcctttggtggtgagacaatttgtaaacatttttgaaaatgatccaatgttttactctgctacagcaatatgccttgaaggcgagccgatgaatactagtgaaagtgatctttctctgcttatgctaggtttgatctgtcttgctgcaatcacaaagtttggatcagcaaaagtttcttgtcagcaattctcttcaatggtgcctgatattattggtcgattcatggatatgcttcttgagtttgcccctctaagtaaagcatataacttggcgaaagatattggtcttcggagagaatttttgtataattttggtcctcgtgctgctgttcctaaacttggcaatgaccatggacttgaaatatcattttggattgaactggtgcagaagcaattactctgggctcttgatcgtgaaaagatatggtcaagactgacaacaagtgaaagcattgaggttctggaaaaggatcttgcaatatttggtttttttgttgctttgggtagaagcacacaaggatatttgtctttcaagggtttgactgatttggatgattcactgaatggtattgtaaggtatcttatcggtgggagtgtactatattatccacagctgtcctcgattagttcatatcaactgtatgtggaggtagtctgtgaagagctcgagtggcttcctttttacaatgatgatgttttaagtgcaaaaactgatactgaaggtagagaagaagtgcctaaaggagaagtcatatcaagagtcctaaatgtgtgctcttactggatgactagttttacaaagtacagctcatggcttgagaacccttcaaatgtgaaggctgcaaagttcctttctaagggacatgtcatgttgagtgactgcatgaaggagcttgacatatcaagaaatatgtcaaacgacagtggcttcctagaacctgaagaagaattggatactggaacagaattagcttcctttgacaagtcgcttgaaaatgttgaagaagctctggttaagttagaaaatttgcttcaagaattacatgtttccagttcgcactctggtaaggaggatctgaaggctgcatgctctgatcttgaaatgataagaagactgaagaaagaagctgagcttcttgaggcatcctttctagcaaaagcagaatatctggaggccgatgcaagtagcggatcactatctcctgcagaggaaggacctgtaaagacaagtagcaggacgaacgatacatcagcaccacaaaaaacaggaagcagctgatcactgtcgccaatgtggagaaggaaggcatggagtcaaatgacatcctccgcttcgaacagttaagacgtgagctgattgagttagaaaagagagtgcagaagagtgcggatgaagctcaaaaggaggaggagatggttgtcgcagaaaaaacaactgcaccatcgcctggatcatcagtttcttctcgtcagactaccaagaaagaaaatgtcataactaaatcagtggagaaggtcaaagagactacaacgactgtgttgcaggggacacaactattagcaattgatacaggagctgctatgggtttgctaaaaagagctcttattggggatgaactaactcagaaggaaaagcaggctcttcaaagaacattgacagatttggcgtctgtcgttcctataggaatactcatgcttttgccacttaccgccgttggtcatgctgctattttggctttcatccagagatatgtgccatcgatgatcccgtccacatatgcccccggtaggttggatctccttaggcagattgagaaggttaaggaaatggaagttgctgaaggcagcagtgaagatatattggaggaactgaacaaatgaaataagctgggcatgtacagatggacatgattatactgcttagcttacggtctttcctgtaaagttgttttggaacaagacatttgagggggtttgttttatctaaagattctttgaatggcatacccgctggaaacagaagtgcaaggccctaggaataagtaaccaatcattgtgtcgacaaatgttccacgtctgcaggctggtgtatacataaaacatactccacattatacattacatgggcggctcacggtgcccttcaacatagtagaggatgaatgtccaagttcctcctggacagtgttctgtgtagggtagtggttttgatagaggattgtatatctagttggtatgttggtgatcacctttgttttgttttttaggaaccaagcctactacatgcattattgtctgtacccaaatgccaagttcagtgatctcctacgggattgagtggtgcgggcattttctaataataagccaagcccgtgagcaagatgtaggcgtgaacagtgttcgtcagtcgccgccaccgtctcccctcctgatccaatccaatggcgcgcctccacctcgtagccgtggcaatgggcttgctcttggccttgacgacggcgcaggcaccgggcgcgtccacgatgcccgcgcccatggcgcagcctccggcgacctcggcgcctcctcgtcccgcgccatccccgacccagaagaccgctccagctccggcgcccaatgccacggtacccgcccccgcctcgccgccggcgccgagctctatcgggcagacgccgaccgaggcgccgtcctcccctccgccgcccagcgccgcgtccagcgttgcctccgccttgtacgtggccgccgctatggcggctgtcgtgtttttcttctgaggtcggtactcggcgccgatggatccgccgcctatggtatggtacggtgcggtgtggatttgacacgatggctcccgctaccgctggtcgagtttgcttattaggatactagtagttaattaatagttgggttgatcagatcagatctagcgtttttgttgagtggggatattatttcttctacggatctgcacactagggttatgtcactatggttgccattgttattagggaaggtgcaaacttctaatttgaatcacatgatgttgatccaagggacgcataagggacgccaagcttattaaaacgataaaacgatggaacgctcatgggtgaaattttgacttttaaacgtttaaactttgtttaaacatagttttaaacaacataggaaaaataccaatatatcataatttcaga

SEQ ID NO: 3207 - DNA, 4196 bp, Zea Mays
ggctcctcgcctcctcttcccccgtccacccattctcctggccgctcttccccttcgtcgtcgcactccgctagctcacctcctcgtccccatataaaccatatccctctccgggccccgcgcagccgccggcgacaagcgcgcaggagcagcagttgtcgcgcctcactgatggcgaccgccgtggcgtcgcagccgtgccaccttcccctcagcgccggcggagatcccagcacttcgaatgttcatactctggagaaagtatatggtttcagattcatatgcagaagcattgttgatgtaaagactcacaaattccactcccgcatttcaaagaggaagtgctacttgaggaactcactgtcggagtgtgacaggaccatccacagtggtagatggttggagtttcggagacacaagggagtcttccagagaactagaaggatggttcacattattccattggcttctgatggtgatggcaaccatatatctgttaatggagctctgcaagttggttctacaagcaacattgatgaaataaagttgaaattgaataaagcattgcagagtgaagatatcagcaatggactcgtccagtcgatacatgatgctgcaagatctattgagttggctctcatagagcacagcaaattgccaaagagctcttggtttccaaagacatggctaggcgttgagaacaatgcttggataaaatcactgtcttaccaggctgctgtagactcattgttgaaagcagttatcgatgtttcatctcgtgggaatgacagagatagagatattaatgtgtttgttcaaaggagtttgtcccgcctgctcaccccccttgagagtgttatcaagaatgaattatctaagagggaacctgcattgtatgaatggtattcatccgatcaaaatcctttggtggtgagacaatttgtaaacatttttgaaaatgatccaatgttttactctgctacagcaatatgccttgaaggcgagccgatgaatactagtgaaagtgatctttctctgcttatgctaggtttgatctgtcttgctgcaatcacaaagtttggatcagcaaaagtttcttgtcagcaattctcttcaatggtgcctgatattattggtcgattcatggatatgcttcttgagtttgcccctctaagtaaagcatataacttggcgaaagatattggtcttcggagagaatttttgtataattttggtcctcgtgctgctgttcctaaacttggcaatgaccatggacttgaaatatcattttggattgaactggtgcagaagcaattactctgggctcttgatcgtgaaaagatatggtcaagactgacaacaagtgaaagcattgaggttctggaaaaggatcttgcaatatttggtttttttgttgctttgggtagaagcacacaaggatatttgtctttcaagggtttgactgatttggatgattcactgaatggtattgtaaggtatcttatcggtgggagtgtactatattatccacagctgtcctcgattagttcatatcaactgtatgtggaggtagtctgtgaagagctcgagtggcttcctttttacaatgatgatgttttaagtgcaaaaactgatactgaaggtagagaagaagtgcctaaaggagaagtcatatcaagagtcctaaatgtgtgctcttactggatgactagttttacaaagtacagctcatggcttgagaacccttcaaatgtgaaggctgcaaagttcctttctaagggacatgtcatgttgagtgactgcatgaaggagcttgacatatcaagaaatatgtcaaacgacagtggcttcctagaacctgaagaagaattggatactggaacagaattagcttcctttgacaagtcgcttgaaaatgttgaagaagctctggttaagttagaaaatttgcttcaagaattacatgtttccagttcgcactctggtaaggaggatctgaaggctgcatgctctgatcttgaaatgataagaagactgaagaaagaagctgagcttcttgaggcatcctttctagcaaaagcagaatatctggaggccgatgcaagtagcggatcactatctcctgcagaggaaggacctgtaaagacaagtagcaggacgaacgatacatcagcaccacaaaaaacaggaagcagggtggataataaacgtcgcccattttgggacttctttggtcggtctttgaaagttgatccagctcttgcagatcaggatctgatcactgtcgccaatgtggagaaggaaggcatggagtcaaatgacatcctccgcttcgaacagttaagacgtgagctgattgagttagaaaagagagtgcagaagagtgcggatgaagctcaaaaggaggaggagatggttgtcgcagaaaaaacaactgcaccatcgcctggatcatcagtttcttctcgtcagactaccaagaaagaaaatgtcataactaaatcagtggagaaggtcaaagagactacaacgactgtgttgcaggggacacaactattagcaattgatacaggagctgctatgggtttgctaaaaagagctcttattggggatgaactaactcagaaggaaaagcaggctcttcaaagaacattgacagatttggcgtctgtcgttcctataggaatactcatgcttttgccacttaccgccgttggtcatgctgctattttggctttcatccagagatatgtgccatcgatgatcccgtccacatatgcccccggtaggttggatctccttaggcagattgagaaggttaaggaaatggaagttgctgaaggcagcagtgaagatatattggaggaactgaacaaatgaaataagctgggcatgtacagatggacatgattatactgcttagcttacggtctttcctgtaaagttgttttggaacaagacatttgagggggtttgttttatctaaagattctttgaatggcatacccgctggaaacagaagtgcaaggccctaggaataagtaaccaatcattgtgtcgacaaatgttccacgtctgcaggctggtgtatacataaaacatactccacattatacattacatgggcggctcacggtgcccttcaacatagtagaggatgaatgtccaagttcctcctggacagtgttctgtgtagggtagtggttttgatagaggattgtatatctagttggtatgttggtgatcacctttgttttgttttttaggaaccaagcctactacatgcattattgtctgtacccaaatgccaagttcagtgatctcctacgggattgagtggtgcgggcattttctaataataagccaagcccgtgagcaagatgtaggcgtgaacagtgttcgtcagtcgccgccaccgtctcccctcctgatccaatccaatggcgcgcctccacctcgtagccgtggcaatgggcttgctcttggccttgacgacggcgcaggcaccgggcgcgtccacgatgcccgcgcccatggcgcagcctccggcgacctcggcgcctcctcgtcccgcgccatccccgacccagaagaccgctccagctccggcgcccaatgccacggtacccgcccccgcctcgccgccggcgccgagctctatcgggcagacgccgaccgaggcgccgtcctcccctccgccgcccagcgccgcgtccagcgttgcctccgccttgtacgtggccgccgctatggcggctgtcgtgtttttcttctgaggtcggtactcggcgccgatggatccgccgcctatggtatggtacggtgcggtgtggatttgacacgatggctcccgctaccgctggtcgagtttgcttattaggatactagtagttaattaatagttgggttgatcagatcagatctagcgtttttgttgagtggggatattatttcttctacggatctgcacactagggttatgtcactatggttgccattgttattagggaaggtgcaaacttctaatttgaatcacatgatgttgatccaagggacgcataagggacgccaagcttattaaaacgataaaacgatggaacgctcatgggtgaaattttgacttttaaacgtttaaactttgtttaaacatagttttaaacaacataggaaaaataccaatatatcataatttcaga

SEQ ID NO: 3208 - DNA, 4157 bp, Zea Mays
gtccacccattctcctggccgctcttccccttcgtcgtcgcactccgctagctcacctcctcgtccccatataaaccatatccctctccgggccccgcgcagccgccggcgacaagcgcgcaggagcagcagttgtcgcgcctcactgatggcgaccgccgtggcgtcgcagccgtgccaccttcccctcagcgccggcggagatcccaggtgcgcggccagcacttcgaatgttcatactctggagaaagtatatggtttcagattcatatgcagaagcattgttgatgtaaagactcacaaattccactcccgcatttcaaagaggaagtgctacttgaggaactcactgtcggagtgtgacaggaccatccacagtggtagatggttggagtttcggagacacaagggagtcttccagagaactagaaggatggttcacattattccattggcttctgatggtgatggcaaccatatatctgttaatggagctctgcaagttggttctacaagcaacattgatgaaataaagttgaaattgaataaagcattgcagagtgaagatatcagcaatggactcgtccagtcgatacatgatgctgcaagatctattgagttggctctcatagagcacagcaaattgccaaagagctcttggtttccaaagacatggctaggcgttgagaacaatgcttggataaaatcactgtcttaccaggctgctgtagactcattgttgaaagcagttatcgatgtttcatctcgtgggaatgacagagatagagatattaatgtgtttgttcaaaggagtttgtcccgcctgctcaccccccttgagagtgttatcaagaatgaattatctaagagggaacctgcattgtatgaatggtattcatccgatcaaaatcctttggtggtgagacaatttgtaaacatttttgaaaatgatccaatgttttactctgctacagcaatatgccttgaaggcgagccgatgaatactagtgaaagtgatctttctctgcttatgctaggtttgatctgtcttgctgcaatcacaaagtttggatcagcaaaagtttcttgtcagcaattctcttcaatggtgcctgatattattggtcgattcatggatatgcttcttgagtttgcccctctaagtaaagcatataacttggcgaaagatattggtcttcggagagaatttttgtataattttggtcctcgtgctgctgttcctaaacttggcaatgaccatggacttgaaatatcattttggattgaactggtgcagaagcaattactctgggctcttgatcgtgaaaagatatggtcaagactgacaacaagtgaaagcattgaggttctggaaaaggatcttgcaatatttggtttttttgttgctttgggtagaagcacacaaggatatttgtctttcaagggtttgactgatttggatgattcactgaatggtattgtaaggtatcttatcggtgggagtgtactatattatccacagctgtcctcgattagttcatatcaactgtagtctgtgaagagctcgagtggcttcctttttacaatgatgatgttttaagtgcaaaaactgatactgaaggtagagaagaagtgcctaaaggagaagtcatatcaagagtcctaaatgtgtgctcttactggatgactagttttacaaagtacagctcatggcttgagaacccttcaaatgtgaaggctgcaaagttcctttctaagggacatgtcatgttgagtgactgcatgaaggagcttgacatatcaagtggcttcctagaacctgaagaagaattggatactggaacagaattagcttcctttgacaagtcgcttgaaaatgttgaagaagctctggttaagttagaaaatttgcttcaagaattacatgtttccagttcgcactctggtaaggaggatctgaaggctgcatgctctgatcttgaaatgataagaagactgaagaaagaagctgagcttcttgaggcatcctttctagcaaaagcagaatatctggaggccgatgcaagtagcggatcactatctcctgcagaggaaggacctgtaaagacaagtagcaggacgaacgatacatcagcaccacaaaaaacaggaagcagggtggataataaacgtcgcccattttgggacttctttggtcggtctttgaaagttgatccagctcttgcagatcaggatctgatcactgtcgccaatgtggagaaggaaggcatggagtcaaatgacatcctccgcttcgaacagttaagacgtgagctgattgagttagaaaagagagtgcagaagagtgcggatgaagctcaaaaggaggaggagatggttgtcgcagaaaaaacaactgcaccatcgcctggatcatcagtttcttctcgtcagactaccaagaaagaaaatgtcataactaaatcagtggagaaggtcaaagagactacaacgactgtgttgcaggggacacaactattagcaattgatacaggagctgctatgggtttgctaaaaagagctcttattggggatgaactaactcagaaggaaaagcaggctcttcaaagaacattgacagatttggcgtctgtcgttcctataggaatactcatgcttttgccacttaccgccgttggtcatgctgctattttggctttcatccagagatatgtgccatcgatgatcccgtccacatatgcccccggtaggttggatctccttaggcagattgagaaggttaaggaaatggaagttgctgaaggcagcagtgaagatatattggaggaactgaacaaatgaaataagctgggcatgtacagatggacatgattatactgcttagcttacggtctttcctgtaaagttgttttggaacaagacatttgagggggtttgttttatctaaagattctttgaatggcatacccgctggaaacagaagtgcaaggccctaggaataagtaaccaatcattgtgtcgacaaatgttccacgtctgcaggctggtgtatacataaaacatactccacattatacattacatgggcggctcacggtgcccttcaacatagtagaggatgaatgtccaagttcctcctggacagtgttctgtgtagggtagtggttttgatagaggattgtatatctagttggtatgttggtgatcacctttgttttgttttttaggaaccaagcctactacatgcattattgtctgtacccaaatgccaagttcagtgatctcctacgggattgagtggtgcgggcattttctaataataagccaagcccgtgagcaagatgtaggcgtgaacagtgttcgtcagtcgccgccaccgtctcccctcctgatccaatccaatggcgcgcctccacctcgtagccgtggcaatgggcttgctcttggccttgacgacggcgcaggcaccgggcgcgtccacgatgcccgcgcccatggcgcagcctccggcgacctcggcgcctcctcgtcccgcgccatccccgacccagaagaccgctccagctccggcgcccaatgccacggtacccgcccccgcctcgccgccggcgccgagctctatcgggcagacgccgaccgaggcgccgtcctcccctccgccgcccagcgccgcgtccagcgttgcctccgccttgtacgtggccgccgctatggcggctgtcgtgtttttcttctgaggtcggtactcggcgccgatggatccgccgcctatggtatggtacggtgcggtgtggatttgacacgatggctcccgctaccgctggtcgagtttgcttattaggatactagtagttaattaatagttgggttgatcagatcagatctagcgtttttgttgagtggggatattatttcttctacggatctgcacactagggttatgtcactatggttgccattgttattagggaaggtgcaaacttctaatttgaatcacatgatgttgatccaagggacgcataagggacgccaagcttattaaaacgataaaacgatggaacgctcatgggtgaaattttgacttttaaacgtttaaactttgtttaaacatagttttaaacaacataggaaaaataccaatatatcataatttcaga

SEQ ID NO: 3209 - DNA, 4175 bp, Zea Mays
gtccacccattctcctggccgctcttccccttcgtcgtcgcactccgctagctcacctcctcgtccccatataaaccatatccctctccgggccccgcgcagccgccggcgacaagcgcgcaggagcagcagttgtcgcgcctcactgatggcgaccgccgtggcgtcgcagccgtgccaccttcccctcagcgccggcggagatcccaggtgcgcggccagcacttcgaatgttcatactctggagaaagtatatggtttcagattcatatgcagaagcattgttgatgtaaagactcacaaattccactcccgcatttcaaagaggaagtgctacttgaggaactcactgtcggagtgtgacaggaccatccacagtggtagatggttggagtttcggagacacaagggagtcttccagagaactagaaggatggttcacattattccattggcttctgatggtgatggcaaccatatatctgttaatggagctctgcaagttggttctacaagcaacattgatgaaataaagttgaaattgaataaagcattgcagagtgaagatatcagcaatggactcgtccagtcgatacatgatgctgcaagatctattgagttggctctcatagagcacagcaaattgccaaagagctcttggtttccaaagacatggctaggcgttgagaacaatgcttggataaaatcactgtcttaccaggctgctgtagactcattgttgaaagcagttatcgatgtttcatctcgtgggaatgacagagatagagatattaatgtgtttgttcaaaggagtttgtcccgcctgctcaccccccttgagagtgttatcaagaatgaattatctaagagggaacctgcattgtatgaatggtattcatccgatcaaaatcctttggtggtgagacaatttgtaaacatttttgaaaatgatccaatgttttactctgctacagcaatatgccttgaaggcgagccgatgaatactagtgaaagtgatctttctctgcttatgctaggtttgatctgtcttgctgcaatcacaaagtttggatcagcaaaagtttcttgtcagcaattctcttcaatggtgcctgatattattggtcgattcatggatatgcttcttgagtttgcccctctaagtaaagcatataacttggcgaaagatattggtcttcggagagaatttttgtataattttggtcctcgtgctgctgttcctaaacttggcaatgaccatggacttgaaatatcattttggattgaactggtgcagaagcaattactctgggctcttgatcgtgaaaagatatggtcaagactgacaacaagtgaaagcattgaggttctggaaaaggatcttgcaatatttggtttttttgttgctttgggtagaagcacacaaggatatttgtctttcaagggtttgactgatttggatgattcactgaatggtattgtaaggtatcttatcggtgggagtgtactatattatccacagctgtcctcgattagttcatatcaactgtagtctgtgaagagctcgagtggcttcctttttacaatgatgatgttttaagtgcaaaaactgatactgaaggtagagaagaagtgcctaaaggagaagtcatatcaagagtcctaaatgtgtgctcttactggatgactagttttacaaagtacagctcatggcttgagaacccttcaaatgtgaaggctgcaaagttcctttctaagggacatgtcatgttgagtgactgcatgaaggagcttgacatatcaagaaatatgtcaaacgacagtggcttcctagaacctgaagaagaattggatactggaacagaattagcttcctttgacaagtcgcttgaaaatgttgaagaagctctggttaagttagaaaatttgcttcaagaattacatgtttccagttcgcactctggtaaggaggatctgaaggctgcatgctctgatcttgaaatgataagaagactgaagaaagaagctgagcttcttgaggcatcctttctagcaaaagcagaatatctggaggccgatgcaagtagcggatcactatctcctgcagaggaaggacctgtaaagacaagtagcaggacgaacgatacatcagcaccacaaaaaacaggaagcagggtggataataaacgtcgcccattttgggacttctttggtcggtctttgaaagttgatccagctcttgcagatcaggatctgatcactgtcgccaatgtggagaaggaaggcatggagtcaaatgacatcctccgcttcgaacagttaagacgtgagctgattgagttagaaaagagagtgcagaagagtgcggatgaagctcaaaaggaggaggagatggttgtcgcagaaaaaacaactgcaccatcgcctggatcatcagtttcttctcgtcagactaccaagaaagaaaatgtcataactaaatcagtggagaaggtcaaagagactacaacgactgtgttgcaggggacacaactattagcaattgatacaggagctgctatgggtttgctaaaaagagctcttattggggatgaactaactcagaaggaaaagcaggctcttcaaagaacattgacagatttggcgtctgtcgttcctataggaatactcatgcttttgccacttaccgccgttggtcatgctgctattttggctttcatccagagatatgtgccatcgatgatcccgtccacatatgcccccggtaggttggatctccttaggcagattgagaaggttaaggaaatggaagttgctgaaggcagcagtgaagatatattggaggaactgaacaaatgaaataagctgggcatgtacagatggacatgattatactgcttagcttacggtctttcctgtaaagttgttttggaacaagacatttgagggggtttgttttatctaaagattctttgaatggcatacccgctggaaacagaagtgcaaggccctaggaataagtaaccaatcattgtgtcgacaaatgttccacgtctgcaggctggtgtatacataaaacatactccacattatacattacatgggcggctcacggtgcccttcaacatagtagaggatgaatgtccaagttcctcctggacagtgttctgtgtagggtagtggttttgatagaggattgtatatctagttggtatgttggtgatcacctttgttttgttttttaggaaccaagcctactacatgcattattgtctgtacccaaatgccaagttcagtgatctcctacgggattgagtggtgcgggcattttctaataataagccaagcccgtgagcaagatgtaggcgtgaacagtgttcgtcagtcgccgccaccgtctcccctcctgatccaatccaatggcgcgcctccacctcgtagccgtggcaatgggcttgctcttggccttgacgacggcgcaggcaccgggcgcgtccacgatgcccgcgcccatggcgcagcctccggcgacctcggcgcctcctcgtcccgcgccatccccgacccagaagaccgctccagctccggcgcccaatgccacggtacccgcccccgcctcgccgccggcgccgagctctatcgggcagacgccgaccgaggcgccgtcctcccctccgccgcccagcgccgcgtccagcgttgcctccgccttgtacgtggccgccgctatggcggctgtcgtgtttttcttctgaggtcggtactcggcgccgatggatccgccgcctatggtatggtacggtgcggtgtggatttgacacgatggctcccgctaccgctggtcgagtttgcttattaggatactagtagttaattaatagttgggttgatcagatcagatctagcgtttttgttgagtggggatattatttcttctacggatctgcacactagggttatgtcactatggttgccattgttattagggaaggtgcaaacttctaatttgaatcacatgatgttgatccaagggacgcataagggacgccaagcttattaaaacgataaaacgatggaacgctcatgggtgaaattttgacttttaaacgtttaaactttgtttaaacatagttttaaacaacataggaaaaataccaatatatcataatttcaga

SEQ ID NO: 3210 - DNA, 3577 bp, Zea Mays
gttattttggttttttgcacctttgtgctgcccggaactctgttgggagggtgcttttctaatttaagcattttgtcccgcctgctcaccccccttgagagtgttatcaagaatgaattatctaagagggaacctgcattgtatgaatggtattcatccgatcaaaatcctttggtggtgagacaatttgtaaacatttttgaaaatgatccaatgttttactctgctacagcaatatgccttgaaggcgagccgatgaatactagtgaaagtgatctttctctgcttatgctaggtttgatctgtcttgctgcaatcacaaagtttggatcagcaaaagtttcttgtcagcaattctcttcaatggtgcctgatattattggtcgattcatggatatgcttcttgagtttgcccctctaagtaaagcatataacttggcgaaagatattggtcttcggagagaatttttgtataattttggtcctcgtgctgctgttcctaaacttggcaatgaccatggacttgaaatatcattttggattgaactggtgcagaagcaattactctgggctcttgatcgtgaaaagatatggtcaagactgacaacaagtgaaagcattgaggttctggaaaaggatcttgcaatatttggtttttttgttgctttgggtagaagcacacaaggatatttgtctttcaagggtttgactgatttggatgattcactgaatggtattgtaaggtatcttatcggtgggagtgtactatattatccacagctgtcctcgattagttcatatcaactgtatgtggaggtagtctgtgaagagctcgagtggcttcctttttacaatgatgatgttttaagtgcaaaaactgatactgaaggtagagaagaagtgcctaaaggagaagtcatatcaagagtcctaaatgtgtgctcttactggatgactagttttacaaagtacagctcatggcttgagaacccttcaaatgtgaaggctgcaaagttcctttctaaggggtttgtaattatttggtcacgacaatgcgtatctatctcttgtttgcagatagggatttgtttttgtttttctaaaaagcagatacggatttgtgagtactgattaattttctactgcatgttaataattgtagacatgtcatgttgagtgactgcatgaaggagcttgacatatcaagaaatatgtcaaacgacagtggcttcctagaacctgaagaagaattggatactggaacagaattagcttcctttgacaagtcgcttgaaaatgttgaagaagctctggttaagttagaaaatttgcttcaagaattacatgtttccagttcgcactctggtaaggaggatctgaaggctgcatgctctgatcttgaaatgataagaagactgaagaaagaagctgagcttcttgaggcatcctttctagcaaaagcagaatatctggaggccgatgcaagtagcggatcactatctcctgcagaggaaggacctgtaaagacaagtagcaggacgaacgatacatcagcaccacaaaaaacaggaagcagggtggataataaacgtcgcccattttgggacttctttggtcggtctttgaaagttgatccagctcttgcagatcaggatctgatcactgtcgccaatgtggagaaggaaggcatggagtcaaatgacatcctccgcttcgaacagttaagacgtgagctgattgagttagaaaagagagtgcagaagagtgcggatgaagctcaaaaggaggaggagatggttgtcgcagaaaaaacaactgcaccatcgcctggatcatcagtttcttctcgtcagactaccaagaaagaaaatgtcataactaaatcagtggagaaggtcaaagagactacaacgactgtgttgcaggggacacaactattagcaattgatacaggagctgctatgggtttgctaaaaagagctcttattggggatgaactaactcagaaggaaaagcaggctcttcaaagaacattgacagatttggcgtctgtcgttcctataggaatactcatgcttttgccacttaccgccgttggtcatgctgctattttggctttcatccagagatatgtgccatcgatgatcccgtccacatatgcccccggtaggttggatctccttaggcagattgagaaggttaaggaaatggaagttgctgaaggcagcagtgaagatatattggaggaactgaacaaatgaaataagctgggcatgtacagatggacatgattatactgcttagcttacggtctttcctgtaaagttgttttggaacaagacatttgagggggtttgttttatctaaagattctttgaatggcatacccgctggaaacagaagtgcaaggccctaggaataagtaaccaatcattgtgtcgacaaatgttccacgtctgcaggctggtgtatacataaaacatactccacattatacattacatgggcggctcacggtgcccttcaacatagtagaggatgaatgtccaagttcctcctggacagtgttctgtgtagggtagtggttttgatagaggattgtatatctagttggtatgttggtgatcacctttgttttgttttttaggaaccaagcctactacatgcattattgtctgtacccaaatgccaagttcagtgatctcctacgggattgagtggtgcgggcattttctaataataagccaagcccgtgagcaagatgtaggcgtgaacagtgttcgtcagtcgccgccaccgtctcccctcctgatccaatccaatggcgcgcctccacctcgtagccgtggcaatgggcttgctcttggccttgacgacggcgcaggcaccgggcgcgtccacgatgcccgcgcccatggcgcagcctccggcgacctcggcgcctcctcgtcccgcgccatccccgacccagaagaccgctccagctccggcgcccaatgccacggtacccgcccccgcctcgccgccggcgccgagctctatcgggcagacgccgaccgaggcgccgtcctcccctccgccgcccagcgccgcgtccagcgttgcctccgccttgtacgtggccgccgctatggcggctgtcgtgtttttcttctgaggtcggtactcggcgccgatggatccgccgcctatggtatggtacggtgcggtgtggatttgacacgatggctcccgctaccgctggtcgagtttgcttattaggatactagtagttaattaatagttgggttgatcagatcagatctagcgtttttgttgagtggggatattatttcttctacggatctgcacactagggttatgtcactatggttgccattgttattagggaaggtgcaaacttctaatttgaatcacatgatgttgatccaagggacgcataagggacgccaagcttattaaaacgataaaacgatggaacgctcatgggtgaaattttgacttttaaacgtttaaactttgtttaaacatagttttaaacaacataggaaaaataccaatatatcataatttcaga

SEQ ID NO: 3211 - DNA, 2230 bp, Zea Mays
gccaaatgtagagagaaaatgaggttagatgacaagttgttaaatttagaaagttcatttagagaactgttgtagaatagttttcatattaactacctaaattattgatttaggaagtcttttagagaactattggagttgctctaataatttaaacttgtgacacatcagcaactgtagggctatcttctacccgtcgtatgcttttttattccatagggtttttttctttcaatttttctgttgccttcacgtcgctaacaatacacgagtgaagaatcattcataaaaaaagtctatcaaacaaattcctgagccacactacaccggatgagccagctaggaacggtcctctgcagcctttgaaactgcacagatttttctgcagcaacacgggtttacgcaaaactatatctgaaaattgaagtgtttacaaactggaaacatgtatccatgagcaggcagcaacacaaactgaaagtgtacatgaacacaatagtcaagatgacatgtaatcgaactgaaactaaaagtgtacatgcaggtttaatctgaattcaggcataaagttcataatattgtagcgcttaaagtgcactgaaagtatataacaaactagaagtgcttacactaggaaatcaaactgacgatgtcaaattgcactgaactgaagcttacaaactgaaaatgctcactctaggaaatcgaactgacgatgtcaaattgcactgaactgaaggttacaaaccgaaagtgctcactcaagcaaatcgaactgaaagtgtaaatttccctggaaggctatcatccatcatcatgtttgaaaagtacacattccctgcaactatgcattgaagagattcaatgacatatctagaatgtgccatttgtttaaggaacaattggatctataccattaaaagatccaaactttagatatataccatggaccccacatgtcattgactcatgtggacccacatgtaagtgagatagtaatggtatgcatccaaagtggtgatcttttaatggtatggatccaaatttcccgttgtttaaagaaacctcttcctatgacagtttcagatcaaacacaataaggaataagttaatcattcatactgtcgagtttctaactcagagaatcgtattgctttattcaagaagaaggaattcacaaccagagaaacatgacatcttcaactattgagtcaagaactaaccaatcaactgaacaaccaaatctcatccaacacacatattatcaccaccaatcagttcaaggaagatcaagagattcgtagtttcgtaccattttgccgggtggttgaaggacgaatggtcctcactgcatccaaagaaggacgttgcaactacatctgattcgactctcgcaggtgctaccattggaggtctgtcacggcccctagtaaatctgctgctactactacttgtatggtttagtaagtcggttgaagaggaagatttactgttgggctggcccattagggttccaagccgtgtaatagatccaggcgattaggcccagattagcatctataaatacctgtaactgcttctggaagaggacgcgatttgaataaagaacacattccaccaaaatctggaacttatctgagcgtgactgggaagtcgtcttctccagttggtcgacttctcacgctgcgggagctcgccgtcagccacgggacgtcgatccttacacctggtatcaaagctctccttcctcggtgtgggttggtgatcacaagggggctaggttggctgtaggaagaagaggaggtgatcaccacggcgccctctgtcaaaccttcggcgcagtccaggctggtgttggaagccatggcgacagaagctaaacaaggggaagcaaggtgggacaagatgatggtgatgatggagaggttgacagggaaagttgatgctatggagaaggtgcatcaccaactattgggacagtcagaattgactgccgacttggtgaaacaggctgcagatgagaggacaattttatccaggcgcgtggaggagaatgggaaggcgttggccaggatgaggttggaagctatggcgagagagatggaggatgttggcacgggaccagagtcatcggatacaggaggtagaagaggggccataccgaaccaggatcagggaggaagggagttgcaacaacatgtacctaagatgcttttccccaagtttggag

SEQ ID NO: 3212 - DNA, 3151 bp, Zea Mays
gttagaaccggtggcaggaaaaggagggggttccagtgacaggcccattgggtgaattgttagatgagttcaaggacatctttgagtcacccaaggctttgccacctgtcaggccatatgaccatcatatttctcttgtgccaggatcagtgccagtgaatgctcgaccctataggtactcacccttgcataaaacagaaatagaaaggcaggtggccgaactattgaaagctggacatatagtgccaagtgtgagtccttttgcatcacctgtgttgctggtacagaagaaggatggaacctggaggttctgtattgattacagaaagctcaatgaaatgacaatcaagaataggttcccaatgcctttagtggacgagatattggatgagttagtgggaactcaatatttctctagtctggatatgacagcaggataccatcagattaggatgggattggaggatgagtacaaaacggctttcaaaacccaccatgggcactaccagttcagagtaatgccttttgggcttactaatgcccctgcaagttttcagtgtgctatgaactccattttggagccctatttgagaaagtttgtgatggtgtttatagatgatattctgatatacagtgcagatttgactcaacatttggaacacttaagattggtgttctctactttgagggctcaacagttttacctcaaaagaaagaagtgtgtctttgccaaatctgagttgcagtatttgggtcatattatatccaaggatggggtgtctactgacccagcaaagactcaggcgatggtggattggccagttccttcctcacttactgagttgagaggtttcctggggttgacaggttactataggaaatttgtcaggcattatggtgctattgccaagcccttgactactcttctccaagggaagaaaagatgggagtggacaaaagaagcacaacaagcttttgataagttgaagcaggctatgattcagaccccagtgttggccctaccagattttgagcttccttttgtggtggagactgatgcctgtgagaatgggattggggctgttttgatgcaacaaaacagacctgtggcttttttaagcaaggctttgggagttaagaatagtcagttgtccatttatgagaaggagttcttggctttaatgatggcagtggataggtggaggccatatcttcagagatctcagtttgtgataaagacggatcaccagtctctgacctttttgggtgaacaacaattgcagtctgaatggcaaaagaaggctatggctaagctgatgggtttgcaatttcagattgtctacaagaaaggaaaagagaatgtggtggcagatgccttgtccagagtgggaatggcgatggctatatccacagttacagagttgcaacctgtttggatccaagaggttactaattcctatgtaacggattcacaggctcaacaattgttacaaaagctcgcggtgcatagccccgatgaggcagggttctctttgcatcaaggagttattagaaagcagcaacaaatttggattgggcagaattcagctcttagaactaaagtcatttctgcttttcatgactcagtggttggtgggcattcgggcattaccgctacttatcaaagggttaaacgaatgttttggtggcaagggctgaagactgatgtggagagttttgtcaaacagtgttcggtgtgtcagcaggccaaaagtgaaaaacagctgcctactggtctgttacaacccttgccggtgccaacaggggcctggaaggatattaccatggatttcattgaaaaattgccaaagtcagaaggctatgatactatactggtggtggtggacagattttcaaaatatgcccatttttacctctgagacatccattctctgctcaaatggtggcacaggtgatattggacaatgtcgttaagctacatggggtccctaattcagtagtgtctgacagggataaagtgttcaccagtgcattttggagacatttgtttgatatgctgaagattaagctagctttgagcacagcttatcacccacaaactgatgggcagagtgagagggttaaccagtgccttgaaatgtacttaaggtgtgctgttcacgcaacgccccacaagtggaagtcttggttggctatggctgagttttggtataatactacctatcactcttcattgggatgttctcctttcaaggccctttatgggtatgaggcttctgtgcttgctgcaccagatttcctgggcacagaggatactgaagctgggcagtgggttaaccagcgagatgcttacaatgtgatgctcaaggaacaattgttgaaggctcagcaacgtgctaaacactttgctgacttgaaaagaaggcccagggagttccaagttggggagcaggtgctacttaaactccaaccttatgctcaatattcggtggtaaatagagcttgtccaaaattgtcctttaaatattttggaccctatactgtgttggaaaggataggggcggtggcttataagattcagttaccagaggaggcccaagttcatccagtctttcatgtctcccaattgaagccatttactccaaactatgttcctgtattctcagagctccctcacatagcagatctggaaaatgtgaatgtgcagcctatggagatattggacagacgtctggtgaagaaaggtagctcagctgtgactcaagttctggttcggtggtctggaattccgaaggaggctgctacttgggaagatttcaatgtggtgcgcacaaggttcccagattctcttgcttggggtcaagcaagtgttcaagggggggaaaatgtcacggcccctggtaaatctgctgctactactacttgtatggtttagtaagtcggttgaagaggaagatttactgttgggctggcccattagggttccaagccgtgtaatagatccaggcgattaggcccagattagcatctataaatacctgtaactgcttctggaagaggacgcgatttgaataaagaacacattccaccaaaatctggaacttatctgagcgtgactgggaagtcgtcttctccagttggtcgacttctc

SEQ ID NO: 3213 - DNA, 4256 bp, Zea Mays
cgcaagtcgcaactgcacatttatccttctcgatgacaccccaatcctactgggcccacccacctcaccccaccccaccaggccatcacagtccacgagcacaagcatgctagccgccaggacccctgtctcgctctcgctccaccaccgcatcgtcgccggcggccaccgggggcgatgcgtcgggggcagccaaaggaggcgcggtggcgcgccgtgccgccagttcacccaggcgctccagagcctctggaggcacagtcccccgatccctcctcctgcgcctcccgctgccggcgctgccaccagcggcgaggccgaaccctcgcggcagccgccggtactcgagaacgctgccttcgaggagtactataaggtgagtttagtcttcctatttggagttatagtgtcgcgtacaaaatggcatggtttcagggtcctgttcttctggatgtgtgtcagtgttcagcaaattgtccgcgaggaggagtgggatgccttcatgagtgttctacggaaaccattaccagcgacttttagaatcaatgcctgtcttgcatggcacctgaatttctcccggaaggaattgaggaaaaatcaggcactcgaaagttttcatgagtttctgaagcatgagagtgaggttccaccactgtttctgaatgtacaacctgatcaccatattcttgatatgtgtgctgctccaggctctaaaacttttcagttacttgagatgattcaccaatcaaaagaactaggtctacttccaggagcattggtacgtttctccctaagttgcatctggcactaaaactattgctcgtgtaactcttgatgatttttggagtcatgttagttgttagtattcaattttgttacatgtagctagtagaactagtcgttttataatttccaaagacttatgagaaattaatactttagttatattgatatggcctaggaccaacttggcccagtaaacggctcagtctggcctgtaggccgtggcgccggcatggtaaggactaaggaggacctagagcctaggtggctaggaggtctatctcctgtagtcctgtactacccctgtccctaagtcagtccctatatatagaggccccatgtacccttgcaacttaaggagaagtagatcaaagggacaaagggttagcccatcttttcttcccctgacttgggcgttgtcctactggtcactcttcctgtcctctcatttctccccaaatccccctccctaatctggggcaatctaagtactaacatatatattctcccttgttcttgtgagactggttaggtgatagccaacgatctcaatatgcgaagatgtgacctccttatccataatacaaagagaatgtgcaccgccaacctaatagtaacaaaccatggagcagaaaacttcccctattgttctcttgcaaaggattgttcaggttcatataaagatccctgcaaactacaaaagctagaattcgaccgcatactttgtgatgttccgtgtagtggtgatgggactattcgcaagggtcatgacatgtggagaaagtggtaataacaggatctttgttttgtctgctgttttatgcttccctgtatgtatcctcaggtcgcaatctgttattgttgttcaggaactcaggcatgggtaaccaacttcatcttctgcaagtaaatattgcaatgcgtggtattgcgttacttaaagtgggtggaaggatggtctattcgacttgttcattgaatcctgttgaaaatgaagctgtcatagctgaggtatctactgtagttgcttacttttagctgttgaacataaagctgttatttattttgtgacttatagcctagatacgagcaaaatctctgcgttgagcagtttatgttagagttgatatctccttaggactaatgactgagtcttaaggggcatggggacccaccacctctatgggtatgtacaaccttgacaccatagtagatggtacgatttttttttaaagtagaagacacaacgaagacacatgtagttacactgggggtgtatctaaaccttatgtcttaattaataaaaattctctaagacatgactctttatgtgtgtttactagtgaagctgtgtcttaggcttagaaaaccgagctagaggtgtgtcttcatttttttacacttaccccataggcacacattaatatgcattgtacatgccctaactaatgcacaccgtgatcggaggtgctgactgcttcctactggctcggtcccatccgatgcgatgccataagaggggttcctggtgaccaaaaacgtgtgcgaggacaccactcagaatgaatgtgctcccctaatctaccaatcgagagggcatggcagtcaggtgaagaccgatgcacatggcactccactgcacatccctgccctaatgatctgctgctaattgagccattgagctccttcgaagaagtggaaactctgttgaactccttgatgtttctagcgagctacctgaattggttcggcgtcctgggcttagcacttggaaggtacaagatcgagaatcttggtttcagagtcacgatgaagttccacacaataggaagaatgtagtatttccaagcatgtttcctgcaagtaatagcaccgaggaaagccataccgtgtgtggtgatgttgaagtgaacataaataatatgaacagcttctcaagaaatatcaacattgaagaaacaagcaaacttaatcaagatatggatggagtttctgttagtcccactaaaattttggaatgcacttctaacattgtgagttcaaagtttccactgcatcggtgcatgaggattgttcctcatgaccagaacagcggggcatttttcatcgcagttcttcacaaattatcgcccttgaatggcagtcagataaaggatactaaaattcagcacagacttgggacagacagaactatacagttccagaaagagcccaagccagaaacacgaccctatgaaactactttgacacgccgtcagcacaatgtttctgaagttgatgatactgaagtgcttggtaggggacagaaattaggcacagacagccaaacttcaaaggataagaactcaagcgaggtcgaaatagttagcattctagcagagtcaggagatagaatggagttgcaaaagcaaagcaggtgggaaggggttgatcctgtcttagttttgaacgatgaagcggtgataaagagtatacaatccttctttggcatcaaggaatcattcccactcgaaggtcatctggtgactagaagtcctgataatgcaaggagaatatattacgtatcaaaatcagttaaagagattttggagctgaattcaaaagttggtgggcagctgaagatagcttcacttggtgttaaaatgtttgaaaggcatagatcaaaggatccctgtccatgtgcatataggttgtcttatgatggattatcgctggtgcttccatccatcagcaagaggatactatatgcatccgcactcgagttccaccgccttgtacagtaccgaagcataagctttgctcattttaccgacaccagattcggggagcaggctgcgtccttgacgcctggttgctgtgttgtagtgttactcgaagggaataggcgtgtagattccatttgtaaggatccctccacaattgccgttgtttgctggagagggaaggggaccattaacgttatggtttctccctcggataggaaggatctccttgaaaggatggcgtatcgatttggatgatggatgggataaaggtgggagcatatcctgtacgcaaagaagtcatgtgctcccaggcacaaaatgcatccagccgatccgttctgtatctaacggtgttatgacatttttgcaaataagtcttcccacgcttcccacattagtgttgttcattaaaaaaaccccgccctaacgacgactatggagcttgccttggcatcttgacaaggacctaccttcctatttggttggctgctaattaaaacttggtataccacattaattaattctaggcatgtgtgttttgtttcacattataaagtgggatttgtcaaactttgttacgaatagcaggttcttagtaatttacacacgtcggttggttgggcctggacgaaggaaggatttgtacagatcagatgagagagttttgagtttgcaactatgaactatgtactactatctatctctttc

SEQ ID NO: 3214 - DNA, 3345 bp, Zea Mays
ccacctcaccccaccccaccaggccatcacagtccacgagcacaagcatgctagccgccaggacccctgtctcgctctcgctccaccaccgcatcgtcgccggcggccaccgggggcgatgcgtcgggggcagccaaaggaggcgcggtggcgcgccgtgccgccagttcacccaggcgctccagagcctctggaggcacagtcccccgatccctcctcctgcgcctcccgctgccggcgctgccaccagcggcgaggccgaaccctcgcggcagccgccggtactcgagaacgctgccttcgaggagtactataaggtgagtttagtcttcctatttggagttatagtgtcgcgtacaaaatggcatggtttcagggtcctgttcttctggatgtgtgtcagtgttcagcaaattgtccgcgaggaggagtgggatgccttcatgagtgttctacggaaaccattaccagcgacttttagaatcaatgcctgtcttgcatggcacctgaatttctcccggaaggaattgaggaaaaatcaggcactcgaaagttttcatgagtttctgaagcatgagagtgaggttccaccactgtttctgaatgtacaacctgatcaccatattcttgatatgtgtgctgctccaggctctaaaacttttcagttacttgagatgattcaccaatcaaaagaactaggtctacttccaggagcattggaccaacttggcccagtaaacggctcagtctggcctgtaggccgtggcgccggcatggattgttcaggttcatataaagatccctgcaaactacaaaagctagaattcgaccgcatactttgtgatgttccgtgtagtggtgatgggactattcgcaagggtcatgacatgtggagaaagtggaactcaggcatgggtaaccaacttcatcttctgcaagtaaatattgcaatgcgtggtattgcgttacttaaagtgggtggaaggatggtctattcgacttgttcattgaatcctgttgaaaatgaagctgtcatagctgaggtatctactgtagttgcttacttttagctgttgaacataaagctgttatttattttgtgacttatagcctagatacgagcaaaatctctgcgttgagcagtttatgttagagttgatatctccttaggactaatgactgagtcttaaggggcatggggacccaccacctctatgggtatgtacaaccttgacaccatagtagatggtacgatttttttttaaagtagaagacacaacgaagacacatgtagttacactgggggtgtatctaaaccttatgtcttaattaataaaaattctctaagacatgactctttatgtgtgtttactagtgaagctgtgtcttaggcttagaaaaccgagctagaggtgtgtcttcatttttttacacttaccccataggcacacattaatatgcattgtacatgccctaactaatgcacaccgtgatcggaggtgctgactgcttcctactggctcggtcccatccgatgcgatgccataagaggggttcctggtgaccaaaaacgtgtgcgaggacaccactcagaatgaatgtgctcccctaatctaccaatcgagagggcatggcagtcaggtgaagaccgatgcacatggcactccactgcacatccctgccctaatgatctgctgctaattgagccattgagctccttcgaagaagtggaaactctgttgaactccttgatgtttctagcgagctacctgaattggttcggcgtcctgggcttagcacttggaaggtacaagatcgagaatcttggtttcagagtcacgatgaagttccacacaataggaagaatgtagtatttccaagcatgtttcctgcaagtaatagcaccgaggaaagccataccgtgtgtggtgatgttgaagtgaacataaataatatgaacagcttctcaagaaatatcaacattgaagaaacaagcaaacttaatcaagatatggatggagtttctgttagtcccactaaaattttggaatgcacttctaacattgtgagttcaaagtttccactgcatcggtgcatgaggattgttcctcatgaccagaacagcggggcatttttcatcgcagttcttcacaaattatcgcccttgaatggcagtcagataaaggatactaaaattcagcacagacttgggacagacagaactatacagttccagaaagagcccaagccagaaacacgaccctatgaaactactttgacacgccgtcagcacaatgtttctgaagttgatgatactgaagtgcttggtaggggacagaaattaggcacagacagccaaacttcaaaggataagaactcaagcgaggtcgaaatagttagcattctagcagagtcaggagatagaatggagttgcaaaagcaaagcaggtgggaaggggttgatcctgtcttagttttgaacgatgaagcggtgataaagagtatacaatccttctttggcatcaaggaatcattcccactcgaaggtcatctggtgactagaagtcctgataatgcaaggagaatatattacgtatcaaaatcagttaaagagattttggagctgaattcaaaagttggtgggcagctgaagatagcttcacttggtgttaaaatgtttgaaaggcatagatcaaaggatccctgtccatgtgcatataggttgtcttatgatggattatcgctggtgcttccatccatcagcaagaggatactatatgcatccgcactcgagttccaccgccttgtacagtaccgaagcataagctttgctcattttaccgacaccagattcggggagcaggctgcgtccttgacgcctggttgctgtgttgtagtgttactcgaagggaataggcgtgtagattccatttgtaaggatccctccacaattgccgttgtttgctggagagggaaggggaccattaacgttatggtttctccctcggataggaaggatctccttgaaaggatggcgtatcgatttggatgatggatgccctaacgacgactatggagcttgccttggcatcttgacaaggacctaccttcctatttggttggctgctaattaaaacttggtataccacattaattaattctaggcatgtgtgttttgtttcacattataaagtgggatttgtcaaactttgttacgaatagcaggttcttagtaatttacacacgtcggttggttgggcctggacgaaggaaggatttgtacagatcagatgagagagttttgagtttgcaactatgaactatgtactactatctatctctttc

SEQ ID NO: 3215 - DNA, 3968 bp, Zea Mays
caccccaccaggccatcacagtccacgagcacaagcatgctagccgccaggacccctgtctcgctctcgctccaccaccgcatcgtcgccggcggccaccgggggcgatgcgtcgggggcagccaaaggaggcgcggtggcgcgccgtgccgccagttcacccaggcgctccagagcctctggaggcacagtcccccgatccctcctcctgcgcctcccgctgccggcgctgccaccagcggcgaggccgaaccctcgcggcagccgccggtactcgagaacgctgccttcgaggagtactataaggtgagtttagtcttcctatttggagttatagtgtcgcgtacaaaatggcatggtttcagggtcctgttcttctggatgtgtgtcagtgttcagcaaattgtccgcgaggaggagtgggatgccttcatgagtgttctacggaaaccattaccagcgacttttagaatcaatgcctgttgccagttttataaagatatctgttcaaagttagaaaatgaatttaggcgatctttggagagtgaggtagccttttctctgtcgtctatgattttctccttacttgatcattgacattttttaatttacaatttaataactcactgcaaaggtcagtgatatgcatggagaagatgctataactcccttgccttggtatccatgcagtcttgcatggcacctgaatttctcccggaaggaattgaggaaaaatcaggcactcgaaagttttcatgagtttctgaagcatgagagtgaggttccaccactgtttctgaatgtacaacctgatcaccatattcttgatatgtgtgctgctccaggctctaaaacttttcagttacttgagatgattcaccaatcaaaagaactaggtctacttccaggagcattggaccaacttggcccagtaaacggctcagtctggcctgtaggccgtggcgccggcatggtaaggactaaggaggacctagagcctaggtggctaggaggtctatctcctgtagtcctgtactacccctgtccctaagtcagtccctatatatagaggccccatgtacccttgcaacttaaggagaagtagatcaaagggacaaagggttagcccatcttttcttcccctgacttgggcgttgtcctactggtcactcttcctgtcctctcatttctccccaaatccccctccctaatctggggcaatctaagtactaacatatatattctcccttgttcttgtgagactggttaggtgatagccaacgatctcaatatgcgaagatgtgacctccttatccataatacaaagagaatgtgcaccgccaacctaatagtaacaaaccatggagcagaaaacttcccctattgttctcttgcaaaggattgttcaggttcatataaagatccctgcaaactacaaaagctagaattcgaccgcatactttgtgatgttccgtgtagtggtgatgggactattcgcaagggtcatgacatgtggagaaagtggaactcaggcatgggtaaccaacttcatcttctgcaagtaaatattgcaatgcgtggtattgcgttacttaaagtgggtggaaggatggtctattcgacttgttcattgaatcctgttgaaaatgaagctgtcatagctgaggtatctactgtagttgcttacttttagctgttgaacataaagctgttatttattttgtgacttatagcctagatacgagcaaaatctctgcgttgagcagtttatgttagagttgatatctccttaggactaatgactgagtcttaaggggcatggggacccaccacctctatgggtatgtacaaccttgacaccatagtagatggtacgatttttttttaaagtagaagacacaacgaagacacatgtagttacactgggggtgtatctaaaccttatgtcttaattaataaaaattctctaagacatgactctttatgtgtgtttactagtgaagctgtgtcttaggcttagaaaaccgagctagaggtgtgtcttcatttttttacacttaccccataggcacacattaatatgcattgtacatgccctaactaatgcacaccgtgatcggaggtgctgactgcttcctactggctcggtcccatccgatgcgatgccataagaggggttcctggtgaccaaaaacgtgtgcgaggacaccactcagaatgaatgtgctcccctaatctaccaatcgagagggcatggcagtcaggtgaagaccgatgcacatggcactccactgcacatccctgccctaatgatctgctgctaattgagccattgagctccttcgaagaagtggaaactctgttgaactccttgatgtttctagcgagctacctgaattggttcggcgtcctgggcttagcacttggaaggtacaagatcgagaatcttggtttcagagtcacgatgaagttccacacaataggaagaatgtagtatttccaagcatgtttcctgcaagtaatagcaccgaggaaagccataccgtgtgtggtgatgttgaagtgaacataaataatatgaacagcttctcaagaaatatcaacattgaagaaacaagcaaacttaatcaagatatggatggagtttctgttagtcccactaaaattttggaatgcacttctaacattgtgagttcaaagtttccactgcatcggtgcatgaggattgttcctcatgaccagaacagcggggcatttttcatcgcagttcttcacaaattatcgcccttgaatggcagtcagataaaggatactaaaattcagcacagacttgggacagacagaactatacagttccagaaagagcccaagccagaaacacgaccctatgaaactactttgacacgccgtcagcacaatgtttctgaagttgatgatactgaagtgcttggtaggggacagaaattaggcacagacagccaaacttcaaaggataagaactcaagcgaggtcgaaatagttagcattctagcagagtcaggagatagaatggagttgcaaaagcaaagcaggtgggaaggggttgatcctgtcttagttttgaacgatgaagcggtgataaagagtatacaatccttctttggcatcaaggaatcattcccactcgaaggtcatctggtgactagaagtcctgataatgcaaggagaatatattacgtatcaaaatcagttaaagagattttggagctgaattcaaaagttggtgggcagctgaagatagcttcacttggtgttaaaatgtttgaaaggcatagatcaaaggatccctgtccatgtgcatataggttgtcttatgatggattatcgctggtgcttccatccatcagcaagaggatactatatgcatccgcactcgagttccaccgccttgtacagtaccgaagcataagctttgctcattttaccgacaccagattcggggagcaggctgcgtccttgacgcctggttgctgtgttgtagtgttactcgaagggaataggcgtgtagattccatttgtaaggatccctccacaattgccgttgtttgctggagagggaaggggaccattaacgttatggtttctccctcggataggaaggatctccttgaaaggatggcgtatcgatttggatgatggatgccctaacgacgactatggagcttgccttggcatcttgacaaggacctaccttcctatttggttggctgctaattaaaacttggtataccacattaattaattctaggcatgtgtgttttgtttcacattataaagtgggatttgtcaaactttgttacgaatagcaggttcttagtaatttacacacgtcggttggttgggcctggacgaaggaaggatttgtacagatcagatgagagagttttgagtttgcaactatgaactatgtactactatctatctctttc

SEQ ID NO: 3216 - DNA, 2737 bp, Zea Mays
caccaggccatcacagtccacgagcacaagcatgctagccgccaggacccctgtctcgctctcgctccaccaccgcatcgtcgccggcggccaccgggggcgatgcgtcgggggcagccaaaggaggcgcggtggcgcgccgtgccgccagttcacccaggcgctccagagcctctggaggcacagtcccccgatccctcctcctgcgcctcccgctgccggcgctgccaccagcggcgaggccgaaccctcgcggcagccgccggtactcgagaacgctgccttcgaggagtactataaggtgagtttagtcttcctatttggagttatagtgtcgcgtacaaaatggcatggtttcagggtcctgttcttctggatgtgtgtcagtgttcagcaaattgtccgcgaggaggagtgggatgccttcatgagtgttctacggaaaccattaccagcgacttttagaatcaatgcctgtcttgcatggcacctgaatttctcccggaaggaattgaggaaaaatcaggcactcgaaagttttcatgagtttctgaagcatgagagtgaggttccaccactgtttctgaatgtacaacctgatcaccatattcttgatatgtgtgctgctccaggctctaaaacttttcagttacttgagatgattcaccaatcaaaagaactaggtctacttccaggagcattggaccaacttggcccagtaaacggctcagtctggcctgtaggccgtggcgccggcatggattgttcaggttcatataaagatccctgcaaactacaaaagctagaattcgaccgcatactttgtgatgttccgtgtagtggtgatgggactattcgcaagggtcatgacatgtggagaaagtggtaataacaggatctttgttttgtctgctgttttatgcttccctgtatgtatcctcaggtcgcaatctgttattgttgttcaggaactcaggcatgggtaaccaacttcatcttctgcaagtaaatattgcaatgcgtggtattgcgttacttaaagtgggtggaaggatggtctattcgacttgttcattgaatcctgttgaaaatgaagctgtcatagctgagctccttcgaagaagtggaaactctgttgaactccttgatgtttctagcgagctacctgaattggttcggcgtcctgggcttagcacttggaaggtacaagatcgagaatcttggtttcagagtcacgatgaagttccacacaataggaagaatgtagtatttccaagcatgtttcctgcaagtaatagcaccgaggaaagccataccgtgtgtggtgatgttgaagtgaacataaataatatgaacagcttctcaagaaatatcaacattgaagaaacaagcaaacttaatcaagatatggatggagtttctgttagtcccactaaaattttggaatgcacttctaacattgtgagttcaaagtttccactgcatcggtgcatgaggattgttcctcatgaccagaacagcggggcatttttcatcgcagttcttcacaaattatcgcccttgaatgtcagataaaggatactaaaattcagcacagacttgggacagacagaactatacagttccagaaagagcccaagccagaaacacgaccctatgaaactactttgacacgccgtcagcacaatgtttctgaagttgatgatactgaagtgcttggtaggggacagaaattaggcacagacagccaaacttcaaaggataagaactcaagcgaggtcgaaatagttagcattctagcagagtcaggagatagaatggagttgcaaaagcaaagcaggtgggaaggggttgatcctgtcttagttttgaacgatgaagcggtgataaagagtatacaatccttctttggcatcaaggaatcattcccactcgaaggtcatctggtgactagaagtcctgataatgcaaggagaatatattacgtatcaaaatcagttaaagagattttggagctgaattcaaaagttggtgggcagctgaagatagcttcacttggtgttaaaatgtttgaaaggcatagatcaaaggatccctgtccatgtgcatataggttgtcttatgatggattatcgctggtgcttccatccatcagcaagaggatactatatgcatccgcactcgagttccaccgccttgtacagtaccgaagcataagctttgctcattttaccgacaccagattcggggagcaggctgcgtccttgacgcctggttgctgtgttgtagtgttactcgaagggaataggcgtgtagattccatttgtaaggatccctccacaattgccgttgtttgctggagagggaaggggaccattaacgttatggtttctccctcggataggaaggatctccttgaaaggatggcgtatcgatttggatgatggatgccctaacgacgactatggagcttgccttggcatcttgacaaggacctaccttcctatttggttggctgctaattaaaacttggtataccacattaattaattctaggcatgtgtgttttgtttcacattataaagtgggatttgtcaaactttgttacgaatagcaggttcttagtaatttacacacgtcggttggttgggcctggacgaaggaaggatttgtacagatcagatgagagagttttgagtttgcaactatgaactatgtactactatctatctctttc

SEQ ID NO: 3217 - DNA, 3265 bp, Zea Mays
cacgagcacaagcatgctagccgccaggacccctgtctcgctctcgctccaccaccgcatcgtcgccggcggccaccgggggcgatgcgtcgggggcagccaaaggaggcgcggtggcgcgccgtgccgccagttcacccaggcgctccagagcctctggaggcacagtcccccgatccctcctcctgcgcctcccgctgccggcgctgccaccagcggcgaggccgaaccctcgcggcagccgccggtactcgagaacgctgccttcgaggagtactataaggttcagcaaattgtccgcgaggaggagtgggatgccttcatgagtgttctacggaaaccattaccagcgacttttagaatcaatgcctgttgccagttttataaagatatctgttcaaagttagaaaatgaatttaggcgatctttggagagtgagtcttgcatggcacctgaatttctcccggaaggaattgaggaaaaatcaggcactcgaaagttttcatgagtttctgaagcatgagagtgaggttggtaacataactagacaagaggctgttagcatggttccaccactgtttctgaatgtacaacctgatcaccatattcttgatatgtgtgctgctccaggctctaaaacttttcagttacttgagatgattcaccaatcaaaagaactaggtctacttccaggagcattggtacgtttctccctaagttgcatctggcactaaaactattgctcgtgtaactcttgatgatttttggagtcatgttagttgttagtattcaattttgttacatgtagctagtagaactagtcgttttataatttccaaagacttatgagaaattaatactttagttatattgatatggcctaggaccaacttggcccagtaaacggctcagtctggcctgtaggccgtggcgccggcatggtaaggactaaggaggacctagagcctaggtggctaggaggtctatctcctgtagtcctgtactacccctgtccctaagtcagtccctatatatagaggccccatgtacccttgcaacttaaggagaagtagatcaaagggacaaagggttagcccatcttttcttcccctgacttgggcgttgtcctactggtcactcttcctgtcctctcatttctccccaaatccccctccctaatctggggcaatctaagtactaacatatatattctcccttgttcttgtgagactggttaggtgatagccaacgatctcaatatgcgaagatgtgacctccttatccataatacaaagagaatgtgcaccgccaacctaatagtaacaaaccatggagcagaaaacttcccctattgttctcttgcaaaggattgttcaggttcatataaagatccctgcaaactacaaaagctagaattcgaccgcatactttgtgatgttccgtgtagtggtgatgggactattcgcaagggtcatgacatgtggagaaagtggaactcaggcatgggtaaccaacttcatcttctgcaagtaaatattgcaatgcgtggtattgcgttacttaaagtgggtggaaggatggtctattcgacttgttcattgaatcctgttgaaaatgaagctgtcatagctgagctccttcgaagaagtggaaactctgttgaactccttgatgtttctagcgagctacctgaattggttcggcgtcctgggcttagcacttggaaggtacaagatcgagaatcttggtttcagagtcacgatgaagttccacacaataggaagaatgtagtatttccaagcatgtttcctgcaagtaatagcaccgaggaaagccataccgtgtgtggtgatgttgaagtgaacataaataatatgaacagcttctcaagaaatatcaacattgaagaaacaagcaaacttaatcaagatatggatggagtttctgttagtcccactaaaattttggaatgcacttctaacattgtgagttcaaagtttccactgcatcggtgcatgaggattgttcctcatgaccagaacagcggggcatttttcatcgcagttcttcacaaattatcgcccttgaatggcagtcagataaaggatactaaaattcagcacagacttgggacagacagaactatacagttccagaaagagcccaagccagaaacacgaccctatgaaactactttgacacgccgtcagcacaatgtttctgaagttgatgatactgaagtgcttggtaggggacagaaattaggcacagacagccaaacttcaaaggataagaactcaagcgaggtcgaaatagttagcattctagcagagtcaggagatagaatggagttgcaaaagcaaagcaggtgggaaggggttgatcctgtcttagttttgaacgatgaagcggtgataaagagtatacaatccttctttggcatcaaggaatcattcccactcgaaggtcatctggtgactagaagtcctgataatgcaaggagaatatattacgtatcaaaatcagttaaagagattttggagctgaattcaaaagttggtgggcagctgaagatagcttcacttggtgttaaaatgtttgaaaggcatagatcaaaggatccctgtccatgtgcatataggttgtcttatgatggattatcgctggtgcttccatccatcagcaagaggatactatatgcatccgcactcgagttccaccgccttgtacagtaccgaagcataagctttgctcattttaccgacaccagattcggggagcaggctgcgtccttgacgcctggttgctgtgttgtagtgttactcgaagggaataggcgtgtagattccatttgtaaggatccctccacaattgccgttgtttgctggagagggaaggggaccattaacgttatggtttctccctcggataggaaggatctccttgaaaggatggcgtatcgatttggatgatggatgccctaacgacgactatggagcttgccttggcatcttgacaaggacctaccttcctatttggttggctgctaattaaaacttggtataccacattaattaattctaggcatgtgtgttttgtttcacattataaagtgggatttgtcaaactttgttacgaatagcaggttcttagtaatttacacacgtcggttggttgggcctggacgaaggaaggatttgtacagatcagatgagagagttttgagtttgcaactatgaactatgtactactatctatctctttc

SEQ ID NO: 3218 - DNA, 2738 bp, Zea Mays
atgctagccgccaggacccctgtctcgctctcgctccaccaccgcatcgtcgccggcggccaccgggggcgatgcgtcgggggcagccaaaggaggcgcggtggcgcgccgtgccgccagttcacccaggcgctccagagcctctggaggcacagtcccccgatccctcctcctgcgcctcccgctgccggcgctgccaccagcggcgaggccgaaccctcgcggcagccgccggtactcgagaacgctgccttcgaggagtactataaggttcagcaaattgtccgcgaggaggagtgggatgccttcatgagtgttctacggaaaccattaccagcgacttttagaatcaatgcctgttgccagttttataaagatatctgttcaaagttagaaaatgaatttaggcgatctttggagagtgaggtcagtgatatgcatggagaagatgctataactcccttgccttggtatccatgcagtcttgcatggcacctgaatttctcccggaaggaattgaggaaaaatcaggcactcgaaagttttcatgagtttctgaagcatgagagtgaggttggtaacataactagacaagaggctgttagcatggttccaccactgtttctgaatgtacaacctgatcaccatattcttgatatgtgtgctgctccaggctctaaaacttttcagttacttgagatgattcaccaatcaaaagaactaggtctacttccaggagcattggtgatagccaacgatctcaatatgcgaagatgtgacctccttatccataatacaaagagaatgtgcaccgccaacctaatagtaacaaaccatggagcagaaaacttcccctattgttctcttgcaaaggattgttcaggttcatataaagatccctgcaaactacaaaagctagaattcgaccgcatactttgtgatgttccgtgtagtggtgatgggactattcgcaagggtcatgacatgtggagaaagtggtaataacaggatctttgttttgtctgctgttttatgcttccctgtatgtatcctcaggtcgcaatctgttattgttgttcaggaactcaggcatgggtaaccaacttcatcttctgcaagtaaatattgcaatgcgtggtattgcgttacttaaagtgggtggaaggatggtctattcgacttgttcattgaatcctgttgaaaatgaagctgtcatagctgagctccttcgaagaagtggaaactctgttgaactccttgatgtttctagcgagctacctgaattggttcggcgtcctgggcttagcacttggaaggtttgtgtatctatatcaaggtacaagatcgagaatcttggtttcagagtcacgatgaagttccacacaataggaagaatgtagtatttccaagcatgtttcctgcaagtaatagcaccgaggaaagccataccgtgtgtggtgatgttgaagtgaacataaataatatgaacagcttctcaagaaatatcaacattgaagaaacaagcaaacttaatcaagatatggatggagtttctgttagtcccactaaaattttggaatgcacttctaacattgtgagttcaaagtttccactgcatcggtgcatgaggattgttcctcatgaccagaacagcggggcatttttcatcgcagttcttcacaaattatcgcccttgaatggcagtcagataaaggatactaaaattcagcacagacttgggacagacagaactatacagttccagaaagagcccaagccagaaacacgaccctatgaaactactttgacacgccgtcagcacaatgtttctgaagttgatgatactgaagtgcttggtaggggacagaaattaggcacagacagccaaacttcaaaggataagaactcaagcgaggtcgaaatagttagcattctagcagagtcaggagatagaatggagttgcaaaagcaaagcaggtgggaaggggttgatcctgtcttagttttgaacgatgaagcggtgataaagagtatacaatccttctttggcatcaaggaatcattcccactcgaaggtcatctggtgactagaagtcctgataatgcaaggagaatatattacgtatcaaaatcagttaaagagattttggagctgaattcaaaagttggtgggcagctgaagatagcttcacttggtgttaaaatgtttgaaaggcatagatcaaaggatccctgtccatgtgcatataggttgtcttatgatggattatcgctggtgcttccatccatcagcaagaggatactatatgcatccgcactcgagttccaccgccttgtacagtaccgaagcataagctttgctcattttaccgacaccagattcggggagcaggctgcgtccttgacgcctggttgctgtgttgtagtgttactcgaagggaataggcgtgtagattccatttgtaaggatccctccacaattgccgttgtttgctggagagggaaggggaccattaacgttatggtttctccctcggataggaaggatctccttgaaaggatggcgtatcgatttggatgatggatggtaattttactcttgtcaccttcgtcattgtaattttattgcctggttgttttacctgcccgtggggttccaagtcaaggacagaacagcagcagctggctgcagtagtttaatgggcttgagcgcaatcaaaatcacatcgctttttttt

SEQ ID NO: 3219 - DNA, 3059 bp, Zea Mays
atgctagccgccaggacccctgtctcgctctcgctccaccaccgcatcgtcgccggcggccaccgggggcgatgcgtcgggggcagccaaaggaggcgcggtggcgcgccgtgccgccagttcacccaggcgctccagagcctctggaggcacagtcccccgatccctcctcctgcgcctcccgctgccggcgctgccaccagcggcgaggccgaaccctcgcggcagccgccggtactcgagaacgctgccttcgaggagtactataaggtgagtttagtcttcctatttggagttatagtgtcgcgtacaaaatggcatggtttcagggtcctgttcttctggatgtgtgtcagtgttcagcaaattgtccgcgaggaggagtgggatgccttcatgagtgttctacggaaaccattaccagcgacttttagaatcaatgcctgtcttgcatggcacctgaatttctcccggaaggaattgaggaaaaatcaggcactcgaaagttttcatgagtttctgaagcatgagagtgaggttccaccactgtttctgaatgtacaacctgatcaccatattcttgatatgtgtgctgctccaggctctaaaacttttcagttacttgagatgattcaccaatcaaaagaactaggtctacttccaggagcattggaccaacttggcccagtaaacggctcagtctggcctgtaggccgtggcgccggcatggtaaggactaaggaggacctagagcctaggtggctaggaggtctatctcctgtagtcctgtactacccctgtccctaagtcagtccctatatatagaggccccatgtacccttgcaacttaaggagaagtagatcaaagggacaaagggttagcccatcttttcttcccctgacttgggcgttgtcctactggtcactcttcctgtcctctcatttctccccaaatccccctccctaatctggggcaatctaagtactaacatatatattctcccttgttcttgtgagactggttaggtgatagccaacgatctcaatatgcgaagatgtgacctccttatccataatacaaagagaatgtgcaccgccaacctaatagtaacaaaccatggagcagaaaacttcccctattgttctcttgcaaaggattgttcaggttcatataaagatccctgcaaactacaaaagctagaattcgaccgcatactttgtgatgttccgtgtagtggtgatgggactattcgcaagggtcatgacatgtggagaaagtggaactcaggcatgggtaaccaacttcatcttctgcaagtaaatattgcaatgcgtggtattgcgttacttaaagtgggtggaaggatggtctattcgacttgttcattgaatcctgttgaaaatgaagctgtcatagctgaggtgctgactgcttcctactggctcggtcccatccgatgcgatgccataagaggggttcctggtgaccaaaaacgtgtgcgaggacaccactcagaatgaatgtgctcccctaatctaccaatcgagagggcatggcagtcagctccttcgaagaagtggaaactctgttgaactccttgatgtttctagcgagctacctgaattggttcggcgtcctgggcttagcacttggaaggtacaagatcgagaatcttggtttcagagtcacgatgaagttccacacaataggaagaatgtagtatttccaagcatgtttcctgcaagtaatagcaccgaggaaagccataccgtgtgtggtgatgttgaagtgaacataaataatatgaacagcttctcaagaaatatcaacattgaagaaacaagcaaacttaatcaagatatggatggagtttctgttagtcccactaaaattttggaatgcacttctaacattgtgagttcaaagtttccactgcatcggtgcatgaggattgttcctcatgaccagaacagcggggcatttttcatcgcagttcttcacaaattatcgcccttgaatggcagtcagataaaggatactaaaattcagcacagacttgggacagacagaactatacagttccagaaagagcccaagccagaaacacgaccctatgaaactactttgacacgccgtcagcacaatgtttctgaagttgatgatactgaagtgcttggtaggggacagaaattaggcacagacagccaaacttcaaaggataagaactcaagcgaggtcgaaatagttagcattctagcagagtcaggagatagaatggagttgcaaaagcaaagcaggtgggaaggggttgatcctgtcttagttttgaacgatgaagcggtgataaagagtatacaatccttctttggcatcaaggaatcattcccactcgaaggtcatctggtgactagaagtcctgataatgcaaggagaatatattacgtatcaaaatcagttaaagagattttggagctgaattcaaaagttggtgggcagctgaagatagcttcacttggtgttaaaatgtttgaaaggcatagatcaaaggatccctgtccatgtgcatataggttgtcttatgatggattatcgctggtgcttccatccatcagcaagaggatactatatgcatccgcactcgagttccaccgccttgtacagtaccgaagcataagctttgctcattttaccgacaccagattcggggagcaggctgcgtccttgacgcctggttgctgtgttgtagtgttactcgaagggaataggcgtgtagattccatttgtaaggatccctccacaattgccgttgtttgctggagagggaaggggaccattaacgttatggtttctccctcggataggaaggatctccttgaaaggatggcgtatcgatttggatgatggatggtaattttactcttgtcaccttcgtcattgtaattttattgcctggttgttttacctgcccgtggggttccaagtcaaggacagaacagcagcagctggctgcagtagtttaatgggcttgagcgcaatcaaaatcacatcgctttttttt

SEQ ID NO: 3220 - DNA, 2486 bp, Zea Mays
atgctagccgccaggacccctgtctcgctctcgctccaccaccgcatcgtcgccggcggccaccgggggcgatgcgtcgggggcagccaaaggaggcgcggtggcgcgccgtgccgccagttcacccaggcgctccagagcctctggaggcacagtcccccgatccctcctcctgcgcctcccgctgccggcgctgccaccagcggcgaggccgaaccctcgcggcagccgccggtactcgagaacgctgccttcgaggagtactataaggtgagtttagtcttcctatttggagttatagtgtcgcgtacaaaatggcatggtttcagggtcctgttcttctggatgtgtgtcagtgttcagcaaattgtccgcgaggaggagtgggatgccttcatgagtgttctacggaaaccattaccagcgacttttagaatcaatgcctgtcttgcatggcacctgaatttctcccggaaggaattgaggaaaaatcaggcactcgaaagttttcatgagtttctgaagcatgagagtgaggttccaccactgtttctgaatgtacaacctgatcaccatattcttgatatgtgtgctgctccaggctctaaaacttttcagttacttgagatgattcaccaatcaaaagaactaggtctacttccaggagcattggaccaacttggcccagtaaacggctcagtctggcctgtaggccgtggcgccggcatggattgttcaggttcatataaagatccctgcaaactacaaaagctagaattcgaccgcatactttgtgatgttccgtgtagtggtgatgggactattcgcaagggtcatgacatgtggagaaagtggaactcaggcatgggtaaccaacttcatcttctgcaagtaaatattgcaatgcgtggtattgcgttacttaaagtgggtggaaggatggtctattcgacttgttcattgaatcctgttgaaaatgaagctgtcatagctgagctccttcgaagaagtggaaactctgttgaactccttgatgtttctagcgagctacctgaattggttcggcgtcctgggcttagcacttggaaggtacaagatcgagaatcttggtttcagagtcacgatgaagttccacacaataggaagaatgtagtatttccaagcatgtttcctgcaagtaatagcaccgaggaaagccataccgtgtgtggtgatgttgaagtgaacataaataatatgaacagcttctcaagaaatatcaacattgaagaaacaagcaaacttaatcaagatatggatggagtttctgttagtcccactaaaattttggaatgcacttctaacattgtgagttcaaagtttccactgcatcggtgcatgaggattgttcctcatgaccagaacagcggggcatttttcatcgcagttcttcacaaattatcgcccttgaatggcagtcagataaaggatactaaaattcagcacagacttgggacagacagaactatacagttccagaaagagcccaagccagaaacacgaccctatgaaactactttgacacgccgtcagcacaatgtttctgaagttgatgatactgaagtgcttggtaggggacagaaattaggcacagacagccaaacttcaaaggataagaactcaagcgaggtcgaaatagttagcattctagcagagtcaggagatagaatggagttgcaaaagcaaagcaggtgggaaggggttgatcctgtcttagttttgaacgatgaagcggtgataaagagtatacaatccttctttggcatcaaggaatcattcccactcgaaggtcatctggtgactagaagtcctgataatgcaaggagaatatattacgtatcaaaatcagttaaagagattttggagctgaattcaaaagttggtgggcagctgaagatagcttcacttggtgttaaaatgtttgcatagatcaaaggatccctgtccatgtgcatataggttgtcttatgatggattatcgctggtgcttccatccatcagcaagaggatactatatgcatccgcactcgagttccaccgccttgtacagtaccgaagcataagctttgctcattttaccgacaccagattcggggagcaggctgcgtccttgacgcctggttgctgtgttgtagtgttactcgaagggaataggcgtgtagattccatttgtaaggatccctccacaattgccgttgtttgctggagagggaaggggaccattaacgttatggtttctccctcggataggaaggatctccttgaaaggatggcgtatcgatttggatgatggatggtaattttactcttgtcaccttcgtcattgtaattttattgcctggttgttttacctgcccgtggggttccaagtcaaggacagaacagcagcagctggctgcagtagtttaatgggcttgagcgcaatcaaaatcacatcgctttttttt

SEQ ID NO: 3221 - DNA, 3176 bp, Zea Mays
atgctagccgccaggacccctgtctcgctctcgctccaccaccgcatcgtcgccggcggccaccgggggcgatgcgtcgggggcagccaaaggaggcgcggtggcgcgccgtgccgccagttcacccaggcgctccagagcctctggaggcacagtcccccgatccctcctcctgcgcctcccgctgccggcgctgccaccagcggcgaggccgaaccctcgcggcagccgccggtactcgagaacgctgccttcgaggagtactataaggttcagcaaattgtccgcgaggaggagtgggatgccttcatgagtgttctacggaaaccattaccagcgacttttagaatcaatgcctgttgccagttttataaagatatctgttcaaagttagaaaatgaatttaggcgatctttggagagtgagtgatatgcatggagaagatgctataactcccttgccttggtatccatgcagtcttgcatggcacctgaatttctcccggaaggaattgaggaaaaatcaggcactcgaaagttttcatgagtttctgaagcatgagagtgaggttggtaacataactagacaagaggctgttagcatggttccaccactgtttctgaatgtacaacctgatcaccatattcttgatatgtgtgctgctccaggctctaaaacttttcagttacttgagatgattcaccaatcaaaagaactaggtctacttccaggagcattggtacgtttctccctaagttgcatctggcactaaaactattgctcgtgtaactcttgatgatttttggagtcatgttagttgttagtattcaattttgttacatgtagctagtagaactagtcgttttataatttccaaagacttatgagaaattaatactttagttatattgatatggcctaggaccaacttggcccagtaaacggctcagtctggcctgtaggccgtggcgccggcatggtaaggactaaggaggacctagagcctaggtggctaggaggtctatctcctgtagtcctgtactacccctgtccctaagtcagtccctatatatagaggccccatgtacccttgcaacttaaggagaagtagatcaaagggacaaagggttagcccatcttttcttcccctgacttgggcgttgtcctactggtcactcttcctgtcctctcatttctccccaaatccccctccctaatctggggcaatctaagtactaacatatatattctcccttgttcttgtgagactggttaggtgatagccaacgatctcaatatgcgaagatgtgacctccttatccataatacaaagagaatgtgcaccgccaacctaatagtaacaaaccatggagcagaaaacttcccctattgttctcttgcaaaggattgttcaggttcatataaagatccctgcaaactacaaaagctagaattcgaccgcatactttgtgatgttccgtgtagtggtgatgggactattcgcaagggtcatgacatgtggagaaagtggaactcaggcatgggtaaccaacttcatcttctgcaagtaaatattgcaatgcgtggtattgcgttacttaaagtgggtggaaggatggtctattcgacttgttcattgaatcctgttgaaaatgaagctgtcatagctgagctccttcgaagaagtggaaactctgttgaactccttgatgtttctagcgagctacctgaattggttcggcgtcctgggcttagcacttggaaggtacaagatcgagaatcttggtttcagagtcacgatgaagttccacacaataggaagaatgtagtatttccaagcatgtttcctgcaagtaatagcaccgaggaaagccataccgtgtgtggtgatgttgaagtgaacataaataatatgaacagcttctcaagaaatatcaacattgaagaaacaagcaaacttaatcaagatatggatggagtttctgttagtcccactaaaattttggaatgcacttctaacattgtgagttcaaagtttccactgcatcggtgcatgaggattgttcctcatgaccagaacagcggggcatttttcatcgcagttcttcacaaattatcgcccttgaatggcagtcagataaaggatactaaaattcagcacagacttgggacagacagaactatacagttccagaaagagcccaagccagaaacacgaccctatgaaactactttgacacgccgtcagcacaatgtttctgaagttgatgatactgaagtgcttggtaggggacagaaattaggcacagacagccaaacttcaaaggataagaactcaagcgaggtcgaaatagttagcattctagcagagtcaggagatagaatggagttgcaaaagcaaagcaggtgggaaggggttgatcctgtcttagttttgaacgatgaagcggtgataaagagtatacaatccttctttggcatcaaggaatcattcccactcgaaggtcatctggtgactagaagtcctgataatgcaaggagaatatattacgtatcaaaatcagttaaagagattttggagctgaattcaaaagttggtgggcagctgaagatagcttcacttggtgttaaaatgtttgaaaggcatagatcaaaggatccctgtccatgtgcatataggttgtcttatgatggattatcgctggtgcttccatccatcagcaagaggatactatatgcatccgcactcgagttccaccgccttgtacagtaccgaagcataagctttgctcattttaccgacaccagattcggggagcaggctgcgtccttgacgcctggttgctgtgttgtagtgttactcgaagggaataggcgtgtagattccatttgtaaggatccctccacaattgccgttgtttgctggagagggaaggggaccattaacgttatggtttctccctcggataggaaggatctccttgaaaggatggcgtatcgatttggatgatggatgggataaaggtgggagcatatcctgtacgcaaagaagtcatgtgctcccaggcacaaaatgcatccagccgatccgttctgtatctaacggtgttatgacatttttgcaaataagtcttcccacgcttcccacattagtgttgttcattaaaaaaaccccg

SEQ ID NO: 3222 - DNA, 3227 bp, Zea Mays
atgctagccgccaggacccctgtctcgctctcgctccaccaccgcatcgtcgccggcggccaccgggggcgatgcgtcgggggcagccaaaggaggcgcggtggcgcgccgtgccgccagttcacccaggcgctccagagcctctggaggcacagtcccccgatccctcctcctgcgcctcccgctgccggcgctgccaccagcggcgaggccgaaccctcgcggcagccgccggtactcgagaacgctgccttcgaggagtactataaggtgagtttagtcttcctatttggagttatagtgtcgcgtacaaaatggcatggtttcagggtcctgttcttctggatgtgtgtcagtgttcagcaaattgtccgcgaggaggagtgggatgccttcatgagtgttctacggaaaccattaccagcgacttttagaatcaatgcctgtcttgcatggcacctgaatttctcccggaaggaattgaggaaaaatcaggcactcgaaagttttcatgagtttctgaagcatgagagtgaggttggtaacataactagacaagaggctgttagcatggttccaccactgtttctgaatgtacaacctgatcaccatattcttgatatgtgtgctgctccaggctctaaaacttttcagttacttgagatgattcaccaatcaaaagaactaggtctacttccaggagcattggtcgcaatctgttattgttgttcaggaactcaggcatgggtaaccaacttcatcttctgcaagtaaatattgcaatgcgtggtattgcgttacttaaagtgggtggaaggatggtctattcgacttgttcattgaatcctgttgaaaatgaagctgtcatagctgaggtatctactgtagttgcttacttttagctgttgaacataaagctgttatttattttgtgacttatagcctagatacgagcaaaatctctgcgttgagcagtttatgttagagttgatatctccttaggactaatgactgagtcttaaggggcatggggacccaccacctctatgggtatgtacaaccttgacaccatagtagatggtacgatttttttttaaagtagaagacacaacgaagacacatgtagttacactgggggtgtatctaaaccttatgtcttaattaataaaaattctctaagacatgactctttatgtgtgtttactagtgaagctgtgtcttaggcttagaaaaccgagctagaggtgtgtcttcatttttttacacttaccccataggcacacattaatatgcattgtacatgccctaactaatgcacaccgtgatcggaggtgctgactgcttcctactggctcggtcccatccgatgcgatgccataagaggggttcctggtgaccaaaaacgtgtgcgaggacaccactcagaatgaatgtgctcccctaatctaccaatcgagagggcatggcagtcaggtgaagaccgatgcacatggcactccactgcacatccctgccctaatgatctgctgctaattgagccattgagctccttcgaagaagtggaaactctgttgaactccttgatgtttctagcgagctacctgaattggttcggcgtcctgggcttagcacttggaaggtacaagatcgagaatcttggtttcagagtcacgatgaagttccacacaataggaagaatgtagtatttccaagcatgtttcctgcaagtaatagcaccgaggaaagccataccgtgtgtggtgatgttgaagtgaacataaataatatgaacagcttctcaagaaatatcaacattgaagaaacaagcaaacttaatcaagatatggatggagtttctgttagtcccactaaaattttggaatgcacttctaacattgtgagttcaaagtttccactgcatcggtgcatgaggattgttcctcatgaccagaacagcggggcatttttcatcgcagttcttcacaaattatcgcccttgaatggcagtcagataaaggatactaaaattcagcacagacttgggacagacagaactatacagttccagaaagagcccaagccagaaacacgaccctatgaaactactttgacacgccgtcagcacaatgtttctgaagttgatgatactgaagtgcttggtaggggacagaaattaggcacagacagccaaacttcaaaggataagaactcaagcgaggtcgaaatagttagcattctagcagagtcaggagatagaatggagttgcaaaagcaaagcaggtgggaaggggttgatcctgtcttagttttgaacgatgaagcggtgataaagagtatacaatccttctttggcatcaaggaatcattcccactcgaaggtcatctggtgactagaagtcctgataatgcaaggagaatatattacgtatcaaaatcagttaaagagattttggagctgaattcaaaagttggtgggcagctgaagatagcttcacttggtgttaaaatgtttgaaaggcatagatcaaaggatccctgtccatgtgcatataggttgtcttatgatggattatcgctggtgcttccatccatcagcaagaggatactatatgcatccgcactcgagttccaccgccttgtacagtaccgaagcataagctttgctcattttaccgacaccagattcggggagcaggctgcgtccttgacgcctggttgctgtgttgtagtgttactcgaaggtaatgtttatgacctacctgaagagtaaagataaaagaaaccatgagttagttcataatctaactttctctggtatttcagggaataggcgtgtagattccatttgtaaggatccctccacaattgccgttgtttgctggagagggaaggggaccattaacgttatggtttctccctcggataggaaggatctccttgaaaggatggcgtatcgatttggatgatggatgggataggatggtgatagtgagggtgtgacaggccacaagcagcagcagagacaattgtcaatgacgctttatatttttccgtatggatataaatagagattcggggtgaagactgtcagatcaagcaggaccacgactagatctgaaaatttgggctgaccattttgggtcgtccacggcctaaaaatagaacctcaaaaaaacatggcccgacatgtctcaaattattgtgctgtgactcaacacgattagatg

SEQ ID NO: 3223 - DNA, 3923 bp, Zea Mays
atgctagccgccaggacccctgtctcgctctcgctccaccaccgcatcgtcgccggcggccaccgggggcgatgcgtcgggggcagccaaaggaggcgcggtggcgcgccgtgccgccagttcacccaggcgctccagagcctctggaggcacagtcccccgatccctcctcctgcgcctcccgctgccggcgctgccaccagcggcgaggccgaaccctcgcggcagccgccggtactcgagaacgctgccttcgaggagtactataaggttcagcaaattgtccgcgaggaggagtgggatgccttcatgagtgttctacggaaaccattaccagcgacttttagaatcaatgcctgttgccagttttataaagatatctgttcaaagttagaaaatgaatttaggcgatctttggagagtgagtcttgcatggcacctgaatttctcccggaaggaattgaggaaaaatcaggcactcgaaagttttcatgagtttctgaagcatgagagtgaggttggtaacataactagacaagaggctgttagcatggttccaccactgtttctgaatgtacaacctgatcaccatattcttgatatgtgtgctgctccaggctctaaaacttttcagttacttgagatgattcaccaatcaaaagaactaggtctacttccaggagcattggtacgtttctccctaagttgcatctggcactaaaactattgctcgtgtaactcttgatgatttttggagtcatgttagttgttagtattcaattttgttacatgtagctagtagaactagtcgttttataatttccaaagacttatgagaaattaatactttagttatattgatatggcctaggaccaacttggcccagtaaacggctcagtctggcctgtaggccgtggcgccggcatggtaaggactaaggaggacctagagcctaggtggctaggaggtctatctcctgtagtcctgtactacccctgtccctaagtcagtccctatatatagaggccccatgtacccttgcaacttaaggagaagtagatcaaagggacaaagggttagcccatcttttcttcccctgacttgggcgttgtcctactggtcactcttcctgtcctctcatttctccccaaatccccctccctaatctggggcaatctaagtactaacatatatattctcccttgttcttgtgagactggttaggtgatagccaacgatctcaatatgcgaagatgtgacctccttatccataatacaaagagaatgtgcaccgccaacctaatagtaacaaaccatggagcagaaaacttcccctattgttctcttgcaaaggattgttcaggttcatataaagatccctgcaaactacaaaagctagaattcgaccgcatactttgtgatgttccgtgtagtggtgatgggactattcgcaagggtcatgacatgtggagaaagtggaactcaggcatgggtaaccaacttcatcttctgcaagtaaatattgcaatgcgtggtattgcgttacttaaagtgggtggaaggatggtctattcgacttgttcattgaatcctgttgaaaatgaagctgtcatagctgaggtatctactgtagttgcttacttttagctgttgaacataaagctgttatttattttgtgacttatagcctagatacgagcaaaatctctgcgttgagcagtttatgttagagttgatatctccttaggactaatgactgagtcttaaggggcatggggacccaccacctctatgggtatgtacaaccttgacaccatagtagatggtacgatttttttttaaagtagaagacacaacgaagacacatgtagttacactgggggtgtatctaaaccttatgtcttaattaataaaaattctctaagacatgactctttatgtgtgtttactagtgaagctgtgtcttaggcttagaaaaccgagctagaggtgtgtcttcatttttttacacttaccccataggcacacattaatatgcattgtacatgccctaactaatgcacaccgtgatcggaggtgctgactgcttcctactggctcggtcccatccgatgcgatgccataagaggggttcctggtgaccaaaaacgtgtgcgaggacaccactcagaatgaatgtgctcccctaatctaccaatcgagagggcatggcagtcaggtgaagaccgatgcacatggcactccactgcacatccctgccctaatgatctgctgctaattgagccattgagctccttcgaagaagtggaaactctgttgaactccttgatgtttctagcgagctacctgaattggttcggcgtcctgggcttagcacttggaaggtacaagatcgagaatcttggtttcagagtcacgatgaagttccacacaataggaagaatgtagtatttccaagcatgtttcctgcaagtaatagcaccgaggaaagccataccgtgtgtggtgatgttgaagtgaacataaataatatgaacagcttctcaagaaatatcaacattgaagaaacaagcaaacttaatcaagatatggatggagtttctgttagtcccactaaaattttggaatgcacttctaacattgtgagttcaaagtttccactgcatcggtgcatgaggattgttcctcatgaccagaacagcggggcatttttcatcgcagttcttcacaaattatcgcccttgaatggcagtcagataaaggatactaaaattcagcacagacttgggacagacagaactatacagttccagaaagagcccaagccagaaacacgaccctatgaaactactttgacacgccgtcagcacaatgtttctgaagttgatgatactgaagtgcttggtaggggacagaaattaggcacagacagccaaacttcaaaggataagaactcaagcgaggtcgaaatagttagcattctagcagagtcaggagatagaatggagttgcaaaagcaaagcaggtgggaaggggttgatcctgtcttagttttgaacgatgaagcggtgataaagagtatacaatccttctttggcatcaaggaatcattcccactcgaaggtcatctggtgactagaagtcctgataatgcaaggagaatatattacgtatcaaaatcagttaaagagattttggagctgaattcaaaagttggtgggcagctgaagatagcttcacttggtgttaaaatgtttgaaaggcatagatcaaaggatccctgtccatgtgcatataggttgtcttatgatggattatcgctggtgcttccatccatcagcaagaggatactatatgcatccgcactcgagttccaccgccttgtacagtaccgaagcataagctttgctcattttaccgacaccagattcggggagcaggctgcgtccttgacgcctggttgctgtgttgtagtgttactcgaagggaataggcgtgtagattccatttgtaaggatccctccacaattgccgttgtttgctggagagggaaggggaccattaacgttatggtttctccctcggataggaaggatctccttgaaaggatggcgtatcgatttggatgatggatgccctaacgacgactatggagcttgccttggcatcttgacaaggacctaccttcctatttggttggctgctaattaaaacttggtataccacattaattaattctaggcatgtgtgttttgtttcacattataaagtgggatttgtcaaactttgttacgaatagcaggttcttagtaatttacacacgtcggttggttgggcctggacgaaggaaggatttgtacagatcagatgagagagttttgagtttgcaactatgaactatgtactactatctatctctttc

SEQ ID NO: 3224 - DNA, 2820 bp, Zea Mays
atgctagccgccaggacccctgtctcgctctcgctccaccaccgcatcgtcgccggcggccaccgggggcgatgcgtcgggggcagccaaaggaggcgcggtggcgcgccgtgccgccagttcacccaggcgctccagagcctctggaggcacagtcccccgatccctcctcctgcgcctcccgctgccggcgctgccaccagcggcgaggccgaaccctcgcggcagccgccggtactcgagaacgctgccttcgaggagtactataaggtgagtttagtcttcctatttggagttatagtgtcgcgtacaaaatggcatggtttcagggtcctgttcttctggatgtgtgtcagtgttcagcaaattgtccgcgaggaggagtgggatgccttcatgagtgttctacggaaaccattaccagcgacttttagaatcaatgcctgtcttgcatggcacctgaatttctcccggaaggaattgaggaaaaatcaggcactcgaaagttttcatgagtttctgaagcatgagagtgaggttccaccactgtttctgaatgtacaacctgatcaccatattcttgatatgtgtgctgctccaggctctaaaacttttcagttacttgagatgattcaccaatcaaaagaactaggtctacttccaggagcattggaactcaggcatgggtaaccaacttcatcttctgcaagtaaatattgcaatgcgtggtattgcgttacttaaagtgggtggaaggatggtctattcgacttgttcattgaatcctgttgaaaatgaagctgtcatagctgaggtgctgactgcttcctactggctcggtcccatccgatgcgatgccataagaggggttcctggtgaccaaaaacgtgtgcgaggacaccactcagaatgaatgtgctcccctaatctaccaatcgagagggcatggcagtcaggtgaagaccgatgcacatggcactccactgcacatccctgccctaatgatctgctgctaattgagccattgagctccttcgaagaagtggaaactctgttgaactccttgatgtttctagcgagctacctgaattggttcggcgtcctgggcttagcacttggaaggtacaagatcgagaatcttggtttcagagtcacgatgaagttccacacaataggaagaatgtagtatttccaagcatgtttcctgcaagtaatagcaccgaggaaagccataccgtgtgtggtgatgttgaagtgaacataaataatatgaacagcttctcaagaaatatcaacattgaagaaacaagcaaacttaatcaagatatggatggagtttctgttagtcccactaaaattttggaatgcacttctaacattgtgagttcaaagtttccactgcatcggtgcatgaggattgttcctcatgaccagaacagcggggcatttttcatcgcagttcttcacaaattatcgcccttgaatggcagtcagataaaggatactaaaattcagcacagacttgggacagacagaactatacagttccagaaagagcccaagccagaaacacgaccctatgaaactactttgacacgccgtcagcacaatgtttctgaagttgatgatactgaagtgcttggtaggggacagaaattaggcacagacagccaaacttcaaaggataagaactcaagcgaggtcgaaatagttagcattctagcagagtcaggagatagaatggagttgcaaaagcaaagcaggtgggaaggggttgatcctgtcttagttttgaacgatgaagcggtgataaagagtatacaatccttctttggcatcaaggaatcattcccactcgaaggtcatctggtgactagaagtcctgataatgcaaggagaatatattacgtatcaaaatcagttaaagagattttggagctgaattcaaaagttggtgggcagctgaagatagcttcacttggtgttaaaatgtttgaaaggcatagatcaaaggatccctgtccatgtgcatataggttgtcttatgatggattatcgctggtgcttccatccatcagcaagaggatactatatgcatccgcactcgagttccaccgccttgtacagtaccgaagcataagctttgctcattttaccgacaccagattcggggagcaggctgcgtccttgacgcctggttgctgtgttgtagtgttactcgaagggaataggcgtgtagattccatttgtaaggatccctccacaattgccgttgtttgctggagagggaaggggaccattaacgttatggtttctccctcggataggaaggatctccttgaaaggatggcgtatcgatttggatgatggatgggataaaggtgggagcatatcctgtacgcaaagaagtcatgtgctcccaggcacaaaatgcatccagccgatccgttctgtatctaacggtgttatgacatttttgcaaataagtcttcccacgcttcccacattagtgttgttcattaaaaaaaccccgccctaacgacgactatggagcttgccttggcatcttgacaaggacctaccttcctatttggttggctgctaattaaaacttggtataccacattaattaattctaggcatgtgtgttttgtttcacattataaagtgggatttgtcaaactttgttacgaatagcaggttcttagtaatttacacacgtcggttggttgggcctggacgaaggaaggatttgtacagatcagatgagagagttttgagtttgcaactatgaactatgtactactatctatctctttc

SEQ ID NO: 3225 - DNA, 4668 bp, Zea Mays
atgctagccgccaggacccctgtctcgctctcgctccaccaccgcatcgtcgccggcggccaccgggggcgatgcgtcgggggcagccaaaggaggcgcggtggcgcgccgtgccgccagttcacccaggcgctccagagcctctggaggcacagtcccccgatccctcctcctgcgcctcccgctgccggcgctgccaccagcggcgaggccgaaccctcgcggcagccgccggtactcgagaacgctgccttcgaggagtactataaggtgagtttagtcttcctatttggagttatagtgtcgcgtacaaaatggcatggtttcagggtcctgttcttctggatgtgtgtcagtgttcagcaaattgtccgcgaggaggagtgggatgccttcatgagtgttctacggaaaccattaccagcgacttttagaatcaatgcctgttgccagttttataaagatatctgttcaaagttagaaaatgaatttaggcgatctttggagagtgagtcttgcatggcacctgaatttctcccggaaggaattgaggaaaaatcaggcactcgaaagttttcatgagtttctgaagcatgagagtgaggttggtaacataactagacaagaggctgttagcatggttccaccactgtttctgaatgtacaacctgatcaccatattcttgatatgtgtgctgctccaggctctaaaacttttcagttacttgagatgattcaccaatcaaaagaactaggtctacttccaggagcattggtacgtttctccctaagttgcatctggcactaaaactattgctcgtgtaactcttgatgatttttggagtcatgttagttgttagtattcaattttgttacatgtagctagtagaactagtcgttttataatttccaaagacttatgagaaattaatactttagttatattgatatggcctaggaccaacttggcccagtaaacggctcagtctggcctgtaggccgtggcgccggcatggtaaggactaaggaggacctagagcctaggtggctaggaggtctatctcctgtagtcctgtactacccctgtccctaagtcagtccctatatatagaggccccatgtacccttgcaacttaaggagaagtagatcaaagggacaaagggttagcccatcttttcttcccctgacttgggcgttgtcctactggtcactcttcctgtcctctcatttctccccaaatccccctccctaatctggggcaatctaagtactaacatatatattctcccttgttcttgtgagactggttaggtgatagccaacgatctcaatatgcgaagatgtgacctccttatccataatacaaagagaatgtgcaccgccaacctaatagtaacaaaccatggagcagaaaacttcccctattgttctcttgcaaaggattgttcaggttcatataaagatccctgcaaactacaaaagctagaattcgaccgcatactttgtgatgttccgtgtagtggtgatgggactattcgcaagggtcatgacatgtggagaaagtggaactcaggcatgggtaaccaacttcatcttctgcaagtaaatattgcaatgcgtggtattgcgttacttaaagtgggtggaaggatggtctattcgacttgttcattgaatcctgttgaaaatgaagctgtcatagctgaggtatctactgtagttgcttacttttagctgttgaacataaagctgttatttattttgtgacttatagcctagatacgagcaaaatctctgcgttgagcagtttatgttagagttgatatctccttaggactaatgactgagtcttaaggggcatggggacccaccacctctatgggtatgtacaaccttgacaccatagtagatggtacgatttttttttaaagtagaagacacaacgaagacacatgtagttacactgggggtgtatctaaaccttatgtcttaattaataaaaattctctaagacatgactctttatgtgtgtttactagtgaagctgtgtcttaggcttagaaaaccgagctagaggtgtgtcttcatttttttacacttaccccataggcacacattaatatgcattgtacatgccctaactaatgcacaccgtgatcggaggtgctgactgcttcctactggctcggtcccatccgatgcgatgccataagaggggttcctggtgaccaaaaacgtgtgcgaggacaccactcagaatgaatgtgctcccctaatctaccaatcgagagggcatggcagtcaggtgaagaccgatgcacatggcactccactgcacatccctgccctaatgatctgctgctaattgagccattgaggtatgtactaattaatctgggaattagtgtgtccataccactaggctagtgatcctaatgggctaatcaatttcaagttcttacagtttagtcacatagttttgggtgatttatcggctggtaatttaataaggcaattatggtagcttatagaatccaaaatgatgagaaattcaatttgtatgccttacagtctcatgccactcgatttatgaggcagcttgagcacaagctgcaatctgaaccgtctcatcggaactctgaagatttgtagaggaaattccaaaaaatccacatgttatttgtgttggtgtagttttgaaaactttagtccttgactatgcataattaccttttctttagggtactgcatacaaataccatttgctattcgtttaatcattttcatattctgttcacaatatgtgtgctgtaatatgaattcactttgcaagttgttcatgtacctcgtaatcatatagctccttcgaagaagtggaaactctgttgaactccttgatgtttctagcgagctacctgaattggttcggcgtcctgggcttagcacttggaaggtttgtgtatctatatcaaggtacaagatcgagaatcttggtttcagagtcacgatgaagttccacacaataggaagaatgtagtatttccaagcatgtttcctgcaagtaatagcaccgaggaaagccataccgtgtgtggtgatgttgaagtgaacataaataatatgaacagcttctcaagaaatatcaacattgaagaaacaagcaaacttaatcaagatatggatggagtttctgttagtcccactaaaattttggaatgcacttctaacattgtgagttcaaagtttccactgcatcggtgcatgaggattgttcctcatgaccagaacagcggggcatttttcatcgcagttcttcacaaattatcgcccttgaatgtcagataaaggatactaaaattcagcacagacttgggacagacagaactatacagttccagaaagagcccaagccagaaacacgaccctatgaaactactttgacacgccgtcagcacaatgtttctgaagttgatgatactgaagtgcttggtaggggacagaaattaggcacagacagccaaacttcaaaggataagaactcaagcgaggtcgaaatagttagcattctagcagagtcaggagatagaatggagttgcaaaagcaaagcaggtgggaaggggttgatcctgtcttagttttgaacgatgaagcggtgataaagagtatacaatccttctttggcatcaaggaatcattcccactcgaaggtcatctggtgactagaagtcctgataatgcaaggagaatatattacgtatcaaaatcagttaaagagattttggagctgaattcaaaagttggtgggcagctgaagatagcttcacttggtgttaaaatgtttgaaaggcatagatcaaaggatccctgtccatgtgcatataggttgtcttatgatggattatcgctggtgcttccatccatcagcaagaggatactatatgcatccgcactcgagttccaccgccttgtacagtaccgaagcataagctttgctcattttaccgacaccagattcggggagcaggctgcgtccttgacgcctggttgctgtgttgtagtgttactcgaagggaataggcgtgtagattccatttgtaaggatccctccacaattgccgttgtttgctggagagggaaggggaccattaacgttatggtttctccctcggataggaaggatctccttgaaaggatggcgtatcgatttggatgatggatgggataaaggtgggagcatatcctgtacgcaaagaagtcatgtgctcccaggcacaaaatgcatccagccgatccgttctgtatctaacggtgttatgacatttttgcaaataagtcttcccacgcttcccacattagtgttgttcattaaaaaaaccccgccctaacgacgactatggagcttgccttggcatcttgacaaggacctaccttcctatttggttggctgctaattaaaacttggtataccacattaattaattctaggcatgtgtgttttgtttcacattataaagtgggatttgtcaaactttgttacgaatagcaggttcttagtaatttacacacgtcggttggttgggcctggacgaaggaaggatttgtacagatcagatgagagagttttgagtttgcaactatgaactatgtactactatctatctctttc

SEQ ID NO: 3226 - DNA, 2461 bp, Zea Mays
atgctagccgccaggacccctgtctcgctctcgctccaccaccgcatcgtcgccggcggccaccgggggcgatgcgtcgggggcagccaaaggaggcgcggtggcgcgccgtgccgccagttcacccaggcgctccagagcctctggaggcacagtcccccgatccctcctcctgcgcctcccgctgccggcgctgccaccagcggcgaggccgaaccctcgcggcagccgccggtactcgagaacgctgccttcgaggagtactataaggttcagcaaattgtccgcgaggaggagtgggatgccttcatgagtgttctacggaaaccattaccagcgacttttagaatcaatgcctgttgccagttttataaagatatctgttcaaagttagaaaatgaatttaggcgatctttggagagtgagtcttgcatggcacctgaatttctcccggaaggaattgaggaaaaatcaggcactcgaaagttttcatgagtttctgaagcatgagagtgaggttggtaacataactagacaagaggctgttagcatggttccaccactgtttctgaatgtacaacctgatcaccatattcttgatatgtgtgctgctccaggctctaaaacttttcagttacttgagatgattcaccaatcaaaagaactaggtctacttccaggagcattggaactcaggcatgggtaaccaacttcatcttctgcaagtaaatattgcaatgcgtggtattgcgttacttaaagtgggtggaaggatggtctattcgacttgttcattgaatcctgttgaaaatgaagctgtcatagctgagctccttcgaagaagtggaaactctgttgaactccttgatgtttctagcgagctacctgaattggttcggcgtcctgggcttagcacttggaaggtacaagatcgagaatcttggtttcagagtcacgatgaagttccacacaataggaagaatgtagtatttccaagcatgtttcctgcaagtaatagcaccgaggaaagccataccgtgtgtggtgatgttgaagtgaacataaataatatgaacagcttctcaagaaatatcaacattgaagaaacaagcaaacttaatcaagatatggatggagtttctgttagtcccactaaaattttggaatgcacttctaacattgtgagttcaaagtttccactgcatcggtgcatgaggattgttcctcatgaccagaacagcggggcatttttcatcgcagttcttcacaaattatcgcccttgaatggcagtcagataaaggatactaaaattcagcacagacttgggacagacagaactatacagttccagaaagagcccaagccagaaacacgaccctatgaaactactttgacacgccgtcagcacaatgtttctgaagttgatgatactgaagtgcttggtaggggacagaaattaggcacagacagccaaacttcaaaggataagaactcaagcgaggtcgaaatagttagcattctagcagagtcaggagatagaatggagttgcaaaagcaaagcaggtgggaaggggttgatcctgtcttagttttgaacgatgaagcggtgataaagagtatacaatccttctttggcatcaaggaatcattcccactcgaaggtcatctggtgactagaagtcctgataatgcaaggagaatatattacgtatcaaaatcagttaaagagattttggagctgaattcaaaagttggtgggcagctgaagatagcttcacttggtgttaaaatgtttgaaaggcatagatcaaaggatccctgtccatgtgcatataggttgtcttatgatggattatcgctggtgcttccatccatcagcaagaggatactatatgcatccgcactcgagttccaccgccttgtacagtaccgaagcataagctttgctcattttaccgacaccagattcggggagcaggctgcgtccttgacgcctggttgctgtgttgtagtgttactcgaagggaataggcgtgtagattccatttgtaaggatccctccacaattgccgttgtttgctggagagggaaggggaccattaacgttatggtttctccctcggataggaaggatctccttgaaaggatggcgtatcgatttggatgatggatgccctaacgacgactatggagcttgccttggcatcttgacaaggacctaccttcctatttggttggctgctaattaaaacttggtataccacattaattaattctaggcatgtgtgttttgtttcacattataaagtgggatttgtcaaactttgttacgaatagcaggttcttagtaatttacacacgtcggttggttgggcctggacgaaggaaggatttgtacagatcagatgagagagttttgagtttgcaactatgaactatgtactactatctatctctttc

SEQ ID NO: 3227 - DNA, 3308 bp, Zea Mays
atgctagccgccaggacccctgtctcgctctcgctccaccaccgcatcgtcgccggcggccaccgggggcgatgcgtcgggggcagccaaaggaggcgcggtggcgcgccgtgccgccagttcacccaggcgctccagagcctctggaggcacagtcccccgatccctcctcctgcgcctcccgctgccggcgctgccaccagcggcgaggccgaaccctcgcggcagccgccggtactcgagaacgctgccttcgaggagtactataaggttcagcaaattgtccgcgaggaggagtgggatgccttcatgagtgttctacggaaaccattaccagcgacttttagaatcaatgcctgttgccagttttataaagatatctgttcaaagttagaaaatgaatttaggcgatctttggagagtgaggtcagtgatatgcatggagaagatgctataactcccttgccttggtatccatgcagtcttgcatggcacctgaatttctcccggaaggaattgaggaaaaatcaggcactcgaaagttttcatgagtttctgaagcatgagagtgaggttggtaacataactagacaagaggctgttagcatggttccaccactgtttctgaatgtacaacctgatcaccatattcttgatatgtgtgctgctccaggctctaaaacttttcagttacttgagatgattcaccaatcaaaagaactaggtctacttccaggagcattggtacgtttctccctaagttgcatctggcactaaaactattgctcgtgtaactcttgatgatttttggagtcatgttagttgttagtattcaattttgttacatgtagctagtagaactagtcgttttataatttccaaagacttatgagaaattaatactttagttatattgatatggcctaggaccaacttggcccagtaaacggctcagtctggcctgtaggccgtggcgccggcatggtaaggactaaggaggacctagagcctaggtggctaggaggtctatctcctgtagtcctgtactacccctgtccctaagtcagtccctatatatagaggccccatgtacccttgcaacttaaggagaagtagatcaaagggacaaagggttagcccatcttttcttcccctgacttgggcgttgtcctactggtcactcttcctgtcctctcatttctccccaaatccccctccctaatctggggcaatctaagtactaacatatatattctcccttgttcttgtgagactggttaggtgatagccaacgatctcaatatgcgaagatgtgacctccttatccataatacaaagagaatgtgcaccgccaacctaatagtaacaaaccatggagcagaaaacttcccctattgttctcttgcaaaggattgttcaggttcatataaagatccctgcaaactacaaaagctagaattcgaccgcatactttgtgatgttccgtgtagtggtgatgggactattcgcaagggtcatgacatgtggagaaagtggaactcaggcatgggtaaccaacttcatcttctgcaagtaaatattgcaatgcgtggtattgcgttacttaaagtgggtggaaggatggtctattcgacttgttcattgaatcctgttgaaaatgaagctgtcatagctgagctccttcgaagaagtggaaactctgttgaactccttgatgtttctagcgagctacctgaattggttcggcgtcctgggcttagcacttggaaggtacaagatcgagaatcttggtttcagagtcacgatgaagttccacacaataggaagaatgtagtatttccaagcatgtttcctgcaagtaatagcaccgaggaaagccataccgtgtgtggtgatgttgaagtgaacataaataatatgaacagcttctcaagaaatatcaacattgaagaaacaagcaaacttaatcaagatatggatggagtttctgttagtcccactaaaattttggaatgcacttctaacattgtgagttcaaagtttccactgcatcggtgcatgaggattgttcctcatgaccagaacagcggggcatttttcatcgcagttcttcacaaattatcgcccttgaatggcagtcagataaaggatactaaaattcagcacagacttgggacagacagaactatacagttccagaaagagcccaagccagaaacacgaccctatgaaactactttgacacgccgtcagcacaatgtttctgaagttgatgatactgaagtgcttggtaggggacagaaattaggcacagacagccaaacttcaaaggataagaactcaagcgaggtcgaaatagttagcattctagcagagtcaggagatagaatggagttgcaaaagcaaagcaggtgggaaggggttgatcctgtcttagttttgaacgatgaagcggtgataaagagtatacaatccttctttggcatcaaggaatcattcccactcgaaggtcatctggtgactagaagtcctgataatgcaaggagaatatattacgtatcaaaatcagttaaagagattttggagctgaattcaaaagttggtgggcagctgaagatagcttcacttggtgttaaaatgtttgaaaggcatagatcaaaggatccctgtccatgtgcatataggttgtcttatgatggattatcgctggtgcttccatccatcagcaagaggatactatatgcatccgcactcgagttccaccgccttgtacagtaccgaagcataagctttgctcattttaccgacaccagattcggggagcaggctgcgtccttgacgcctggttgctgtgttgtagtgttactcgaagggaataggcgtgtagattccatttgtaaggatccctccacaattgccgttgtttgctggagagggaaggggaccattaacgttatggtttctccctcggataggaaggatctccttgaaaggatggcgtatcgatttggatgatggatgccctaacgacgactatggagcttgccttggcatcttgacaaggacctaccttcctatttggttggctgctaattaaaacttggtataccacattaattaattctaggcatgtgtgttttgtttcacattataaagtgggatttgtcaaactttgttacgaatagcaggttcttagtaatttacacacgtcggttggttgggcctggacgaaggaaggatttgtacagatcagatgagagagttttgagtttgcaactatgaactatgtactactatctatctctttc

SEQ ID NO: 3228 - DNA, 4011 bp, Zea Mays
atgctagccgccaggacccctgtctcgctctcgctccaccaccgcatcgtcgccggcggccaccgggggcgatgcgtcgggggcagccaaaggaggcgcggtggcgcgccgtgccgccagttcacccaggcgctccagagcctctggaggcacagtcccccgatccctcctcctgcgcctcccgctgccggcgctgccaccagcggcgaggccgaaccctcgcggcagccgccggtactcgagaacgctgccttcgaggagtactataaggttcagcaaattgtccgcgaggaggagtgggatgccttcatgagtgttctacggaaaccattaccagcgacttttagaatcaatgcctgttgccagttttataaagatatctgttcaaagttagaaaatgaatttaggcgatctttggagagtgaggtcagtgatatgcatggagaagatgctataactcccttgccttggtatccatgcagtcttgcatggcacctgaatttctcccggaaggaattgaggaaaaatcaggcactcgaaagttttcatgagtttctgaagcatgagagtgaggttggtaacataactagacaagaggctgttagcatggttccaccactgtttctgaatgtacaacctgatcaccatattcttgatatgtgtgctgctccaggctctaaaacttttcagttacttgagatgattcaccaatcaaaagaactaggtctacttccaggagcattggtacgtttctccctaagttgcatctggcactaaaactattgctcgtgtaactcttgatgatttttggagtcatgttagttgttagtattcaattttgttacatgtagctagtagaactagtcgttttataatttccaaagacttatgagaaattaatactttagttatattgatatggcctaggaccaacttggcccagtaaacggctcagtctggcctgtaggccgtggcgccggcatggtaaggactaaggaggacctagagcctaggtggctaggaggtctatctcctgtagtcctgtactacccctgtccctaagtcagtccctatatatagaggccccatgtacccttgcaacttaaggagaagtagatcaaagggacaaagggttagcccatcttttcttcccctgacttgggcgttgtcctactggtcactcttcctgtcctctcatttctccccaaatccccctccctaatctggggcaatctaagtactaacatatatattctcccttgttcttgtgagactggttaggtgatagccaacgatctcaatatgcgaagatgtgacctccttatccataatacaaagagaatgtgcaccgccaacctaatagtaacaaaccatggagcagaaaacttcccctattgttctcttgcaaaggattgttcaggttcatataaagatccctgcaaactacaaaagctagaattcgaccgcatactttgtgatgttccgtgtagtggtgatgggactattcgcaagggtcatgacatgtggagaaagtggtaataacaggatctttgttttgtctgctgttttatgcttccctgtatgtatcctcaggtcgcaatctgttattgttgttcaggaactcaggcatgggtaaccaacttcatcttctgcaagtaaatattgcaatgcgtggtattgcgttacttaaagtgggtggaaggatggtctattcgacttgttcattgaatcctgttgaaaatgaagctgtcatagctgagcctagatacgagcaaaatctctgcgttgagcagtttatgttagagttgatatctccttaggactaatgactgagtcttaaggggcatggggacccaccacctctatgggtatgtacaaccttgacaccatagtagatggtacgatttttttttaaagtagaagacacaacgaagacacatgtagttacactgggggtgtatctaaaccttatgtcttaattaataaaaattctctaagacatgactctttatgtgtgtttactagtgaagctgtgtcttaggcttagaaaaccgagctagaggtgtgtcttcatttttttacacttaccccataggcacacattaatatgcattgtacatgccctaactaatgcacaccgtgatcggaggtgctgactgcttcctactggctcggtcccatccgatgcgatgccataagaggggttcctggtgaccaaaaacgtgtgcgaggacaccactcagaatgaatgtgctcccctaatctaccaatcgagagggcatggcagtcaggtgaagaccgatgcacatggcactccactgcacatccctgccctaatgatctgctgctaattgagccattgagctccttcgaagaagtggaaactctgttgaactccttgatgtttctagcgagctacctgaattggttcggcgtcctgggcttagcacttggaaggtttgtgtatctatatcaaggtacaagatcgagaatcttggtttcagagtcacgatgaagttccacacaataggaagaatgtagtatttccaagcatgtttcctgcaagtaatagcaccgaggaaagccataccgtgtgtggtgatgttgaagtgaacataaataatatgaacagcttctcaagaaatatcaacattgaagaaacaagcaaacttaatcaagatatggatggagtttctgttagtcccactaaaattttggaatgcacttctaacattgtgagttcaaagtttccactgcatcggtgcatgaggattgttcctcatgaccagaacagcggggcatttttcatcgcagttcttcacaaattatcgcccttgaatgtcagataaaggatactaaaattcagcacagacttgggacagacagaactatacagttccagaaagagcccaagccagaaacacgaccctatgaaactactttgacacgccgtcagcacaatgtttctgaagttgatgatactgaagtgcttggtaggggacagaaattaggcacagacagccaaacttcaaaggataagaactcaagcgaggtcgaaatagttagcattctagcagagtcaggagatagaatggagttgcaaaagcaaagcaggtgggaaggggttgatcctgtcttagttttgaacgatgaagcggtgataaagagtatacaatccttctttggcatcaaggaatcattcccactcgaaggtcatctggtgactagaagtcctgataatgcaaggagaatatattacgtatcaaaatcagttaaagagattttggagctgaattcaaaagttggtgggcagctgaagatagcttcacttggtgttaaaatgtttgaaaggcatagatcaaaggatccctgtccatgtgcatataggttgtcttatgatggattatcgctggtgcttccatccatcagcaagaggatactatatgcatccgcactcgagttccaccgccttgtacagtaccgaagcataagctttgctcattttaccgacaccagattcggggagcaggctgcgtccttgacgcctggttgctgtgttgtagtgttactcgaagggaataggcgtgtagattccatttgtaaggatccctccacaattgccgttgtttgctggagagggaaggggaccattaacgttatggtttctccctcggataggaaggatctccttgaaaggatggcgtatcgatttggatgatggatgccctaacgacgactatggagcttgccttggcatcttgacaaggacctaccttcctatttggttggctgctaattaaaacttggtataccacattaattaattctaggcatgtgtgttttgtttcacattataaagtgggatttgtcaaactttgttacgaatagcaggttcttagtaatttacacacgtcggttggttgggcctggacgaaggaaggatttgtacagatcagatgagagagttttgagtttgcaactatgaactatgtactactatctatctctttc

SEQ ID NO: 3229 - DNA, 3550 bp, Zea Mays
atgctagccgccaggacccctgtctcgctctcgctccaccaccgcatcgtcgccggcggccaccgggggcgatgcgtcgggggcagccaaaggaggcgcggtggcgcgccgtgccgccagttcacccaggcgctccagagcctctggaggcacagtcccccgatccctcctcctgcgcctcccgctgccggcgctgccaccagcggcgaggccgaaccctcgcggcagccgccggtactcgagaacgctgccttcgaggagtactataaggttcagcaaattgtccgcgaggaggagtgggatgccttcatgagtgttctacggaaaccattaccagcgacttttagaatcaatgcctgttgccagttttataaagatatctgttcaaagttagaaaatgaatttaggcgatctttggagagtgagtcttgcatggcacctgaatttctcccggaaggaattgaggaaaaatcaggcactcgaaagttttcatgagtttctgaagcatgagagtgaggttggtaacataactagacaagaggctgttagcatggttccaccactgtttctgaatgtacaacctgatcaccatattcttgatatgtgtgctgctccaggctctaaaacttttcagttacttgagatgattcaccaatcaaaagaactaggtctacttccaggagcattggtacgtttctccctaagttgcatctggcactaaaactattgctcgtgtaactcttgatgatttttggagtcatgttagttgttagtattcaattttgttacatgtagctagtagaactagtcgttttataatttccaaagacttatgagaaattaatactttagttatattgatatggcctaggaccaacttggcccagtaaacggctcagtctggcctgtaggccgtggcgccggcatggtaaggactaaggaggacctagagcctaggtggctaggaggtctatctcctgtagtcctgtactacccctgtccctaagtcagtccctatatatagaggccccatgtacccttgcaacttaaggagaagtagatcaaagggacaaagggttagcccatcttttcttcccctgacttgggcgttgtcctactggtcactcttcctgtcctctcatttctccccaaatccccctccctaatctggggcaatctaagtactaacatatatattctcccttgttcttgtgagactggttaggtgatagccaacgatctcaatatgcgaagatgtgacctccttatccataatacaaagagaatgtgcaccgccaacctaatagtaacaaaccatggagcagaaaacttcccctattgttctcttgcaaaggattgttcaggttcatataaagatccctgcaaactacaaaagctagaattcgaccgcatactttgtgatgttccgtgtagtggtgatgggactattcgcaagggtcatgacatgtggagaaagtggtaataacaggatctttgttttgtctgctgttttatgcttccctgtatgtatcctcaggtcgcaatctgttattgttgttcaggaactcaggcatgggtaaccaacttcatcttctgcaagtaaatattgcaatgcgtggtattgcgttacttaaagtgggtggaaggatggtctattcgacttgttcattgaatcctgttgaaaatgaagctgtcatagctgaggtgctgactgcttcctactggctcggtcccatccgatgcgatgccataagaggggttcctggtgaccaaaaacgtgtgcgaggacaccactcagaatgaatgtgctcccctaatctaccaatcgagagggcatggcagtcaggtgaagaccgatgcacatggcactccactgcacatccctgccctaatgatctgctgctaattgagccattgagctccttcgaagaagtggaaactctgttgaactccttgatgtttctagcgagctacctgaattggttcggcgtcctgggcttagcacttggaaggtacaagatcgagaatcttggtttcagagtcacgatgaagttccacacaataggaagaatgtagtatttccaagcatgtttcctgcaagtaatagcaccgaggaaagccataccgtgtgtggtgatgttgaagtgaacataaataatatgaacagcttctcaagaaatatcaacattgaagaaacaagcaaacttaatcaagatatggatggagtttctgttagtcccactaaaattttggaatgcacttctaacattgtgagttcaaagtttccactgcatcggtgcatgaggattgttcctcatgaccagaacagcggggcatttttcatcgcagttcttcacaaattatcgcccttgaatggcagtcagataaaggatactaaaattcagcacagacttgggacagacagaactatacagttccagaaagagcccaagccagaaacacgaccctatgaaactactttgacacgccgtcagcacaatgtttctgaagttgatgatactgaagtgcttggtaggggacagaaattaggcacagacagccaaacttcaaaggataagaactcaagcgaggtcgaaatagttagcattctagcagagtcaggagatagaatggagttgcaaaagcaaagcaggtgggaaggggttgatcctgtcttagttttgaacgatgaagcggtgataaagagtatacaatccttctttggcatcaaggaatcattcccactcgaaggtcatctggtgactagaagtcctgataatgcaaggagaatatattacgtatcaaaatcagttaaagagattttggagctgaattcaaaagttggtgggcagctgaagatagcttcacttggtgttaaaatgtttgaaaggcatagatcaaaggatccctgtccatgtgcatataggttgtcttatgatggattatcgctggtgcttccatccatcagcaagaggatactatatgcatccgcactcgagttccaccgccttgtacagtaccgaagcataagctttgctcattttaccgacaccagattcggggagcaggctgcgtccttgacgcctggttgctgtgttgtagtgttactcgaagggaataggcgtgtagattccatttgtaaggatccctccacaattgccgttgtttgctggagagggaaggggaccattaacgttatggtttctccctcggataggaaggatctccttgaaaggatggcgtatcgatttggatgatggatgccctaacgacgactatggagcttgccttggcatcttgacaaggacctaccttcctatttggttggctgctaattaaaacttggtataccacattaattaattctaggcatgtgtgttttgtttcacattataaagtgggatttgtcaaactttgttacgaatagcaggttcttagtaatttacacacgtcggttggttgggcctggacgaaggaaggatttgtacagatcagatgagagagttttgagtttgcaactatgaactatgtactactatctatctctttc

SEQ ID NO: 3230 - DNA, 2347 bp, Zea Mays
ttataaagatatctgttcaaagttagaaaatgaatttaggcgatctttggagagtgagtcttgcatggcacctgaatttctcccggaaggaattgaggaaaaatcaggcactcgaaagttttcatgagtttctgaagcatgagagtgaggttggtaacataactagacaagaggctgttagcatggttccaccactgtttctgaatgtacaacctgatcaccatattcttgatatgtgtgctgctccaggctctaaaacttttcagttacttgagatgattcaccaatcaaaagaactaggtctacttccaggagcattggtgatagccaacgatctcaatatgcgaagatgtgacctccttatccataatacaaagagaatgtgcaccgccaacctaatagtaacaaaccatggagcagaaaacttcccctattgttctcttgcaaaggattgttcaggttcatataaagatccctgcaaactacaaaagctagaattcgaccgcatactttgtgatgttccgtgtagtggtgatgggactattcgcaagggtcatgacatgtggagaaagtggaactcaggcatgggtaaccaacttcatcttctgcaagtaaatattgcaatgcgtggtattgcgttacttaaagtgggtggaaggatggtctattcgacttgttcattgaatcctgttgaaaatgaagctgtcatagctgagctccttcgaagaagtggaaactctgttgaactccttgatgtttctagcgagctacctgaattggttcggcgtcctgggcttagcacttggaaggtacaagatcgagaatcttggtttcagagtcacgatgaagttccacacaataggaagaatgtagtatttccaagcatgtttcctgcaagtaatagcaccgaggaaagccataccgtgtgtggtgatgttgaagtgaacataaataatatgaacagcttctcaagaaatatcaacattgaagaaacaagcaaacttaatcaagatatggatggagtttctgttagtcccactaaaattttggaatgcacttctaacattgtgagttcaaagtttccactgcatcggtgcatgaggattgttcctcatgaccagaacagcggggcatttttcatcgcagttcttcacaaattatcgcccttgaatggcagtcagataaaggatactaaaattcagcacagacttgggacagacagaactatacagttccagaaagagcccaagccagaaacacgaccctatgaaactactttgacacgccgtcagcacaatgtttctgaagttgatgatactgaagtgcttggtaggggacagaaattaggcacagacagccaaacttcaaaggataagaactcaagcgaggtcgaaatagttagcattctagcagagtcaggagatagaatggagttgcaaaagcaaagcaggtgggaaggggttgatcctgtcttagttttgaacgatgaagcggtgataaagagtatacaatccttctttggcatcaaggaatcattcccactcgaaggtcatctggtgactagaagtcctgataatgcaaggagaatatattacgtatcaaaatcagttaaagagattttggagctgaattcaaaagttggtgggcagctgaagatagcttcacttggtgttaaaatgtttgaaaggcatagatcaaaggatccctgtccatgtgcatataggttgtcttatgatggattatcgctggtgcttccatccatcagcaagaggatactatatgcatccgcactcgagttccaccgccttgtacagtaccgaagcataagctttgctcattttaccgacaccagattcggggagcaggctgcgtccttgacgcctggttgctgtgttgtagtgttactcgaagggaataggcgtgtagattccatttgtaaggatccctccacaattgccgttgtttgctggagagggaaggggaccattaacgttatggtttctccctcggataggaaggatctccttgaaaggatggcgtatcgatttggatgatggatgccctaacgacgactatggagcttgccttggcatcttgacaaggacctaccttcctatttggttggctgctaattaaaacttggtataccacattaattaattctaggcatgtgtgttttgtttcacattataaagtgggatttgtcaaactttgttacgaatagcaggttcttagtaatttacacacgtcggttggttgggcctggacgaaggaaggatttgtacagatcagatgagagagttttgagtttgcaactatgaactatgtactactatctatctctttc

SEQ ID NO: 3231 - DNA, 2191 bp, Zea Mays
gacaagaggctgttagcatggttccaccactgtttctgaatgtacaacctgatcaccatattcttgatatgtgtgctgctccaggctctaaaacttttcagttacttgagatgattcaccaatcaaaagaactaggtctacttccaggagcattgactggttaggtgatagccaacgatctcaatatgcgaagatgtgacctccttatccataatacaaagagaatgtgcaccgccaacctaatagtaacaaaccatggagcagaaaacttcccctattgttctcttgcaaaggattgttcaggttcatataaagatccctgcaaactacaaaagctagaattcgaccgcatactttgtgatgttccgtgtagtggtgatgggactattcgcaagggtcatgacatgtggagaaagtggaactcaggcatgggtaaccaacttcatcttctgcaagtaaatattgcaatgcgtggtattgcgttacttaaagtgggtggaaggatggtctattcgacttgttcattgaatcctgttgaaaatgaagctgtcatagctgagctccttcgaagaagtggaaactctgttgaactccttgatgtttctagcgagctacctgaattggttcggcgtcctgggcttagcacttggaaggtacaagatcgagaatcttggtttcagagtcacgatgaagttccacacaataggaagaatgtagtatttccaagcatgtttcctgcaagtaatagcaccgaggaaagccataccgtgtgtggtgatgttgaagtgaacataaataatatgaacagcttctcaagaaatatcaacattgaagaaacaagcaaacttaatcaagatatggatggagtttctgttagtcccactaaaattttggaatgcacttctaacattgtgagttcaaagtttccactgcatcggtgcatgaggattgttcctcatgaccagaacagcggggcatttttcatcgcagttcttcacaaattatcgcccttgaatggcagtcagataaaggatactaaaattcagcacagacttgggacagacagaactatacagttccagaaagagcccaagccagaaacacgaccctatgaaactactttgacacgccgtcagcacaatgtttctgaagttgatgatactgaagtgcttggtaggggacagaaattaggcacagacagccaaacttcaaaggataagaactcaagcgaggtcgaaatagttagcattctagcagagtcaggagatagaatggagttgcaaaagcaaagcaggtgggaaggggttgatcctgtcttagttttgaacgatgaagcggtgataaagagtatacaatccttctttggcatcaaggaatcattcccactcgaaggtcatctggtgactagaagtcctgataatgcaaggagaatatattacgtatcaaaatcagttaaagagattttggagctgaattcaaaagttggtgggcagctgaagatagcttcacttggtgttaaaatgtttgaaaggcatagatcaaaggatccctgtccatgtgcatataggttgtcttatgatggattatcgctggtgcttccatccatcagcaagaggatactatatgcatccgcactcgagttccaccgccttgtacagtaccgaagcataagctttgctcattttaccgacaccagattcggggagcaggctgcgtccttgacgcctggttgctgtgttgtagtgttactcgaagggaataggcgtgtagattccatttgtaaggatccctccacaattgccgttgtttgctggagagggaaggggaccattaacgttatggtttctccctcggataggaaggatctccttgaaaggatggcgtatcgatttggatgatggatgccctaacgacgactatggagcttgccttggcatcttgacaaggacctaccttcctatttggttggctgctaattaaaacttggtataccacattaattaattctaggcatgtgtgttttgtttcacattataaagtgggatttgtcaaactttgttacgaatagcaggttcttagtaatttacacacgtcggttggttgggcctggacgaaggaaggatttgtacagatcagatgagagagttttgagtttgcaactatgaactatgtactactatctatctctttc

SEQ ID NO: 3232 - DNA, 3011 bp, Zea Mays
caagaggctgttagcatggttccaccactgtttctgaatgtacaacctgatcaccatattcttgatatgtgtgctgctccaggctctaaaacttttcagttacttgagatgattcaccaatcaaaagaactaggtctacttccaggagcattggtgatagccaacgatctcaatatgcgaagatgtgacctccttatccataatacaaagagaatgtgcaccgccaacctaatagtaacaaaccatggagcagaaaacttcccctattgttctcttgcaaaggattgttcaggttcatataaagatccctgcaaactacaaaagctagaattcgaccgcatactttgtgatgttccgtgtagtggtgatgggactattcgcaagggtcatgacatgtggagaaagtggaactcaggcatgggtaaccaacttcatcttctgcaagtaaatattgcaatgcgtggtattgcgttacttaaagtgggtggaaggatggtctattcgacttgttcattgaatcctgttgaaaatgaagctgtcatagctgaggtatctactgtagttgcttacttttagctgttgaacataaagctgttatttattttgtgacttatagcctagatacgagcaaaatctctgcgttgagcagtttatgttagagttgatatctccttaggactaatgactgagtcttaaggggcatggggacccaccacctctatgggtatgtacaaccttgacaccatagtagatggtacgatttttttttaaagtagaagacacaacgaagacacatgtagttacactgggggtgtatctaaaccttatgtcttaattaataaaaattctctaagacatgactctttatgtgtgtttactagtgaagctgtgtcttaggcttagaaaaccgagctagaggtgtgtcttcatttttttacacttaccccataggcacacattaatatgcattgtacatgccctaactaatgcacaccgtgatcggaggtgctgactgcttcctactggctcggtcccatccgatgcgatgccataagaggggttcctggtgaccaaaaacgtgtgcgaggacaccactcagaatgaatgtgctcccctaatctaccaatcgagagggcatggcagtcaggtgaagaccgatgcacatggcactccactgcacatccctgccctaatgatctgctgctaattgagccattgagctccttcgaagaagtggaaactctgttgaactccttgatgtttctagcgagctacctgaattggttcggcgtcctgggcttagcacttggaaggtacaagatcgagaatcttggtttcagagtcacgatgaagttccacacaataggaagaatgtagtatttccaagcatgtttcctgcaagtaatagcaccgaggaaagccataccgtgtgtggtgatgttgaagtgaacataaataatatgaacagcttctcaagaaatatcaacattgaagaaacaagcaaacttaatcaagatatggatggagtttctgttagtcccactaaaattttggaatgcacttctaacattgtgagttcaaagtttccactgcatcggtgcatgaggattgttcctcatgaccagaacagcggggcatttttcatcgcagttcttcacaaattatcgcccttgaatggcagtcagataaaggatactaaaattcagcacagacttgggacagacagaactatacagttccagaaagagcccaagccagaaacacgaccctatgaaactactttgacacgccgtcagcacaatgtttctgaagttgatgatactgaagtgcttggtaggggacagaaattaggcacagacagccaaacttcaaaggataagaactcaagcgaggtcgaaatagttagcattctagcagagtcaggagatagaatggagttgcaaaagcaaagcaggtgggaaggggttgatcctgtcttagttttgaacgatgaagcggtgataaagagtatacaatccttctttggcatcaaggaatcattcccactcgaaggtcatctggtgactagaagtcctgataatgcaaggagaatatattacgtatcaaaatcagttaaagagattttggagctgaattcaaaagttggtgggcagctgaagatagcttcacttggtgttaaaatgtttgaaaggcatagatcaaaggatccctgtccatgtgcatataggttgtcttatgatggattatcgctggtgcttccatccatcagcaagaggatactatatgcatccgcactcgagttccaccgccttgtacagtaccgaagcataagctttgctcattttaccgacaccagattcggggagcaggctgcgtccttgacgcctggttgctgtgttgtagtgttactcgaagggaataggcgtgtagattccatttgtaaggatccctccacaattgccgttgtttgctggagagggaaggggaccattaacgttatggtttctccctcggataggaaggatctccttgaaaggatggcgtatcgatttggatgatggatgggataaaggtgggagcatatcctgtacgcaaagaagtcatgtgctcccaggcacaaaatgcatccagccgatccgttctgtatctaacggtgttatgacatttttgcaaataagtcttcccacgcttcccacattagtgttgttcattaaaaaaaccccgccctaacgacgactatggagcttgccttggcatcttgacaaggacctaccttcctatttggttggctgctaattaaaacttggtataccacattaattaattctaggcatgtgtgttttgtttcacattataaagtgggatttgtcaaactttgttacgaatagcaggttcttagtaatttacacacgtcggttggttgggcctggacgaaggaaggatttgtacagatcagatgagagagttttgagtttgcaactatgaactatgtactactatctatctctttc

SEQ ID NO: 3233 - DNA, 1396 bp, Zea Mays
cccctgtctgtttcgctttcgccacgtgaccccgaggcccgagcccgaagcggcggcgcgccgggcgtcttgacgtccccaatgacgccgcgcgtcgtggacggacctccgcagcttccctctcgtccgttccgcagtccgcacggggaggggagctacagcgacctaccgccgaggcgggccccaaccgcaccacgcctacttcaaaccctctcccaccccacctcctgccgttctcggaggggatcaagttcgcttctgccagtctgcctgcgtgctctgctggacagctggagagctagatggcgatgccgtccgggtggaggggtatcctgggcttccactacggcatcgtgcaggcgccgttgggccccgacatctccggccccgagctcgtcgccgccgtagcgaacgccggcgccatcggcctcctccgcctccccgactgggtcggcagccttgaggaggcagctaaagctaaagaagccggtgtagatgggatcattgttcagggacgtgaggcagggggtcatgtaattggtcaggaaggactgtttccactgttgccacgagtagtagatcttgtttcagactcgagcattccagttattgccgctggcggaattgtagatggacgtggctatgttgccgcattggcactcggtgcccaaggtgtttgtttaggaactaggtttgttgctaccgaggaaagctttgcacatcctatttataagcaaaagctaatcgagatgagtcacacagactacacaaatatattcggacgtgctagatggcctgatgctccacagcgggtcctggaaacacccttctatgatgagtggaagaataatttcccagaccaggaaacagaggaagatcaacccatcataggccactctatcatccatggtgtgcacaaggatattcgtcggtttgccggtactgttccaaacgcgacggcaacaggagatatcgacatcatggccatgtattcgggtcagggtgttgggctaatcacggagatcataccagctgctcaagttgtcaaaagtctggtcgctgaagcgaaggaagtcatcagagaaaagctttctggttaccaatagaatccttcctgaactgcaaactagaagtatctgtgtgtgagtagtcaccaatcagaataatcggaagcaccaaggtttaggtttgattcttgtgctatttttaagtacaataaagtaaaaaatgatgaaaataaacgagactaacaaaggtattctgtcagacatttgtgtgcgtgtgtgtgaaaatgtttcataatccatttgtgatcttggccatacataaattttgttattttaatttagctgtttcactactacattgcaaccatcagtatcatgcagacttcaat

SEQ ID NO: 3234 - DNA, 3629 bp, Zea Mays
ttgatttgggtgttttgtgtgtccctttttctatatgattcttcatttagctaaaatgtgtgcgccatgctttccagccccaagggaagtcatttttctacttgcaaggatgtttctgcatacctcatggcacttcttgggtatccagagctcaaaccagccactaataagtatgaaagcacaggacaaccttactcgagtgctaacgatggtgatgatagtctattccagtgatccaaatgatgtgaatgaaaggaacttaaacaaagcaaatgtttatcaatgccagaaatgcaatttgactttcggtgaccggacttcatatgcgcaacaccatttggcgtatcatgaaatgagtgttaagaggcgtaggactggcaagtttggtgagccagtagtagggaaagatggaaaatttgaatgccctatttgtcataagacctttgaggaggaaccacagtactttggtcatgtcggatctcatgcaagatatgaaggtttagctcctgaagcattcttggataaggctacttccagaagggcagctaatgattcattggcagaaattccatttagccttcaggaattgactgaatcacatggacagaacaacaaggtttcttatggtgaaaagggttttcagcaccacaatcattcaaataaacatggtgataataaccttacagccattgatctttttggtacaaattattcggataatttcatcaggccaaataaaacttggggtagtcctgaagagggaccttcctgtaatgatgctccaagtgtatctagatatacaaattttacaggccatgctgatgtgatagtttcagaaagggcatcaatctccaataatcaatctgttagcaacattaatggctttatatttagtgatcagccgggaggtaaccatgttgtcagacctactgcctctgtaacagccaatcattatgaggaccagattattgatcgtggcagggctgctccgaatgctgacaataatactgtgaaagcaagagatgtcaaccttaattcatgtgcaagtgcaagtacaatatctttccctattgcttatgcaaataatgaaacatcagctgcccttaatgaagctaatcggtcatcttctactgccaaatgttttagtggcagttttaataacaacgatggtgcatgtagtgcgtcttcctcttgtggaccaaccaataaaatatctagttcatttggcacatcaagcaaaacccaagctgctggctccagaagcattggtgcaagctatgaaccttatggtgaagattgtagtgcccttaaagctaacccttttgccagcaagaacaatacctcagtgtatcagtacaatttggccacacagcctgtctatgcagtggcagctagggcagattgttttgcttctggttcagagcagacaaaaaacagtgataaagaacttgcatccagtgccaagcaacggattgataacgtggagaacagaacaagtaaagaagcaggatttgtcgcggaagcttataatagtggtgcttttaatggtggtattaccgaaaagggttttgcacagatcagtaacagttttactcacataaagtccaatgcttctggctcttgttcactacctgaatcaaaaactccaacaaatggaagtgatagcaactgcatcaagggctctttggttaatagaggtgatgatagcttcacaaaggtctcaattgtcaatagacccatcaacaacaatgaatcaaatgtagctagacttgaggcgatgggaaagttgaatgatgagatgcaaaaccgctataactatcatgctcctggtattgaccctcatgttgcagctagtgctagccggaatgccaatggttttatgcctatgcaggccaattttggttgcatgtcctctacagttcaatctgttgttgatgtttcagtatccagcacatctcaagatcagaagcagcagatattttctaaccatggagagcttagaacggctacacctggatcccctctgcctgggagcattgccagaaaagattctgtacccactgaaccctcacattttgggagcatgaatggacctaaatcttttcccactggaacatctcagtttgggggctttgcaaagcctacttttgtgcctgctgcgccttctcagtttgggagcatggctcaagctaattatgtacattctgctcaatcctcccaattcacaagctgggttcaaccgaattctattcctcccgctgaatcctctcagtttggaagcaaagcccaatctagttctgtgccccctgctaatacctctcagttcaggggcatggctggacaaaattctgtacctcctgctcagtcttttgggagcacggttcgaccaaattatgtaactccagaatcctcacagtttgggagcatggccagaccaaattctgtccctccacagtatgttaacatgcccagccaaaattttgtgagctcatccgagccaacactggttttggggtatgcaccacagattggaagtggccctccacctcaagtacagttaggatgggatttgtccttgccaaggatggttactggcggcagcatggtcacttgtttatgtatatggtgcaacagtcagttccatcattttggccctgttgatggacagcagcccagttcttttggcttcatttgccccacctgtaaagataggatgtctggtcatcacagtgtgcccaacaatggttcatggcagccttgaggtgcagcgctgtctggttaatcatctgtattgctgcattcgagggatcttgtggttttctgtacactactcatgcctgtcgactgtcaaggtctgaaaatggtcttctcaagcagcagttgtccgtcctccaagttgagtggactgccaaggaatgaacggcatctctgtatcaacagtgtcagctgggagctggtgtagtagggtaatgagagaagctacttttcaagatagcaatgggagaccatgatgaatccaggccatatttatattttttcttgaatccaccagttacgttacgtgggaatgtcttgagttcactggttgcattacatctggaattttgctgccctcggatgacccagccacctttgcattgggctccgaggatgttgccactcagcttccccatgttttggtttactttgagttctagcagcgatgggagtggcctttgttattgcagtgtcttggtggctgtgtaaagtatgcgttagctctagctgtctcaggtttaatttgtccccattgaagtagttgtgcctttgtcgatgattgctcatttaagttgtgtatactcaagctgaaaaggctgaaggtaattgtaagtgttagctcgacgagcatagcctaacgtccgctctccctactacacagataggagcaaaaacgacgcccccagcaaattccaaacacggaaacacctgagaaggctaaggggccattcgtttcttccagaatagaggaataaaataatttctagctggtttgtttctctaatttatataagttttgatcggctgaattggttcctaatctatttctggacaaacgaacaaggcataaagaaacatgggcaaaaggaaat

SEQ ID NO: 3235 - DNA, 4522 bp, Zea Mays
ttgatttgggtgttttgtgtgtccctttttctatatgattcttcatttagctaaaatgtgtgcgccatgctttccagccccaagggaagtcatttttctacttgcaaggatgtttctgcatacctcatggcacttcttgggtatccagagctcaaaccagccactaataagtatgaaagcacaggacaaccttactcgagtgctaacgatggtgatgatagtctattccagtgatccaaatgatgtgaatgaaaggaacttaaacaaagcaaatgtttatcaatgccagaaatgcaatttgactttcggtgaccggacttcatatgcgcaacaccatttggcgtatcatgaaatgagtgttaagaggcgtaggactggcaagtttggtgagccagtagtagggaaagatggaaaatttgaatgccctatttgtcataagacctttgaggaggaaccacagtactttggtcatgtcggatctcatgcaagatatgaaggtttagctcctgaagcattcttggataaggctacttccagaagggcagctaatgattcattggcagaaattccatttagccttcaggaattgactgaatcacatggacagaacaacaaggtttcttatggtgaaaagggttttcagcaccacaatcattcaaataaacatggtgataataaccttacagccattgatctttttggtacaaattattcggataatttcatcaggccaaataaaacttggggtagtcctgaagagggaccttcctgtaatgatgctccaagtgtatctagatatacaaattttacaggccatgctgatgtgatagtttcagaaagggcatcaatctccaataatcaatctgttagcaacattaatggctttatatttagtgatcagccgggaggtaaccatgttgtcagacctactgcctctgtaacagccaatcattatgaggaccagattattgatcgtggcagggctgctccgaatgctgacaataatactgtgaaagcaagagatgtcaaccttaattcatgtgcaagtgcaagtacaatatctttccctattgcttatgcaaataatgaaacatcagctgcccttaatgaagctaatcggtcatcttctactgccaaatgttttagtggcagttttaataacaacgatggtgcatgtagtgcgtcttcctcttgtggaccaaccaataaaatatctagttcatttggcacatcaagcaaaacccaagctgctggctccagaagcattggtgcaagctatgaaccttatggtgaagattgtagtgcccttaaagctaacccttttgccagcaagaacaatacctcagtgtatcagtacaatttggccacacagcctgtctatgcagtggcagctagggcagattgttttgcttctggttcagagcagacaaaaaacagtgataaagaacttgcatccagtgccaagcaacggattgataacgtggagaacagaacaagtaaagaagcaggatttgtcgcggaagcttataatagtggtgcttttaatggtggtattaccgaaaagggttttgcacagatcagtaacagttttactcacataaagtccaatgcttctggctcttgttcactacctgaatcaaaaactccaacaaatggaagtgatagcaactgcatcaagggctctttggttaatagaggtgatgatagcttcacaaaggtctcaattgtcaatagacccatcaacaacaatgaatcaaatgtagctagacttgaggcgatgggaaagttgaatgatgagatgcaaaaccgctataactatcatgctcctggtattgaccctcatgttgcagctagtgctagccggaatgccaatggttttatgcctatgcaggccaattttggttgcatgtcctctacagttcaatctgttgttgatgtttcagtatccagcacatctcaagatcaggtaaacataccggaatttgtaggctttcttaactgttgcactttttagcaatgataagagtattgttaaacatctagtggatcatgatgatattatacccacttaaatcagtatttcccttacctctttagggcttgttcgcttagtaggggattggaggggattaaatcccttcctagtcaaaattgaatagaaagggatttaatccccctcaatcccctctgatccctatgcaatcgaacaaagccttagttgtttcattttgttccccttgcctccttagttgttttatttcgtttccccttgcctccttagttgttttatttcatttcccatatgtggttttatgactggataaatgagtaagatagatgctgctattcattacgtagatggcctttcaattcattattccacaagtcttgcatcagcatagcatgctggttattctgttctgcagaagcataatgcctctttgattatctaatgcgtttatgaactagtatatactacagcttggtatctgtcatcttggacatcaacagtctacgaaacccacatttgaccattatcagtttttctaaatatatgttagtagaaaaaatcattctgaaacctactaataaactttcatatggcatatagatctttgtgcccaatttgtaaaaccaattaaaaattcttttgatggttgtcttgctctcatatacccccttttaagcctaaacctttatgtgtttggtatgttcaccaattctttgttcttgatgttattagcatgtatcaaatgatttttgccacatgaatattcatgatctttaatgctgggtgaccatgtgaaattttgctgtttttttaagcagtgtgatttgcaacttggatttggtgcacagaagcagcagatattttctaaccatggagagcttagaacggctacacctggatcccctctgcctgggagcattgccagaaaagattctgtacccactgaaccctcacattttgggagcatgaatggacctaaatcttttcccactggaacatctcagtttgggggctttgcaaagcctacttttgtgcctgctgcgccttctcagtttgggagcatggctcaagctaattatgtacattctgctcaatcctcccaattcacaagctgggttcaaccgaattctattcctcccgctgaatcctctcagtttggaagcaaagcccaatctagttctgtgccccctgctaatacctctcagttcaggggcatggctggacaaaattctgtacctcctgctcagtcttttgggagcacggttcgaccaaattatgtaactccagaatcctcacagtttgggagcatggccagaccaaattctgtccctccacagtatgttaacatgcccagccaaaattttgtgagctcatccgagccaacactggttttggggtatgcaccacagattggaagtggccctccacctcaagtacagttaggatgggatttgtccttgccaaggatggttactggcggcagcatggtcacttgtttatgtatatggtgcaacagtcagttccatcattttggccctgttgatggacagcagcccagttcttttggcttcatttgccccacctgtaaagataggatgtctggtcatcacagtgtgcccaacaatggttcatggcagccttgaggtgcagcgctgtctggttaatcatctgtattgctgcattcgagggatcttgtggttttctgtacactactcatgcctgtcgactgtcaaggtctgaaaatggtcttctcaagcagcagttgtccgtcctccaagttgagtggactgccaaggaatgaacggcatctctgtatcaacagtgtcagctgggagctggtgtagtagggtaatgagagaagctacttttcaagatagcaatgggagaccatgatgaatccaggccatatttatattttttcttgaatccaccagttacgttacgtgggaatgtcttgagttcactggttgcattacatctggaattttgctgccctcggatgacccagccacctttgcattgggctccgaggatgttgccactcagcttccccatgttttggtttactttgagttctagcagcgatgggagtggcctttgttattgcagtgtcttggtggctgtgtaaagtatgcgttagctctagctgtctcaggtttaatttgtccccattgaagtagttgtgcctttgtcgatgattgctcatttaagttgtgtatactcaagctgaaaaggctgaaggtaattgtaagtgttagctcgacgagcatagcctaacgtccgctctccctactacacagataggagcaaaaacgacgcccccagcaaattccaaacacggaaacacctgagaaggctaaggggccattcgtttcttccagaatagaggaataaaataatttctagctggtttgtttctctaatttatataagttttgatcggctgaattggttcctaatctatttctggacaaacgaacaaggcataaagaaacatgggcaaaaggaaat

SEQ ID NO: 3236 - DNA, 3659 bp, Zea Mays
ttgatttgggtgttttgtgtgtccctttttctatatgattcttcatttagctaaaatgtgtgcgccatgctttccagccccaagggaagtcatttttctacttgcaaggatgtttctgcatacctcatggcacttcttgggtatccagagctcaaaccagccactaataagtatgaaagcacaggacaaccttactcgagtgctaacgatggtgatgatagtctattccagtgatccaaatgatgtgaatgaaaggaacttaaacaaagcaaatgtttatcaatgccagaaatgcaatttgactttcggtgaccggacttcatatgcgcaacaccatttggcgtatcatgaaatgagtgttaagaggcgtaggactggcaagtttggtgagccagtagtagggaaagatggaaaatttgaatgccctatttgtcataagacctttgaggaggaaccacagtactttggtcatgtcggatctcatgcaagatatgaaggtttagctcctgaagcattcttggataaggctacttccagaagggcagctaatgattcattggcagaaattccatttagccttcaggaattgactgaatcacatggacagaacaacaaggtttcttatggtgaaaagggttttcagcaccacaatcattcaaataaacatggtgataataaccttacagccattgatctttttggtacaaattattcggataatttcatcaggccaaataaaacttggggtagtcctgaagagggaccttcctgtaatgatgctccaagtgtatctagatatacaaattttacaggccatgctgatgtgatagtttcagaaagggcatcaatctccaataatcaatctgttagcaacattaatggctttatatttagtgatcagccgggaggtaaccatgttgtcagacctactgcctctgtaacagccaatcattatgaggaccagattattgatcgtggcagggctgctccgaatgctgacaataatactgtgaaagcaagagatgtcaaccttaattcatgtgcaagtgcaagtacaatatctttccctattgcttatgcaaataatgaaacatcagctgcccttaatgaagctaatcggtcatcttctactgccaaatgttttagtggcagttttaataacaacgatggtgcatgtagtgcgtcttcctcttgtggaccaaccaataaaatatctagttcatttggcacatcaagcaaaacccaagctgctggctccagaagcattggtgcaagctatgaaccttatggtgaagattgtagtgcccttaaagctaacccttttgccagcaagaacaatacctcagtgtatcagtacaatttggccacacagcctgtctatgcagtggcagctagggcagattgttttgcttctggttcagagcagacaaaaaacagtgataaagaacttgcatccagtgccaagcaacggattgataacgtggagaacagaacaagtaaagaagcaggatttgtcgcggaagcttataatagtggtgcttttaatggtggtattaccgaaaagggttttgcacagatcagtaacagttttactcacataaagtccaatgcttctggctcttgttcactacctgaatcaaaaactccaacaaatggaagtgatagcaactgcatcaagggctctttggttaatagaggtgatgatagcttcacaaaggtctcaattgtcaatagacccatcaacaacaatgaatcaaatgtagctagacttgaggcgatgggaaagttgaatgatgagatgcaaaaccgctataactatcatgctcctggtattgaccctcatgttgcagctagtgctagccggaatgccaatggttttatgcctatgcaggccaattttggttgcatgtcctctacagttcaatctgttgttgatgtttcagtatccagcacatctcaagatcagtgtgatttgcaacttggatttggtgcacagaagcagcagatattttctaaccatggagagcttagaacggctacacctggatcccctctgcctgggagcattgccagaaaagattctgtacccactgaaccctcacattttgggagcatgaatggacctaaatcttttcccactggaacatctcagtttgggggctttgcaaagcctacttttgtgcctgctgcgccttctcagtttgggagcatggctcaagctaattatgtacattctgctcaatcctcccaattcacaagctgggttcaaccgaattctattcctcccgctgaatcctctcagtttggaagcaaagcccaatctagttctgtgccccctgctaatacctctcagttcaggggcatggctggacaaaattctgtacctcctgctcagtcttttgggagcacggttcgaccaaattatgtaactccagaatcctcacagtttgggagcatggccagaccaaattctgtccctccacagtatgttaacatgcccagccaaaattttgtgagctcatccgagccaacactggttttggggtatgcaccacagattggaagtggccctccacctcaagtacagttaggatgggatttgtccttgccaaggatggttactggcggcagcatggtcacttgtttatgtatatggtgcaacagtcagttccatcattttggccctgttgatggacagcagcccagttcttttggcttcatttgccccacctgtaaagataggatgtctggtcatcacagtgtgcccaacaatggttcatggcagccttgaggtgcagcgctgtctggttaatcatctgtattgctgcattcgagggatcttgtggttttctgtacactactcatgcctgtcgactgtcaaggtctgaaaatggtcttctcaagcagcagttgtccgtcctccaagttgagtggactgccaaggaatgaacggcatctctgtatcaacagtgtcagctgggagctggtgtagtagggtaatgagagaagctacttttcaagatagcaatgggagaccatgatgaatccaggccatatttatattttttcttgaatccaccagttacgttacgtgggaatgtcttgagttcactggttgcattacatctggaattttgctgccctcggatgacccagccacctttgcattgggctccgaggatgttgccactcagcttccccatgttttggtttactttgagttctagcagcgatgggagtggcctttgttattgcagtgtcttggtggctgtgtaaagtatgcgttagctctagctgtctcaggtttaatttgtccccattgaagtagttgtgcctttgtcgatgattgctcatttaagttgtgtatactcaagctgaaaaggctgaaggtaattgtaagtgttagctcgacgagcatagcctaacgtccgctctccctactacacagataggagcaaaaacgacgcccccagcaaattccaaacacggaaacacctgagaaggctaaggggccattcgtttcttccagaatagaggaataaaataatttctagctggtttgtttctctaatttatataagttttgatcggctgaattggttcctaatctatttctggacaaacgaacaaggcataaagaaacatgggcaaaaggaaat

SEQ ID NO: 3237 - DNA, 974 bp, Zea Mays
ttttttttccttttcttttcgaaagacaaggttgacaaggcggtcatccgtcaggtcagggtcagcagcattctcccttccaaatgccgtcctccccgtggcctcccgctgccggagcgccgccgccgcagcagcgagcggcgcagggcacggtctccaccgtggcgccggagcgtctacccgtcgaggtaccacttccctccctctgtgtctctcgctctcgggcctcttgtctccactcagctcgcactaaggctcagctcacctgacctcatcacctaacctagggttcccgatctgggccagcgaaggaggaggacacggctcggcttccgtctgtcgactactactcagagctaaagaccctggagcatgcagagaaaaccaaaaaatatcagggtaagcttgcagcacggttgaaggccaaatatttttccaacaagacttttgaagaaggatatgtgtttgaagaaattgttatagaatcaaagaccgtccggttaagcaggtggccgtttacaaggttgtttgcagatccagcaagattttgccgagaaaagagctctactgagaagggcatttctcgacctctggctggtgaagccatgccagatgactaggcacctcattaatatctgactcctggcatgtggcaactatccatcatgaccacccgacagataagaaccatagtttgcgtcactaacctgtatctgttatccttaaaatcagtgacctggagcttgtatattttcaacaggccaaagttaaaaccttatccagttttgaaccaaaggcaaattttcgttttgtagacatgcttacagtaccaagatcgtagcactatggagccaattattgcaatgctccaggctgtaattggaatcatgatgagcagcagatgggtgaacacacctgagctgcatcagctactccttatcttcatgcaactgtggtgttgcagttgtttcttc

SEQ ID NO: 3238 - DNA, 1316 bp, Zea Mays
ttttttttccttttcttttcgaaagacaaggttgacaaggcggtcatccgtcaggtcagggtcagcagcattctcccttccaaatgccgtcctccccgtggcctcccgctgccggagcgccgccgccgcagcagcgagcggcgcagggcacggtctccaccgtggcgccggagcgtctacccgtcgagggttcccgatctgggccagcgaaggaggaggacacggctcggcttccgtctgtcgactactactcagagctaaagaccctggagcatgcagagaaaaccaaaaaatatcagggtaagcttgcagcacggttgaaggccaaatatttttccaacaagacttttgaagaaggatatgtgtttgaagaaattgttatagaatcaaagaccgtccggttaagcaggtggccgtttacaaggttgtttgcagatccagcaagattttgccgagaaaagagctctactgagaagggcatttctcgacctctggctggtgaagccatgccagatgactaggcacctcattaatatctgactcctggcatgtggcaactatccatcatgaccacccgacagataagaaccatagtttgcgtcactaacctgtatctgttatccttaaaatcagtgacctggagcttgtatattttcaacaggccaaagttaaaaccttatccagttttgaaccaaaggcaaattttcgttttgtagacatgcttacaggtatactgagacccatgcatttgcctatatctatatcgatattattcctcctgagggacgtttcaactttttacctgagatatgggtgccgtatccatgacctttgcatattttctggttccctctcttctgaaatgatgtaatttttagggcagtagcatcatgtctcctgatattctgtttgcagtaccaagatcgtagcactatggagccaattattgcaatgctccaggctgtaattggaatcatgatgagcagcagatgggtgaacacacctgagctgcatcagctactccttatcttcatgcaactgtggtgttgcaggtccatggccagcactgtgagacatggcatggtggatgatggtgcattggtgcttcttccaccggcgcctggtgtcttttgttcactgttgcttgggccctgtgatgtgagcatctcgcgcagcacatgcgcatgcgcatgcacagaatttaggttcactggaatcctgtgcgacaagcatctcaatgaatgggataggatgttggtggttcggttcaagacaagattgtttgatacacatatactgaaacttgtctgatactg

SEQ ID NO: 3239 - DNA, 1784 bp, Zea Mays
ttttttttccttttcttttcgaaagacaaggttgacaaggcggtcatccgtcaggtcagggtcagcagcattctcccttccaaatgccgtcctccccgtggcctcccgctgccggagcgccgccgccgcagcagcgagcggcgcagggcacggtctccaccgtggcgccggagcgtctacccgtcgagggttcccgatctgggccagcgaaggaggaggacacggctcggcttccgtctgtcgactactactcagagctaaagaccctggagcatgcagagaaaaccaaaaaatatcagggtaagcttgcagcacggttgaaggccaaatatttttccaacaagacttttgaagaaggtaatttgtaacaactgaatggcctgctaaattaatatgaacatttgtttcacttattttgtgtcagacaatataacctgtcagttttgttatccagcattagctatcgatatgtagtccatcatatttcaggatgtgctactctcgatatgtagtccatcatcatactggtctgaatttcaaatgttttgcataaatcttgaggcacatttgaaggcatttatgctgcccttgccaactagtgtgtgtaaaacctaatctgaatcaagatcctgtcctacaaatgcaagttgacacactgatgatatgcagactgaaatccaatatttccttagtggccaagcataatattgttgaactgcaaaaattctggataatcatagcatgagtctatggatcacgtgttattagttgatcaataacctgatgccttaccattatgtgatattgtagtttcataagaaatgaatttctggttgccttccatgctttgtacaaaaaaacaagaagtttgatagccaacttgttttctttctcctttttttttctttttaatctggctgatcagttgactgcaagtggaatgtctacactggcaatgcggtcatatgtgttattctgattctctttaccgtgtttaccatgccgtgaacaggatatgtgtttgaagaaattgttatagaatcaaagaccgtccggttaagcaggtggccgtttacaaggttgtttgcagatccagcaagattttgccgagaaaagagctctactgagaagggcatttctcgacctctggctggtgaagccatgccagatgactaggcacctcattaatatctgactcctggcatgtggcaactatccatcatgaccacccgacagataagaaccatagtttgcgtcactaacctgtatctgttatccttaaaatcagtgacctggagcttgtatattttcaacaggccaaagttaaaaccttatccagttttgaaccaaaggcaaattttcgttttgtagacatgcttacagtaccaagatcgtagcactatggagccaattattgcaatgctccaggctgtaattggaatcatgatgagcagcagatgggtgaacacacctgagctgcatcagctactccttatcttcatgcaactgtggtgttgcaggtccatggccagcactgtgagacatggcatggtggatgatggtgcattggtgcttcttccaccggcgcctggtgtcttttgttcactgttgcttgggccctgtgatgtgagcatctcgcgcagcacatgcgcatgcgcatgcacagaatttaggttcactggaatcctgtgcgacaagcatctcaatgaatgggataggatgttggtggttcggttcaagacaagattgtttgatacacatatactgaaacttgtctgatactg

SEQ ID NO: 3240 - DNA, 1554 bp, Zea Mays
ttttttttccttttcttttcgaaagacaaggttgacaaggcggtcatccgtcaggtcagggtcagcagcattctcccttccaaatgccgtcctccccgtggcctcccgctgccggagcgccgccgccgcagcagcgagcggcgcagggcacggtctccaccgtggcgccggagcgtctacccgtcgagggttcccgatctgggccagcgaaggaggaggacacggctcggcttccgtctgtcgactactactcagagctaaagaccctggagcatgcagagaaaaccaaaaaatatcagggtaagcttgcagcacggttgaaggccaaatatttttccaacaagacttttgaagaaggtaatttgtaacaactgaatggcctgctaaattaatatgaacatttgtttcacttattttgtgtcagacaatataacctgtcagttttgttatccagcattagctatcgatatgtagtccatcatatttcaggatgtgctactctcgatatgtagtccatcatcatactggtctgaatttcaaatgttttgcataaatcttgaggcacatttgaaggcatttatgctgcccttgccaactagtgtgtgtaaaacctaatctgaatcaagatcctgtcctacaaatgcaagttgacacactgatgatatgcagactgaaatccaatatttccttagtggccaagcataatattgttgaactgcaaaaattctggataatcatagcatgagtctatggatcacgtgttattagttgatcaataacctgatgccttaccattatgtgatattgtagtttcataagaaatgaatttctggttgccttccatgctttgtacaaaaaaacaagaagtttgatagccaacttgttttctttctcctttttttttctttttaatctggctgatcagttgactgcaagtggaatgtctacactggcaatgcggtcatatgtgttattctgattctctttaccgtgtttaccatgccgtgaacaggatatgtgtttgaagaaattgttatagaatcaaagaccgtccggttaagcaggtggccgtttacaaggttgtttgcagatccagcaagattttgccgagaaaagagctctactgagaagggcatttctcgacctctggctgtaccaagatcgtagcactatggagccaattattgcaatgctccaggctgtaattggaatcatgatgagcagcagatgggtgaacacacctgagctgcatcagctactccttatcttcatgcaactgtggtgttgcaggtccatggccagcactgtgagacatggcatggtggatgatggtgcattggtgcttcttccaccggcgcctggtgtcttttgttcactgttgcttgggccctgtgatgtgagcatctcgcgcagcacatgcgcatgcgcatgcacagaatttaggttcactggaatcctgtgcgacaagcatctcaatgaatgggataggatgttggtggttcggttcaagacaagattgtttgatacacatatactgaaacttgtctgatactg

SEQ ID NO: 3241 - DNA, 1571 bp, Zea Mays
catgccaggacgtaacaccttctgaagctggaagcctttataatagacccacaaccacacaataccaaacctcattccaagctctcttcattggttcatagctagctagttcgcctcccaaaaacacctgccctcgtgcgtggcaggagcacgggcacgatgatcagcacagcgcacagccggcagcagcaccatgccttcgagaagagccctggcaacagccacatgaagagcatcgacaggaagctgcagcaggccatgagccaggcggccagcaagtacatgcagaggatctaccctctaggcatgcagaggagcagctccagcctcacattgtcgtcgctctcgctgtcgcagaactccaacgactcctccatcagcagctccaactccagctgggagcccaaggtgccgctgctctacggcggcaccttcagcccatggggcgacgtcatggtgtctcgggagatgaggcgggaggacgatgacaaggtcagtgaccatgacgtcgaaggaggcgaggaggacttggactgcagtgagccggggagcctgcgtaggtgcagctggatcaccaagaacagtgccggctgttcgagcttctgtcgctgtcagggatgctgatcgaccacaactggacggagatactgaagcggcgggacatgtacagggaggcgttcgccgacttcgaccccagcgcggtggcgcggatggaggaggaggacgtggcggagatcagcggcgacagggagctgaggatcgccgagtgcagggtccggtgcatcgtggagaacgccaggtgcatccagagggtggccagggagttcggctccttcagcggctacatgtggggccacgtgaaccaccggccggtggtgggcaagtaccgccaccacaagtacatcccgttccggacgcccaagtcggaggcggtgagcaaggacctcgtccgccggggcttccgcctcgtcggccccgtcatcgtctactctttcatgcaggccgccggcatggccatcgaccacctcgtcgactgcttccgcttccacgactgcgtccgcctcgccgagcgctcctggggcatcaccaacgtcgccgcgtaggcgtagccagccggcccctcaatatctgtgcatgcatgcctctccaagtttttcacaccttcttcttggtgttgttattgtttttttgtttggagatcggaattgtgtgtgaaattacgtagagtatgtactctactaagttatgatgtaatacttctattaactctttgccaatgaaaagtagtactgaactaataggactgcatgcaagtggcttcggccttctgcaacagcagcaagccgcttctttttttttccatattaaaaaaggggaaattaaatctgcactattaaaaggtttgaaatttagatcttatttgagactgctccagctccagaaatgttcggtgggattgtgtgtgaaattgtatagagtttgtatggtaagttatgatgtaaatgtaatacttctattaactctttgccaataaaaaagtagtactgaactagttagactgcaggtttctg

SEQ ID NO: 3242 - DNA, 1484 bp, Zea Mays
aaacctcattccaagctctcttcattggttcatagctagctagttcgcctcccaaaaacacctgccctcgtgcgtggcaggagcacgggcacgatgatcagcacagcgcacagccggcagcagcaccatgccttcgagaagagccctggcaacagccacatgaagagcatcgacaggaagctgcagcaggccatgagccaggcggccagcaaaactccaacgactcctccatcagcagctccaactccagctgggagcccaaggtgccgctgctctacggcggcaccttcagcccatggggcgacgtcatggtgtctcgggagatgaggcgggaggacgatgacaaggtcagtgaccatgacgtcgaaggaggcgaggaggacttggactgcagtgagccggggagcctgcgtaggtgcagctggatcaccaagaacagtgacgaggcgtacgtccagttccacgacgagtgctggggcgtccctgtgtacagcgacaaccggctgttcgagcttctgtcgctgtcagggatgctgatcgaccacaactggacggagatactgaagcggcgggacatgtacagggaggcgttcgccgacttcgaccccagcgcggtggcgcggatggaggaggaggacgtggcggagatcagcggcgacagggagctgaggatcgccgagtgcagggtccggtgcatcgtggagaacgccaggtgcatccagagggtggccagggagttcggctccttcagcggctacatgtggggccacgtgaaccaccggccggtggtgggcaagtaccgccaccacaagtacatcccgttccggacgcccaagtcggaggcggtgagcaaggacctcgtccgccggggcttccgcctcgtcggccccgtcatcgtctactctttcatgcaggccgccggcatggccatcgaccacctcgtcgactgcttccgcttccacgactgcgtccgcctcgccgagcgctcctggggcatcaccaacgtcgccgcgtaggcgtagccagccggcccctcaatatctgtgcatgcatgcctctccaagtttttcacaccttcttcttggtgttgttattgtttttttgtttggagatcggaattgtgtgtgaaattacgtagagtatgtactctactaagttatgatgtaatacttctattaactctttgccaatgaaaagtagtactgaactaataggactgcatgcaagtggcttcggccttctgcaacagcagcaagccgcttctttttttttccatattaaaaaaggggaaattaaatctgcactattaaaaggtttgaaatttagatcttatttgagactgctccagctccagaaatgttcggtgggattgtgtgtgaaattgtatagagtttgtatggtaagttatgatgtaaatgtaatacttctattaactctttgccaataaaaaagtagtactgaactagttagactgcaggtttctg

SEQ ID NO: 3243 - DNA, 1606 bp, Zea Mays
ataatatgaagattgaactcttgtttgtcttcttcttcctccctcctcttgcattgctattgttaccccttccccttcgcttgccacatctgttctcctgagtggtaatccgagcacacggcgccgtgcgaggactgcttcctgcttcttccggtcgcgcccgacccggccgcagatatggttgggaacagtgtgatgtggcaacacctggaagtggaggatctccttctctaccacaaggagaaaatccttctttactacaaggagaaaatccatgagtcggggagggcctttgttctaagggaggtccatcacgaagagtgtgctcggaggcttaatgagaagtatggtgctaacttcacgtggaaacaaacctacaacaagtaccacaagctgaaaggagaatggaaggtgatcatggaggcgaagtctgctaggggtgctggttttgatgatgttcagaagaagataacctacgacgagatcgaggttgtcaagatgaaagctaaaggcgacaagaaggctaagtactacaatgttccgatccccttgtatgatgagatggagtttgtcttcacggggaaacacgctactggagagttcagtgttattgaagcaccgtttgatcgctcaggaaggcaagaggatgatgccgttgggaatgtcaacctagatcaagagccagcagatctgaatggtgactcttctcaacacgatttcgacaccctcgcagagtctgatagtccgaacccagtaggctcgaagcgcaggcacgaggagaaggagaaggagaaggagaaggaatggaaatgggctaggcaaggcgtccccatcttcatgcaggccctgtcggaagctgtgagctttacccacggtggcacggacccatacgagggtatttacaaagccattgaagacatggatgagtatcctttgccggcacgccttgatctgctgacctatcttgctcagaatcgtcacattgccagcatgttgaagggacggcaggaggaaactttcaagcaatgggtggcacgatgggttgctggtcactaccctttgtgattcgtgtttgaagctcaagtcgtcttatgattcgtttgcgctcggagtagggtctaacttgatagggcaagatgcatattttggccgtatgtaaactatgcatggcagaatgtatagttttttttcctgatagtatgaaactagatagtgagtgttactaggcatgcatggcgtgttgaggtgagggtcatgagataatcacttcatctattattatactactaggagaagagagcttaacaaaagacctactttatcttgttcctataagattttgatggggatgagaatccaatagaatttggcttcgtgcagacgatcgatcactgccactgcaataataaacgtcacatggaatgacaaccatttgtcaacagaggaacaagcgaagcaagccggtatatttatacaaagtctcacatactgaatattccatctagcaacagaacgacacctcgatttatttctgtgtctttgtttttagatatttgacgacccataaaaacatgagacaactagcatccagggaaggcgatctttg

SEQ ID NO: 3244 - DNA, 1602 bp, Zea Mays
ataatatgaagattgaactcttgtttgtcttcttcttcctccctcctcttgcattgctattgttaccccttccccttcgcttgccacatctgttctcctgagtggtaatccgagcacacggcgccgtgcgaggactgcttcctgcttcttccggtcgcgcccgacccggccgcagatatggttgggaacagtgtgatgtggcaacacctggaagtggaggatctccttctctaccacaaggagaaaatccttctttactacaaggagaaaatccatgagtcggggagggcctttgttctaagggaggtccatcacgaagagtgtgctcggaggcttaatgagaagtatggtgctaacttcacgtggaaacaaacctacaacaagtaccacaagctgaaaggagaatggaaggtgatcatggaggcgaagtctgctaggggtgctggttttgatgatgttcagaagaagataacctacgacgagatcgaggttgtcaagatgaaagctgcgacaagaaggctaagtactacaatgttccgatccccttgtatgatgagatggagtttgtcttcacggggaaacacgctactggagagttcagtgttattgaagcaccgtttgatcgctcaggaaggcaagaggatgatgccgttgggaatgtcaacctagatcaagagccagcagatctgaatggtgactcttctcaacacgatttcgacaccctcgcagagtctgatagtccgaacccagtaggctcgaagcgcaggcacgaggagaaggagaaggagaaggagaaggaatggaaatgggctaggcaaggcgtccccatcttcatgcaggccctgtcggaagctgtgagctttacccacggtggcacggacccatacgagggtatttacaaagccattgaagacatggatgagtatcctttgccggcacgccttgatctgctgacctatcttgctcagaatcgtcacattgccagcatgttgaagggacggcaggaggaaactttcaagcaatgggtggcacgatgggttgctggtcactaccctttgtgattcgtgtttgaagctcaagtcgtcttatgattcgtttgcgctcggagtagggtctaacttgatagggcaagatgcatattttggccgtatgtaaactatgcatggcagaatgtatagttttttttcctgatagtatgaaactagatagtgagtgttactaggcatgcatggcgtgttgaggtgagggtcatgagataatcacttcatctattattatactactaggagaagagagcttaacaaaagacctactttatcttgttcctataagattttgatggggatgagaatccaatagaatttggcttcgtgcagacgatcgatcactgccactgcaataataaacgtcacatggaatgacaaccatttgtcaacagaggaacaagcgaagcaagccggtatatttatacaaagtctcacatactgaatattccatctagcaacagaacgacacctcgatttatttctgtgtctttgtttttagatatttgacgacccataaaaacatgagacaactagcatccagggaaggcgatctttg

SEQ ID NO: 3245 - DNA, 2927 bp, Zea Mays
gcgagggggagaaaaggaaaggagagtaggagacaacacgaggcgccgaatcgaaacagggaaagccaaggcccctcccccgcgtacgcgtcactgtgcggcgcctcccccttcctcgctccgctttctgctctgttcgtgtgtgagtcgttgacgaaaccccaagtccatgtgggaggttttgacttgatccaaccaagaacgcgcatttcagccgtaaaatactcgtaccggtttccagggggtgatcatggcatgaaagcaaaaggtgatggatggttgttaacagttgctttaatcgacggaatcaaattggctccagtcgatgctactggtttatctgatccttatgtggtatttacttgcaatggcaaaacaagaacaagttcaattaagttccaaacactagagcctcagtggaacgaaatctttgaatttgacgcaatggatgatccaccgtcggtgatgagtgtacatgtatatgattttgatggaccattcgatgaagttacatcccttggacatgcggaaattaactttgtaaaatcaaacttgtcagagttagctgatgtatggattcctcttaaaggtaacctcgctcagtcttggcagtccaagttgcatctgaggattttcttgaacaactcaaaagggaccggcatggtcactgagtatctgagcaaaatggagaaagaggttggtaagaagatgacactgaggtctcctcggaccaatactgcattccaggaactcttctctttgccagcagaagaatttctcatcagcagttttacctgctacttgaagaggaaattgcctacacagggtcaagttttcttatctccaagaacaattgggttttattcaagcatgtttgggaggaaaacaaaattttactttctatgggaggatattgaagacatacagggaatacctcaatcaatatcatcatggagtccatccattataataactcttcacaaaggtagaggcatggatacaaagcatggtgcaaagagcatggacaatggaaagcttaagttctgcttgcagtcttttgcatcatttagtgtggccaataggacaataatggcattatggaaggcaagatctctgagcacagagcttaaagtacagcttgctgaagaacaatcccaaattaacacccttcagagtgaggacagtggggtctttgttggtattgaggatgccaagagccttcagatgactgaagttttctcctcgaccatttcgaccaatatggcctcgcttatggaggtgtttgcaggaggatccttggaaatgaaggtaatggataaagttggatgccagaagtactcggctacacagtgggaatcagataaacccaatgagtatcaacgacaaatccattacaagttcagcaagaagctgtctcccgttggcggagaagtgacaggaacccagcagaaatctcttatgcctaataagaaaggatgggttatcgaagaggtgatggagctccaaggagtccttcttggcgacttctttacgctccacatcaagtaccaggtcgaggacctcgctcccaagcaaagagcaagcaatgtgcaggtctccctgggaatcgagtggtcgaagagtaccaggcaccagaagcggatcgagaagaacgtcctttccagttcgtccgcccgcctaaaggagatgttcaaccttgcgtcgagggagctctcgcacgccagataggcggcggagcgtaatggcctttcgacgtctcacccaccgtccctgtgcataacaacaacaggaccgatcattgagtgaacatttaacacccactaactgtatatggaaagcttggctgaagactgacagacagcaacgccaagaagaagaggaggaggtactgtaggatagctcgatagacaacgatatagctgtatgttctgcttgcaagttgttctctctgcttgtagcagtatgggttgccctcaggtaggctctgaatgattctttggtcacaacacacaacacatgttggaattatacacagtacacgtccgaggctcaagagatggaacaaagctatgaagtttacaacattcattatagtcactattccaggcaggggacaggcttgcgtctgttgcccgttcattcatggcggcggttcagttgaacgccgactcgccgagcaggaagaagatcactgttttccggcggaaggagacgtgacagtgtgacaccgaaccgaaaccaccgttcccgcctccggaagccttgctgctgctgctgaagcatgaaccatgaagaaaggaaggatccagaccggcggcagcaaagcccaggtcgtcttgttgtcacgcccatgcccggagacgtcgctggcgcggtgcctgccaatgctgccagtgatccggagtacgtacttggctggcctccgatccaagaaaagaaaccgacttgctgtgacgggcgccgcgcgacgtgctccccatccatccatccaatcatctctcgatgagatcatgggaaggaacgtcgcgatcgttggcgtggattccgctggccccgtgcctgcctgtttcgtccctgcaccgccgccagccgcttctaccgccggtgaggtcgccttgaccgatcacccaggatgcgggccggtgcagtcgagcaggcgcgcgcgcacgccatgatgtgacctgcgataggctaggggatggcttccagcggcggcttgtatgctgtccgccaggaagatgatacagcaacttcactactctggtagcccaccgatttccccctccttttcacacagaaactctcttctctccttaaataaaggggtgatctagacctcaccagaacgatagaacatttgaatttttttttctccacaccccctcccccacacacatacacaccggagacggagaagataaagagag

SEQ ID NO: 3246 - DNA, 3769 bp, Zea Mays
gcgagggggagaaaaggaaaggagagtaggagacaacacgaggcgccgaatcgaaacagggaaagccaaggcccctcccccgcgtacgcgtcactgtgcggcgcctcccccttcctcgctccgctttctgctctgttcgtgtgtgagtcgttgacgaaaccccaagtccatgtgggaggttttgacttgatccaaccaagaacgcgcatttcagccgtaaaatactcgtaccggtttccaggtccggtcgcgtcttgctctcttccgtccctcatttgccttcccgtccctgctattcgcgtgtgggcctttgcttacccattcttgcttccgctgtctttgctgcgtgtaaatctgatccagtacttgtgtgtccgcgtcactggggattctttactttaagttggatttggcaatgtcaatggaaggagcgatatctgatctgaattggtgacatttcttgctgctgctttggtcctggggtgggcggattggagagcgaccactgtcttgccggttgcttttggggtagctactgttcttgtgaatttctgatgcggagtttcgctcaggatagggaaaggagtgatctatagatttctaggcttctgtagggaaagaagtgatctttgatagatttctacgcttctgttggcgattcctcttcatctcaacttggggatttctgccgaggagactttcctgactggtttgggttcagctgaggagcagagatgaggttgtctgttcgtgtgatcgaggcccgcaacctgcgggccatggactccaacggcttcagcgacccgtacgtgaagctgcagctcgggaagcagcgattcaagaccaaggtgatcaagatgaacctcaacccgacttgggatcaggagttcagcttccttgtcggtgatatcaaagatgtgctcaagcttgatgtctatgacgaggacatcctccagatggatgacttcctgggccatttgagggtgccattagaggatgtgctgtctgccgatgacttgtcgcttggtacccggtggtaccagcttcttcccaaaggcaaaaccaacaagaccgtcgactgtgggggtgatcatggcatgaaagcaaaaggtgatggatggttgttaacagttgctttaatcgacggaatcaaattggctccagtcgatgctactggtttatctgatccttatgtggtatttacttgcaatggcaaaacaagaacaagttcaattaagttccaaacactagagcctcagtggaacgaaatctttgaatttgacgcaatggatgatccaccgtcggtgatgagtgtacatgtatatgattttgatggaccattcgatgaagttacatcccttggacatgcggaaattaactttgtaaaatcaaacttgtcagagttagctgatgtatggattcctcttaaaggtaacctcgctcagtcttggcagtccaagttgcatctgaggattttcttgaacaactcaaaagggaccggcatggtcactgagtatctgagcaaaatggagaaagaggttggtaagaagatgacactgaggtctcctcggaccaatactgcattccaggaactcttctctttgccagcagaagaatttctcatcagcagttttacctgctacttgaagaggaaattgcctacacagggtcaagttttcttatctccaagaacaattgggttttattcaagcatgtttgggaggaaaacaaaattttactttctatgggaggatattgaagacatacagggaatacctcaatcaatatcatcatggagtccatccattataataactcttcacaaaggtagaggcatggatacaaagcatggtgcaaagagcatggacaatggaaagcttaagttctgcttgcagtcttttgcatcatttagtgtggccaataggacaataatggcattatggaaggcaagatctctgagcacagagcttaaagtacagcttgctgaagaacaatcccaaattaacacccttcagagtgaggacagtggggtctttgttggtattgaggatgccaagagccttcagatgactgaagttttctcctcgaccatttcgaccaatatggcctcgcttatggaggtgtttgcaggaggatccttggaaatgaaggtaatggataaagttggatgccagaagtactcggctacacagtgggaatcagataaacccaatgagtatcaacgacaaatccattacaagttcagcaagaagctgtctcccgttggcggagaagtgacaggaacccagcagaaatctcttatgcctaataagaaaggatgggttatcgaagaggtgatggagctccaaggagtccttcttggcgacttctttacgctccacatcaagtaccaggtcgaggacctcgctcccaagcaaagagcaagcaatgtgcaggtctccctgggaatcgagtggtcgaagagtaccaggcaccagaagcggatcgagaagaacgtcctttccagttcgtccgcccgcctaaaggagatgttcaaccttgcgtcgagggagctctcgcacgccagataggcggcggagcgtaatggcctttcgacgtctcacccaccgtccctgtgcataacaacaacaggaccgatcattgagtgaacatttaacacccactaactgtatatggaaagcttggctgaagactgacagacagcaacgccaagaagaagaggaggaggtactgtaggatagctcgatagacaacgatatagctgtatgttctgcttgcaagttgttctctctgcttgtagcagtatgggttgccctcaggtaggctctgaatgattctttggtcacaacacacaacacatgttggaattatacacagtacacgtccgaggctcaagagatggaacaaagctatgaagtttacaacattcattatagtcactattccaggcaggggacaggcttgcgtctgttgcccgttcattcatggcggcggttcagttgaacgccgactcgccgagcaggaagaagatcactgttttccggcggaaggagacgtgacagtgtgacaccgaaccgaaaccaccgttcccgcctccggaagccttgctgctgctgctgaagcatgaaccatgaagaaaggaaggatccagaccggcggcagcaaagcccaggtcgtcttgttgtcacgcccatgcccggagacgtcgctggcgcggtgcctgccaatgctgccagtgatccggagtacgtacttggctggcctccgatccaagaaaagaaaccgacttgctgtgacgggcgccgcgcgacgtgctccccatccatccatccaatcatctctcgatgagatcatgggaaggaacgtcgcgatcgttggcgtggattccgctggccccgtgcctgcctgtttcgtccctgcaccgccgccagccgcttctaccgccggtgaggtcgccttgaccgatcacccaggatgcgggccggtgcagtcgagcaggcgcgcgcgcacgccatgatgtgacctgcgataggctaggggatggcttccagcggcggcttgtatgctgtccgccaggaagatgatacagcaacttcactactctggtagcccaccgatttccccctccttttcacacagaaactctcttctctccttaaataaaggggtgatctagacctcaccagaacgatagaacatttgaatttttttttctccacaccccctcccccacacacatacacaccggagacggagaagataaagagag

SEQ ID NO: 3247 - DNA, 5112 bp, Zea Mays
gcgagggggagaaaaggaaaggagagtaggagacaacacgaggcgccgaatcgaaacagggaaagccaaggcccctcccccgcgtacgcgtcactgtgcggcgcctcccccttcctcgctccgctttctgctctgttcgtgtgtgagtcgttgacgaaaccccaagtccatgtgggaggttttgacttgatccaaccaagaacgcgcatttcagccgtaaaatactcgtaccggtttccaggtccggtcgcgtcttgctctcttccgtccctcatttgccttcccgtccctgctattcgcgtgtgggcctttgcttacccattcttgcttccgctgtctttgctgcgtgtaaatctgatccagtacttgtgtgtccgcgtcactggggattctttactttaagttggatttggcaatgtcaatggaaggagcgatatctgatctgaattggtgacatttcttgctgctgctttggtcctggggtgggcggattggagagcgaccactgtcttgccggttgcttttggggtagctactgttcttgtgaatttctgatgcggagtttcgctcaggatagggaaaggagtgatctatagatttctaggcttctgtagggaaagaagtgatctttgatagatttctacgcttctgttggcgattcctcttcatctcaacttggggatttctgccgaggagactttcctgactggtttgggttcagctgaggagcagagatgaggttgtctgttcgtgtgatcgaggcccgcaacctgcgggccatggactccaacggcttcagcgacccgtacgtgaagctgcagctcgggaagcagcgattcaagaccaaggtgatcaagatgaacctcaacccgacttgggatcaggagttcagcttccttgtcggtgatatcaaagatgtgctcaagcttgatgtctatgacgaggacatcctccagatggatgacttcctgggccatttgagggtgccattagaggatgtgctgtctgccgatgacttgtcgcttggtacccggtggtaccagcttcttcccaaaggcaaaaccaacaagaccgtcgactgtggggagatttgtgtctcaatatcgttagaatcatctggagcatcacgatcatggtctgaggaccttggagatgaaattactgatatacagagagactattcactgtcaagccaaaacacggctccatctatttcatttgcttatcgagaaactgaaatttgtgaagaagacgatgagtattctgttacatctgaaattcatgcagaggatagaagtagtgaagttactgatagaaatcaagctgctgcagaggacaagccaaatgggaattctagtgcagatttgaatggaactgaaacttctagtggtgaaacagataagtctgataagctatcatttgttgatcgtgtctaccaaatatttgctaagaaaaatggcgatacaatgccaacctcctctggaagctctgaggctttagaagaagttcaagaggaagcaagtggatgtgagcttctggtcagtcaaattgataatgtgtgcccagagactccattcagtgaactactgagatctcttgaattgcgacatgaaggagtcgatatgcctgtaaatctacaaggaattcttgttaatcagtcgtatcttgcctcacctagtgatctgaataaccttctcttctcaccagattcagattttaaacaaacaatggttgagcttcaaggctgtactgatttcaaaactgaaccctggaggcttgataatggtggggagtccttaaagagagttgtaacatacacaaccgcaccatcaaaattggttaaagctgttcacgcaacagaggagcagtcttatttgaaggctgatggaaaagagtatgcagttttactgagtgtgagcactcctgatgttccatgtggtacttattttcggacagaaattcttttccgtatcatgccaggtcctgaacttgattcacagcaacagacatcacatctggtactatgataaaaagtatgatagaaaatggagcaaggcagggcttggagcaaaactatgcacagttttcggatttactatcacaaaagatcaagcctattgatgtagaaggttctgggtctgacaaggaacaggtcttggcctctttgcaaggaggcgaggaatctgattggaagatagcatttctgtacttctgcaactttggagtcttatcctccttttttgtgtctctttacattattctgcatgttctacgagtgaatccaagtgctgttcaaggccttgagtttccaggattagatctgccagattcgctcagtgaaattatcatgggtgggctgttgtttcttcaagtacagcgcatacttaagaatattacatgttttcttcaagcaagagaacaaaaagggggtgatcatggcatgaaagcaaaaggtgatggatggttgttaacagttgctttaatcgacggaatcaaattggctccagtcgatgctactggtttatctgatccttatgtggtatttacttgcaatggcaaaacaagaacaagttcaattaagttccaaacactagagcctcagtggaacgaaatctttgaatttgacgcaatggatgatccaccgtcggtgatgagtgtacatgtatatgattttgatggaccattcgatgaagttacatcccttggacatgcggaaattaactttgtaaaatcaaacttgtcagagttagctgatgtatggattcctcttaaaggtaacctcgctcagtcttggcagtccaagttgcatctgaggattttcttgaacaactcaaaagggaccggcatggtcactgagtatctgagcaaaatggagaaagaggttggtaagaagatgacactgaggtctcctcggaccaatactgcattccaggaactcttctctttgccagcagaagaatttctcatcagcagttttacctgctacttgaagaggaaattgcctacacagggtcaagttttcttatctccaagaacaattgggttttattcaagcatgtttgggaggaaaacaaaattttactttctatgggaggatattgaagacatacagggaatacctcaatcaatatcatcatggagtccatccattataataactcttcacaaaggtagaggcatggatacaaagcatggtgcaaagagcatggacaatggaaagcttaagttctgcttgcagtcttttgcatcatttagtgtggccaataggacaataatggcattatggaaggcaagatctctgagcacagagcttaaagtacagcttgctgaagaacaatcccaaattaacacccttcagagtgaggacagtggggtctttgttggtattgaggatgccaagagccttcagatgactgaagttttctcctcgaccatttcgaccaatatggcctcgcttatggaggtgtttgcaggaggatccttggaaatgaaggtaatggataaagttggatgccagaagtactcggctacacagtgggaatcagataaacccaatgagtatcaacgacaaatccattacaagttcagcaagaagctgtctcccgttggcggagaagtgacaggaacccagcagaaatctcttatgcctaataagaaaggatgggttatcgaagaggtgatggagctccaaggagtccttcttggcgacttctttacgctccacatcaagtaccaggtcgaggacctcgctcccaagcaaagagcaagcaatgtgcaggtctccctgggaatcgagtggtcgaagagtaccaggcaccagaagcggatcgagaagaacgtcctttccagttcgtccgcccgcctaaaggagatgttcaaccttgcgtcgagggagctctcgcacgccagataggcggcggagcgtaatggcctttcgacgtctcacccaccgtccctgtgcataacaacaacaggaccgatcattgagtgaacatttaacacccactaactgtatatggaaagcttggctgaagactgacagacagcaacgccaagaagaagaggaggaggtactgtaggatagctcgatagacaacgatatagctgtatgttctgcttgcaagttgttctctctgcttgtagcagtatgggttgccctcaggtaggctctgaatgattctttggtcacaacacacaacacatgttggaattatacacagtacacgtccgaggctcaagagatggaacaaagctatgaagtttacaacattcattatagtcactattccaggcaggggacaggcttgcgtctgttgcccgttcattcatggcggcggttcagttgaacgccgactcgccgagcaggaagaagatcactgttttccggcggaaggagacgtgacagtgtgacaccgaaccgaaaccaccgttcccgcctccggaagccttgctgctgctgctgaagcatgaaccatgaagaaaggaaggatccagaccggcggcagcaaagcccaggtcgtcttgttgtcacgcccatgcccggagacgtcgctggcgcggtgcctgccaatgctgccagtgatccggagtacgtacttggctggcctccgatccaagaaaagaaaccgacttgctgtgacgggcgccgcgcgacgtgctccccatccatccatccaatcatctctcgatgagatcatgggaaggaacgtcgcgatcgttggcgtggattccgctggccccgtgcctgcctgtttcgtccctgcaccgccgccagccgcttctaccgccggtgaggtcgccttgaccgatcacccaggatgcgggccggtgcagtcgagcaggcgcgcgcgcacgccatgatgtgacctgcgataggctaggggatggcttccagcggcggcttgtatgctgtccgccaggaagatgatacagcaacttcactactctggtagcccaccgatttccccctccttttcacacagaaactctcttctctccttaaataaaggggtgatctagacctcaccagaacgatagaacatttgaatttttttttctccacaccccctcccccacacacatacacaccggagacggagaagataaagagag

SEQ ID NO: 3248 - DNA, 4112 bp, Zea Mays
gcgagggggagaaaaggaaaggagagtaggagacaacacgaggcgccgaatcgaaacagggaaagccaaggcccctcccccgcgtacgcgtcactgtgcggcgcctcccccttcctcgctccgctttctgctctgttcgtgtgtgagtcgttgacgaaaccccaagtccatgtgggaggttttgacttgatccaaccaagaacgcgcatttcagccgtaaaatactcgtaccggtttccaggtccggtcgcgtcttgctctcttccgtccctcatttgccttcccgtccctgctattcgcgtgtgggcctttgcttacccattcttgcttccgctgtctttgctgcgtgtaaatctgatccagtacttgtgtgtccgcgtcactggggattctttactttaagttggatttggcaatgtcaatggaaggagcgatatctgatctgaattggtgacatttcttgctgctgctttggtcctggggtgggcggattggagagcgaccactgtcttgccggttgcttttggggtagctactgttcttgtgaatttctgatgcggagtttcgctcaggatagggaaaggagtgatctatagatttctaggcttctgtagggaaagaagtgatctttgatagatttctacgcttctgttggcgattcctcttcatctcaacttggggatttctgccgaggagactttcctgactggtttgggttcagctgaggagcagagatgaggttgtctgttcgtgtgatcgaggcccgcaacctgcgggccatggactccaacggcttcagcgacccgtacgtgaagctgcagctcgggaagcagcgattcaagaccaaggtgatcaagatgaacctcaacccgacttgggatcaggagttcagcttccttgtcggtgatatcaaagatgtgctcaagcttgatgtctatgacgaggacatcctccagatggatgacttcctgggccatttgagggtgccattagaggatgtgctgtctgccgatgacttgtcgcttggtacccggtggtaccagcttcttcccaaaggcaaaaccaacaagaccgtcgactgtggggagatttgtgtctcaatatcgttagaatcatctggagcatcacgatcatggtctgaggaccttggagatgaaattactgatatacagagagactattcactgtcaagccaaaacacggctccatctatttcatttgcttatcgagaaactgaaatttgtgaagaagacgatgagtattctgttacatctgaaattcatgcagaggatagaagtagtgaagttactgatagaaatcaagctgctgcagaggacaagccaaatgggaattctagtgcagatttgaatggaactgaaacttctagtggtgaaacagataagtctgataagctatcatttgttgatcgtgtctaccaaatatttgctaagaaaaatggcgatacaatgccaacctcctctggaagctctgaggctttagaagaagttcaagaggaagcaagtggatgtgagcttctggtcagtcaaattgataatgtgtgcccagagactccattcagtgaactactgagatctcttgaattgcgacatgaaggagtcgatatgcctgtaaatctacaaggaattcttgttaatcagtcgtatcttgcctcacctagtgatctgaataaccttctcttctcaccagattcagattttaaacaaacaatggttgagcttcaaggctgtactgatttcaaaactgaaccctggaggcttgataatggtggggagtccttaaagagagttgtaacatacacaaccgcaccatcaaaattggttaaagctgttcacgcaacagaggagcagtcttatttgaaggctgatggaaaagagtatgcagttttactgagtgtgagcactcctgatgttccatgtggtacttattttcggacagaaattcttttccgtatcatgccaggtcctgaacttgattcacagcaacagacatcacatctgagtactatgataaaaagtatgatagaaaatggagcaaggcagggcttggagcaaaactatgcacagttttcggatttactatcacaaaagatcaagcctattgatgtagaaggttctgggtctgacaaggaacaggtcttggcctctttgcaaggaggcgaggaatctgattggaagatagcatttctgtacttctgcaactttggagtcttatcctccttttttgtgtctctttacattattctgcatgttctacgagtgaatccaagtgctgttcaaggccttgagtttccaggattagatctgccagattcgctcagtgaaattatcatgggtgggctgttgtttcttcaagtacagcgcatacttaagaatattacatgttttcttcaagcaagagaacaaaaagggggtgatcatggcatgaaagcaaaaggtgatggatggttgttaacagttgctttaatcgacggaatcaaattggctccagtcgatgctactggtttatctgatccttatgtggtatttacttgcaatggcaaaacaagaacaagttcaattaagttccaaacactagagcctcagtggaacgaaatctttgaatttgacgcaatggatgatccaccgtcggtgatgagtgtacatgtatatgattttgatggaccattcgatgaagttacatcccttggacatgcggaaattaactttgtaaaatcaaacttgtcagagttagctgatgtatggattcctcttaaaggtaacctcgctcagtcttggcagtccaagttgcatctgaggattttcttgaacaactcaaaagggaccggcatggtcactgagtatctgagcaaaatggagaaagaggttggtaagaagatgacactgaggtctcctcggaccaatactgcattccaggaactcttctctttgccagcagaagaatttctcatcagcagttttacctgctacttgaagaggaaattgcctacacagggtcaagttttcttatctccaagaacaattgggttttattcaagcatgtttgggaggaaaacaaaattttactttctatgggaggatattgaagacatacagggaatacctcaatcaatatcatcatggagtccatccattataataactcttcacaaaggtagaggcatggatacaaagcatggtgcaaagagcatggacaatggaaagcttaagttctgcttgcagtcttttgcatcatttagtgtggccaataggacaataatggcattatggaaggcaagatctctgagcacagagcttaaagtacagcttgctgaagaacaatcccaaattaacacccttcagagtgaggacagtggggtctttgttggtattgaggatgccaagagccttcagatgactgaagttttctcctcgaccatttcgaccaatatggcctcgcttatggaggtgtttgcaggaggatccttggaaatgaaggtaatggataaagttggatgccagaagtactcggctacacagtgggaatcagataaacccaatgagtatcaacgacaaatccattacaagttcagcaagaagctgtctcccgttggcggagaagtgacaggaacccagcagaaatctcttatgcctaataagaaaggatgggttatcgaagaggtgatggagctccaaggagtccttcttggcgacttctttacgctccacatcaagtaccaggtcgaggacctcgctcccaagcaaagagcaagcaatgtgcaggtctccctgggaatcgagtggtcgaagagtaccaggcaccagaagcggatcgagaagaacgtcctttccagttcgtccgcccgcctaaaggagatgttcaaccttgcgtcgagggagctctcgcacgccagataggcggcggagcgtaatggcctttcgacgtctcacccaccgtccctgtgcataacaacaacaggaccgatcattgagtgaacatttaacacccactaactgtatatggaaagcttggctgaagactgacagacagcaacgccaagaagaagaggaggagacaggctaggcggtgaagatgagagagacaacagcgagatg

SEQ ID NO: 3249 - DNA, 3631 bp, Zea Mays
cagtggtttcatgcgttgcagctcccaggaatgcataagaaagggatcacctgtcttgctggaaggatggtgtctgatactattgcaatttttgcttctacttcttcggatggacaaggaggctatctcattttggcgatgggcggtttagatcacaagatccacatctattgtggggataaggcaggcaagttcattaaggcctgtgaacttaaaggtcattctgattggatcagaagtttagatttttctttacccgtgatgatggacggtgaaaggcacaaccttttccttgttagctcatctcaggacagaaccattcggatatggaaaatgacttcagaagctgctgcttctggctcctccttacaattgaggaaagaaactattgagatgacctcctatattgaaggacctctatttgtggccggcagtacaagctatcaagtatcactggagtctcttcttgttgggcatgaggattgggtatattctgtagagtggcagccacctacattgttaactggggatgaagctcatcagccaatgagcatattatctgcatccatggacaagatgatgatgatatggaggccagagaaaactactggcctttggattgattcagtgactgttggtgaattaagtcactccgcacttggattttatggtggactttggcagcctgatggcagatccattctcgcacatggttacggtggatcctttcatatgtggcgagatgttggactggattctgaaaattggcagcctcagatagtcccgtccggtcatttcgcacctgtgtctgatttgacatgggcaagatctggccaatatttgctatcagttagccatgaccagacaacacgcatatttgctccttggagaaatcaagttaaccctggagacatgatctattggcgtgaaattgcccgtccgcaaattcatggtcatgatctcaactgtgtgacattcattcagggtagtgggaaccatcgttttgttagtggtgctgatgaaaaggtctctagagtctttgaagctcccttatcatttttgaagaccctacaacaagcaactctgttgaaacctgacatctccgaggattttgacaatgttcaagtccttggagcaaatatgtctgctcttgggctttcacagaaacccatatatacacatggagtcaaggaatcctcaatcagtaattctaacgatggtccagattctatggagacaattcctgatgcagtgcctactgtattcactgagcctcctgtggaggaccaacttgcatggaatactctatggcctgaatcgcacaaactatatggtcatggaaacgagctcttctctatatgctgtgattatgaagggaagcttgttgcttcatcttgcaaggctcaatcagcagcagttgcagagatctggctctgggaggttggaacatggaaagctgttgcccgcttgcaatctcacagtctaacagtgacacaaatggagttctctcgtaataatgcgtttcttttaagtgtttcgcgggatcgccatttgtctatcttttcaatcaggaaaactgaaggaggagcagagcatcgtctggttgcgaagctcgaagcacacaaaagaattatatgggcatgctcatggaaccccttcggctatgaatttgcaactggatcaagggacaagagtgtcaagatatggtgtgttgaagatgcatcttctgtcaagctacttgcaacattgcctcagttccgtgacagcgtaactgcattagcatggatgggccgtgaccgtgcttctaatgctggtatcgtcgctgctggcatggacaacggattgatcgagctctggagcgtttcaggtggaagagcttcttcaggaacccagctcagcgtggcatgcgtgcttcgatttgaccctctcttgtgtcacgtgtcaactgttcaccgattacggtggcggtgctcaaccgatgagaaatcgacacttgagctcgcgtcttgtggagctgatcacactgtaagggtgtttgaggtctgcggcagcatataggtttatgtccaacctagtaaatcaaaactgttatgtgcgtggcaggtttttattgatatcggacaccgttgggttgtaaaactagtcctggtatgagaatcgagaaaagagtgttttcatgaagcatgtgctgtccatatgtaaccccagtttagtggtaatagattcagtgttgccctcatttgagaagctatgaaattatggttatagatggtgatgtatttgctaaatcacctatatccaaaactctgtgtatcatctcaatctgcaatcaatacaaattcgagaaaaaaaatccactgtaccgcttacactcaagcaaagagttctatgctgtacattacacactttgttgaactctgttcaggttgcttacgatctaagctactgacctactgtgtgttgcagctagccactaggacgcagcaacaactgagcagccaagagatcgacaaagctgaagaaccaacttcgaattcacatgaatcaacaataggtatgttccgctgttctcgggccatttccatcatcagtataaaaaatagctaagattttatatataataacaaaagaaaacgaggggaatttttctagagccagtcattttgttgtgcatctccgggcaacaagaactccagaaggaggggcagtgagttccagctgacagaccgtgtacatccagtacgagtagtggccgaacctgaacctggcctccactttgaaggcgcctctgattgtgtacaccaccctgttgctcctcacctggtccaccatctttaccgccacctggggcggcagcaggacccggctggagagcaggtgcatgttcaggagctgggactggcctcgccgctgcgcgaacggaggcagcgcctgcacggccatgggcctgtcctggaagaagagctcgacagtggcggaccggaacaccaagtcgatctccctgttggggttggagatgttggcaacgagcgtcatgtcgttgttgaagtagggggccggcgagtccacgtagacgctgttgaggatggcgttagcggcgtcgaaggacggcggcctcggcttcaccgccaggaagacgaccagggtgacgacgcctgcgacgatgaggaggatgctgaaggcgaagcaagcgatggccgcgcaccacatcgccggcgaggtccgctggcgcggttgcaggattaccttggaaggcgcccgcgctggctgccggggcgcctgtggctgcctggttatcgtgggtggatccaccggctgcgaccgtggcagcaccggtgtctgctcggtcacctcggactgatccaccggcggcggcggcagctgtggcagggccggtggcagctgcttcatgctcattaccttggttatgatggttcttggtgattggaggtggtagggagcgcccatttcggcaacgccacagctaccaagttcaacaaggcaaagaagctcaagagtgcagagaggcctattgggggaaagcaagctagagaagagcagcaacaacaacagcaacgagaggcagccagggaatggacaatggagtggtggagttaaaaggagtctgatc

SEQ ID NO: 3250 - DNA, 3752 bp, Zea Mays
cagtggtttcatgcgttgcagctcccaggaatgcataagaaagggatcacctgtcttgctggaaggatggtgtctgatactattgcaatttttgcttctacttcttcggatggtattgttgttatttgggagatggcaattgagcccaccactggtggcgattgcaaagtgacttgcttgcattctctgtccgttggtttgaaaccaatggtttcactttcattagctgtattgccaggacaaggaggctatctcattttggcgatgggcggtttagatcacaagatccacatctattgtggggataaggcagttcattaaggcctgtgaacttaaaggtcattctgattggatcagaagtttagatttttctttacccgtgatgatggacggtgaaaggcacaaccttttccttgttagctcatctcaggacagaaccattcggatatggaaaatgacttcagaagctgctgcttctggctcctccttacaattgaggaaagaaactattgagatgacctcctatattgaaggacctctatttgtggccggcagtacaagctatcaagtatcactggagtctcttcttgttgggcatgaggattgggtatattctgtagagtggcagccacctacattgttaactggggatgaagctcatcagccaatgagcatattatctgcatccatggacaagatgatgatgatatggaggccagagaaaactactggcctttggattgattcagtgactgttggtgaattaagtcactccgcacttggattttatggtggactttggcagcctgatggcagatccattctcgcacatggttacggtggatcctttcatatgtggcgagatgttggactggattctgaaaattggcagcctcagatagtcccgtccggtcatttcgcacctgtgtctgatttgacatgggcaagatctggccaatatttgctatcagttagccatgaccagacaacacgcatatttgctccttggagaaatcaagttaaccctggagacatgatctattggcgtgaaattgcccgtccgcaaattcatggtcatgatctcaactgtgtgacattcattcagggtagtgggaaccatcgttttgttagtggtgctgatgaaaaggtctctagagtctttgaagctcccttatcatttttgaagaccctacaacaagcaactctgttgaaacctgacatctccgaggattttgacaatgttcaagtccttggagcaaatatgtctgctcttgggctttcacagaaacccatatatacacatggagtcaaggaatcctcaatcagtaattctaacgatggtccagattctatggagacaattcctgatgcagtgcctactgtattcactgagcctcctgtggaggaccaacttgcatggaatactctatggcctgaatcgcacaaactatatggtcatggaaacgagctcttctctatatgctgtgattatgaagggaagcttgttgcttcatcttgcaaggctcaatcagcagcagttgcagagatctggctctgggaggttggaacatggaaagctgttgcccgcttgcaatctcacagtctaacagtgacacaaatggagttctctcgtaataatgcgtttcttttaagtgtttcgcgggatcgccatttgtctatcttttcaatcaggaaaactgaaggaggagcagagcatcgtctggttgcgaagctcgaagcacacaaaagaattatatgggcatgctcatggaaccccttcggctatgaatttgcaactggatcaagggacaagagtgtcaagatatggtgtgttgaagatgcatcttctgtcaagctacttgcaacattgcctcagttccgtgacagcgtaactgcattagcatggatgggccgtgaccgtgcttctaatgctggtatcgtcgctgctggcatggacaacggattgatcgagctctggagcgtttcaggtggaagagcttcttcaggaacccagctcagcgtggcatgcgtgcttcgatttgaccctctcttgtgtcacgtgtcaactgttcaccgattacggtggcggtgctcaaccgatgagaaatcgacacttgagctcgcgtcttgtggagctgatcacactgtaagggtgtttgaggtctgcggcagcatataggtttatgtccaacctagtaaatcaaaactgttatgtgcgtggcaggtttttattgatatcggacaccgttgggttgtaaaactagtcctggtatgagaatcgagaaaagagtgttttcatgaagcatgtgctgtccatatgtaaccccagtttagtggtaatagattcagtgttgccctcatttgagaagctatgaaattatggttatagatggtgatgtatttgctaaatcacctatatccaaaactctgtgtatcatctcaatctgcaatcaatacaaattcgagaaaaaaaatccactgtaccgcttacactcaagcaaagagttctatgctgtacattacacactttgttgaactctgttcaggttgcttacgatctaagctactgacctactgtgtgttgcagctagccactaggacgcagcaacaactgagcagccaagagatcgacaaagctgaagaaccaacttcgaattcacatgaatcaacaataggtatgttccgctgttctcgggccatttccatcatcagtataaaaaatagctaagattttatatataataacaaaagaaaacgaggggaatttttctagagccagtcattttgttgtgcatctccgggcaacaagaactccagaaggaggggcagtgagttccagctgacagaccgtgtacatccagtacgagtagtggccgaacctgaacctggcctccactttgaaggcgcctctgattgtgtacaccaccctgttgctcctcacctggtccaccatctttaccgccacctggggcggcagcaggacccggctggagagcaggtgcatgttcaggagctgggactggcctcgccgctgcgcgaacggaggcagcgcctgcacggccatgggcctgtcctggaagaagagctcgacagtggcggaccggaacaccaagtcgatctccctgttggggttggagatgttggcaacgagcgtcatgtcgttgttgaagtagggggccggcgagtccacgtagacgctgttgaggatggcgttagcggcgtcgaaggacggcggcctcggcttcaccgccaggaagacgaccagggtgacgacgcctgcgacgatgaggaggatgctgaaggcgaagcaagcgatggccgcgcaccacatcgccggcgaggtccgctggcgcggttgcaggattaccttggaaggcgcccgcgctggctgccggggcgcctgtggctgcctggttatcgtgggtggatccaccggctgcgaccgtggcagcaccggtgtctgctcggtcacctcggactgatccaccggcggcggcggcagctgtggcagggccggtggcagctgcttcatgctcattaccttggttatgatggttcttggtgattggaggtggtagggagcgcccatttcggcaacgccacagctaccaagttcaacaaggcaaagaagctcaagagtgcagagaggcctattgggggaaagcaagctagagaagagcagcaacaacaacagcaacgagaggcagccagggaatggacaatggagtggtggagttaaaaggagtctgatc

SEQ ID NO: 3251 - DNA, 3671 bp, Zea Mays
cagtggtttcatgcgttgcagctcccaggaatgcataagaaagggatcacctgtcttgctggaaggatggtgtctgatactattgcaatttttgcttctacttcttcggatggtattgttgttatttgggagatggcaattgagcccaccactggtggacaaggaggctatctcattttggcgatgggcggtttagatcacaagatccacatctattgtggggataaggcagttcattaaggcctgtgaacttaaaggtcattctgattggatcagaagtttagatttttctttacccgtgatgatggacggtgaaaggcacaaccttttccttgttagctcatctcaggacagaaccattcggatatggaaaatgacttcagaagctgctgcttctggctcctccttacaattgaggaaagaaactattgagatgacctcctatattgaaggacctctatttgtggccggcagtacaagctatcaagtatcactggagtctcttcttgttgggcatgaggattgggtatattctgtagagtggcagccacctacattgttaactggggatgaagctcatcagccaatgagcatattatctgcatccatggacaagatgatgatgatatggaggccagagaaaactactggcctttggattgattcagtgactgttggtgaattaagtcactccgcacttggattttatggtggactttggcagcctgatggcagatccattctcgcacatggttacggtggatcctttcatatgtggcgagatgttggactggattctgaaaattggcagcctcagatagtcccgtccggtcatttcgcacctgtgtctgatttgacatgggcaagatctggccaatatttgctatcagttagccatgaccagacaacacgcatatttgctccttggagaaatcaagttaaccctggagacatgatctattggcgtgaaattgcccgtccgcaaattcatggtcatgatctcaactgtgtgacattcattcagggtagtgggaaccatcgttttgttagtggtgctgatgaaaaggtctctagagtctttgaagctcccttatcatttttgaagaccctacaacaagcaactctgttgaaacctgacatctccgaggattttgacaatgttcaagtccttggagcaaatatgtctgctcttgggctttcacagaaacccatatatacacatggagtcaaggaatcctcaatcagtaattctaacgatggtccagattctatggagacaattcctgatgcagtgcctactgtattcactgagcctcctgtggaggaccaacttgcatggaatactctatggcctgaatcgcacaaactatatggtcatggaaacgagctcttctctatatgctgtgattatgaagggaagcttgttgcttcatcttgcaaggctcaatcagcagcagttgcagagatctggctctgggaggttggaacatggaaagctgttgcccgcttgcaatctcacagtctaacagtgacacaaatggagttctctcgtaataatgcgtttcttttaagtgtttcgcgggatcgccatttgtctatcttttcaatcaggaaaactgaaggaggagcagagcatcgtctggttgcgaagctcgaagcacacaaaagaattatatgggcatgctcatggaaccccttcggctatgaatttgcaactggatcaagggacaagagtgtcaagatatggtgtgttgaagatgcatcttctgtcaagctacttgcaacattgcctcagttccgtgacagcgtaactgcattagcatggatgggccgtgaccgtgcttctaatgctggtatcgtcgctgctggcatggacaacggattgatcgagctctggagcgtttcaggtggaagagcttcttcaggaacccagctcagcgtggcatgcgtgcttcgatttgaccctctcttgtgtcacgtgtcaactgttcaccgattacggtggcggtgctcaaccgatgagaaatcgacacttgagctcgcgtcttgtggagctgatcacactgtaagggtgtttgaggtctgcggcagcatataggtttatgtccaacctagtaaatcaaaactgttatgtgcgtggcaggtttttattgatatcggacaccgttgggttgtaaaactagtcctggtatgagaatcgagaaaagagtgttttcatgaagcatgtgctgtccatatgtaaccccagtttagtggtaatagattcagtgttgccctcatttgagaagctatgaaattatggttatagatggtgatgtatttgctaaatcacctatatccaaaactctgtgtatcatctcaatctgcaatcaatacaaattcgagaaaaaaaatccactgtaccgcttacactcaagcaaagagttctatgctgtacattacacactttgttgaactctgttcaggttgcttacgatctaagctactgacctactgtgtgttgcagctagccactaggacgcagcaacaactgagcagccaagagatcgacaaagctgaagaaccaacttcgaattcacatgaatcaacaataggtatgttccgctgttctcgggccatttccatcatcagtataaaaaatagctaagattttatatataataacaaaagaaaacgaggggaatttttctagagccagtcattttgttgtgcatctccgggcaacaagaactccagaaggaggggcagtgagttccagctgacagaccgtgtacatccagtacgagtagtggccgaacctgaacctggcctccactttgaaggcgcctctgattgtgtacaccaccctgttgctcctcacctggtccaccatctttaccgccacctggggcggcagcaggacccggctggagagcaggtgcatgttcaggagctgggactggcctcgccgctgcgcgaacggaggcagcgcctgcacggccatgggcctgtcctggaagaagagctcgacagtggcggaccggaacaccaagtcgatctccctgttggggttggagatgttggcaacgagcgtcatgtcgttgttgaagtagggggccggcgagtccacgtagacgctgttgaggatggcgttagcggcgtcgaaggacggcggcctcggcttcaccgccaggaagacgaccagggtgacgacgcctgcgacgatgaggaggatgctgaaggcgaagcaagcgatggccgcgcaccacatcgccggcgaggtccgctggcgcggttgcaggattaccttggaaggcgcccgcgctggctgccggggcgcctgtggctgcctggttatcgtgggtggatccaccggctgcgaccgtggcagcaccggtgtctgctcggtcacctcggactgatccaccggcggcggcggcagctgtggcagggccggtggcagctgcttcatgctcattaccttggttatgatggttcttggtgattggaggtggtagggagcgcccatttcggcaacgccacagctaccaagttcaacaaggcaaagaagctcaagagtgcagagaggcctattgggggaaagcaagctagagaagagcagcaacaacaacagcaacgagaggcagccagggaatggacaatggagtggtggagttaaaaggagtctgatc

SEQ ID NO: 3252 - DNA, 3747 bp, Zea Mays
cagtggtttcatgcgttgcagctcccaggaatgcataagaaagggatcacctgtcttgctggaaggatggtgtctgatactattgcaatttttgcttctacttcttcggatggtattgttgttatttgggagatggcaattgagcccaccactggtggcgattgcaaagtgacttgcttgcattctctgtccgttggtttgaaaccaatggtttcactttcattagctgtattgccaggacaaggaggctatctcattttggcgatgggcggtttagatcacaagatccacatctattgtggggataaggcaggcaagttcattaaggcctgtgaacttaaaggtcattctgattggatcagaagtttagatttttctttacccgtgatgatggacggtgaaaggcacaaccttttccttgttagctcatctcaggacagaaccattcggatatggaaaatgacttcagaagctgctgcttctggctcctccttacaattgaggaaagaaactattgagatgacctcctatattgaaggacctctatttgtggccggcagtacaagctatcaagtatcactggagtctcttcttgttgggcatgaggattgggtatattctgtagagtggcagccacctacattgttaactggggatgaagctcatcagccaatgagcatattatctgcatccatggacaagatgatgatgatatggaggccagagaaaactactggcctttggattgattcagtgactgttggtgaattaagtcactccgcacttggattttatggtggactttggcagcctgatggcagatccattctcgcacatggttacggtggatcctttcatatgtggcgagatgttggactggattctgaaaattggcagcctcagatagtcccgtccggtcatttcgcacctgtgtctgatttgacatgggcaagatctggccaatatttgctatcagttagccatgaccagacaacacgcatatttgctccttggagaaatcaagttaaccctggagacatgatctattggcgtgaaattgcccgtccgcaaattcatggtcatgatctcaactgtgtgacattcattcagggtagtgggaaccatcgttttgttagtggtgctgatgaaaaggtctctagagtctttgaagctcccttatcatttttgaagaccctacaacaagcaactctgttgaaacctgacatctccgaggattttgacaatgttcaagtccttggagcaaatatgtctgctcttgggctttcacagaaacccatatatacacatggagtcaaggaatcctcaatcagtaattctaacgatggtccagattctatggagacaattcctgatgcagtgcctactgtattcactgagcctcctgtggaggaccaacttgcatggaatactctatggcctgaatcgcacaaactatatggtcatggaaacgagctcttctctatatgctgtgattatgaagggaagcttgttgcttcatcttgcaagcagcagttgcagagatctggctctgggaggttggaacatggaaagctgttgcccgcttgcaatctcacagtctaacagtgacacaaatggagttctctcgtaataatgcgtttcttttaagtgtttcgcgggatcgccatttgtctatcttttcaatcaggaaaactgaaggaggagcagagcatcgtctggttgcgaagctcgaagcacacaaaagaattatatgggcatgctcatggaaccccttcggctatgaatttgcaactggatcaagggacaagagtgtcaagatatggtgtgttgaagatgcatcttctgtcaagctacttgcaacattgcctcagttccgtgacagcgtaactgcattagcatggatgggccgtgaccgtgcttctaatgctggtatcgtcgctgctggcatggacaacggattgatcgagctctggagcgtttcaggtggaagagcttcttcaggaacccagctcagcgtggcatgcgtgcttcgatttgaccctctcttgtgtcacgtgtcaactgttcaccgattacggtggcggtgctcaaccgatgagaaatcgacacttgagctcgcgtcttgtggagctgatcacactgtaagggtgtttgaggtctgcggcagcatataggtttatgtccaacctagtaaatcaaaactgttatgtgcgtggcaggtttttattgatatcggacaccgttgggttgtaaaactagtcctggtatgagaatcgagaaaagagtgttttcatgaagcatgtgctgtccatatgtaaccccagtttagtggtaatagattcagtgttgccctcatttgagaagctatgaaattatggttatagatggtgatgtatttgctaaatcacctatatccaaaactctgtgtatcatctcaatctgcaatcaatacaaattcgagaaaaaaaatccactgtaccgcttacactcaagcaaagagttctatgctgtacattacacactttgttgaactctgttcaggttgcttacgatctaagctactgacctactgtgtgttgcagctagccactaggacgcagcaacaactgagcagccaagagatcgacaaagctgaagaaccaacttcgaattcacatgaatcaacaataggtatgttccgctgttctcgggccatttccatcatcagtataaaaaatagctaagattttatatataataacaaaagaaaacgaggggaatttttctagagccagtcattttgttgtgcatctccgggcaacaagaactccagaaggaggggcagtgagttccagctgacagaccgtgtacatccagtacgagtagtggccgaacctgaacctggcctccactttgaaggcgcctctgattgtgtacaccaccctgttgctcctcacctggtccaccatctttaccgccacctggggcggcagcaggacccggctggagagcaggtgcatgttcaggagctgggactggcctcgccgctgcgcgaacggaggcagcgcctgcacggccatgggcctgtcctggaagaagagctcgacagtggcggaccggaacaccaagtcgatctccctgttggggttggagatgttggcaacgagcgtcatgtcgttgttgaagtagggggccggcgagtccacgtagacgctgttgaggatggcgttagcggcgtcgaaggacggcggcctcggcttcaccgccaggaagacgaccagggtgacgacgcctgcgacgatgaggaggatgctgaaggcgaagcaagcgatggccgcgcaccacatcgccggcgaggtccgctggcgcggttgcaggattaccttggaaggcgcccgcgctggctgccggggcgcctgtggctgcctggttatcgtgggtggatccaccggctgcgaccgtggcagcaccggtgtctgctcggtcacctcggactgatccaccggcggcggcggcagctgtggcagggccggtggcagctgcttcatgctcattaccttggttatgatggttcttggtgattggaggtggtagggagcgcccatttcggcaacgccacagctaccaagttcaacaaggcaaagaagctcaagagtgcagagaggcctattgggggaaagcaagctagagaagagcagcaacaacaacagcaacgagaggcagccagggaatggacaatggagtggtggagttaaaaggagtctgatc

SEQ ID NO: 3253 - DNA, 3676 bp, Zea Mays
cagtggtttcatgcgttgcagctcccaggaatgcataagaaagggatcacctgtcttgctggaaggatggtgtctgatactattgcaatttttgcttctacttcttcggatggtattgttgttatttgggagatggcaattgagcccaccactggtggacaaggaggctatctcattttggcgatgggcggtttagatcacaagatccacatctattgtggggataaggcaggcaagttcattaaggcctgtgaacttaaaggtcattctgattggatcagaagtttagatttttctttacccgtgatgatggacggtgaaaggcacaaccttttccttgttagctcatctcaggacagaaccattcggatatggaaaatgacttcagaagctgctgcttctggctcctccttacaattgaggaaagaaactattgagatgacctcctatattgaaggacctctatttgtggccggcagtacaagctatcaagtatcactggagtctcttcttgttgggcatgaggattgggtatattctgtagagtggcagccacctacattgttaactggggatgaagctcatcagccaatgagcatattatctgcatccatggacaagatgatgatgatatggaggccagagaaaactactggcctttggattgattcagtgactgttggtgaattaagtcactccgcacttggattttatggtggactttggcagcctgatggcagatccattctcgcacatggttacggtggatcctttcatatgtggcgagatgttggactggattctgaaaattggcagcctcagatagtcccgtccggtcatttcgcacctgtgtctgatttgacatgggcaagatctggccaatatttgctatcagttagccatgaccagacaacacgcatatttgctccttggagaaatcaagttaaccctggagacatgatctattggcgtgaaattgcccgtccgcaaattcatggtcatgatctcaactgtgtgacattcattcagggtagtgggaaccatcgttttgttagtggtgctgatgaaaaggtctctagagtctttgaagctcccttatcatttttgaagaccctacaacaagcaactctgttgaaacctgacatctccgaggattttgacaatgttcaagtccttggagcaaatatgtctgctcttgggctttcacagaaacccatatatacacatggagtcaaggaatcctcaatcagtaattctaacgatggtccagattctatggagacaattcctgatgcagtgcctactgtattcactgagcctcctgtggaggaccaacttgcatggaatactctatggcctgaatcgcacaaactatatggtcatggaaacgagctcttctctatatgctgtgattatgaagggaagcttgttgcttcatcttgcaaggctcaatcagcagcagttgcagagatctggctctgggaggttggaacatggaaagctgttgcccgcttgcaatctcacagtctaacagtgacacaaatggagttctctcgtaataatgcgtttcttttaagtgtttcgcgggatcgccatttgtctatcttttcaatcaggaaaactgaaggaggagcagagcatcgtctggttgcgaagctcgaagcacacaaaagaattatatgggcatgctcatggaaccccttcggctatgaatttgcaactggatcaagggacaagagtgtcaagatatggtgtgttgaagatgcatcttctgtcaagctacttgcaacattgcctcagttccgtgacagcgtaactgcattagcatggatgggccgtgaccgtgcttctaatgctggtatcgtcgctgctggcatggacaacggattgatcgagctctggagcgtttcaggtggaagagcttcttcaggaacccagctcagcgtggcatgcgtgcttcgatttgaccctctcttgtgtcacgtgtcaactgttcaccgattacggtggcggtgctcaaccgatgagaaatcgacacttgagctcgcgtcttgtggagctgatcacactgtaagggtgtttgaggtctgcggcagcatataggtttatgtccaacctagtaaatcaaaactgttatgtgcgtggcaggtttttattgatatcggacaccgttgggttgtaaaactagtcctggtatgagaatcgagaaaagagtgttttcatgaagcatgtgctgtccatatgtaaccccagtttagtggtaatagattcagtgttgccctcatttgagaagctatgaaattatggttatagatggtgatgtatttgctaaatcacctatatccaaaactctgtgtatcatctcaatctgcaatcaatacaaattcgagaaaaaaaatccactgtaccgcttacactcaagcaaagagttctatgctgtacattacacactttgttgaactctgttcaggttgcttacgatctaagctactgacctactgtgtgttgcagctagccactaggacgcagcaacaactgagcagccaagagatcgacaaagctgaagaaccaacttcgaattcacatgaatcaacaataggtatgttccgctgttctcgggccatttccatcatcagtataaaaaatagctaagattttatatataataacaaaagaaaacgaggggaatttttctagagccagtcattttgttgtgcatctccgggcaacaagaactccagaaggaggggcagtgagttccagctgacagaccgtgtacatccagtacgagtagtggccgaacctgaacctggcctccactttgaaggcgcctctgattgtgtacaccaccctgttgctcctcacctggtccaccatctttaccgccacctggggcggcagcaggacccggctggagagcaggtgcatgttcaggagctgggactggcctcgccgctgcgcgaacggaggcagcgcctgcacggccatgggcctgtcctggaagaagagctcgacagtggcggaccggaacaccaagtcgatctccctgttggggttggagatgttggcaacgagcgtcatgtcgttgttgaagtagggggccggcgagtccacgtagacgctgttgaggatggcgttagcggcgtcgaaggacggcggcctcggcttcaccgccaggaagacgaccagggtgacgacgcctgcgacgatgaggaggatgctgaaggcgaagcaagcgatggccgcgcaccacatcgccggcgaggtccgctggcgcggttgcaggattaccttggaaggcgcccgcgctggctgccggggcgcctgtggctgcctggttatcgtgggtggatccaccggctgcgaccgtggcagcaccggtgtctgctcggtcacctcggactgatccaccggcggcggcggcagctgtggcagggccggtggcagctgcttcatgctcattaccttggttatgatggttcttggtgattggaggtggtagggagcgcccatttcggcaacgccacagctaccaagttcaacaaggcaaagaagctcaagagtgcagagaggcctattgggggaaagcaagctagagaagagcagcaacaacaacagcaacgagaggcagccagggaatggacaatggagtggtggagttaaaaggagtctgatc

SEQ ID NO: 3254 - DNA, 3132 bp, Zea Mays
cgcgtcgccagctgataactaacccaacccaacccaaataagctcgatcctgctctctgccgacgcggccggattcgaatccgaggacgatcgatgacggtgggcgccggcatcgccgtccaggacggcagcctcctggcgctgggcgccaaggtcctgcgggaggtgcgcggcaacgtgctcgtgacgccggccgccggcgggggcctaaccaacggcgcgttcctcggcgtccggtccgcgcccgccgccagccgcagcatcttccccgtcgggaagctccgggaccagcggttcgtgtgcacgttccggttcaagatgtggtggatgacgcagaggatgggctccgcaggccgcgacatcccctccgagacgcagttcctgctcgtggaagtgtccggcggcggcgagcagcccgccgtcgtgtacaccgtcttcctccccgtgctggagggctcattccgtgccgttcttcaggggaacgccgacgacgagctggagatctgcctggagagcggcgacccggacgtggaatctttccaaggctcccatctggtcttcgttggcgccggatcggacccgttcgaggtcatcacaagttcagtcaaggctgtcgagaggcacttgcagacgttctctcacagggagaagaaaaaggtagcgagattggcatctgcttattagatctgggtcgctgtctgtctgtctgtcagtgtcacaggattctgtgctttcaacttgctgcagatgccagacattctgaactggtttggctggtgcacgtgggacgcgttctacaccaatgtcaccgcccagggagtgaagcaaggattgcagagcttggagaaaggcggggtttctcctaggttcgtcataatcgacgacggatggcagtccgtcgccatggaccctgtgggaatcgcttgcctatctgacaactcagccaacttcgcaaacaggctgactcacatcagggagaaccacaagtttcagaaaaatggcagggagggtcacagggaagatgacccagcgaagggcctagcacacgtcgtcaatgagattaaggggaagcatcagctcaagtatgtgtacgtatggcatgccatcaccggatactggggcggagtgaggccgggtgcagctggaatggagcactacggatcaaagatgcagcggcccgtgccatcgccgggggttcagaagaacgagcgctgcgaagccctggacagcatgacggccaacgggctgggcctcgtgaaccttgacagggcgttcagtttctacgacgagctccactcgtacctcgcgtctgccgggatcgacggggtgaaggtggacgtgcagaacgtcctcgagacgctgggcgccggccatggcgggagggtgatgctggcgaggaagtaccagcaggctctggaagcgtccgtcgccaggaacttccccgacaatggcatcatatcgtgcatgagccacagcacggacaacttgtacagctcgaaacggagcgcggtgattagagcctctgacgatttctggccgagagaccctgcttcccataccatacacgtcgcgtccgtcgcttataacaccgtctttcttggggagttcatgcagccagactgggacatgttccatagtgttcatcccatggctgagtaccatgctgcggctcgagcggttggtggctgtgccatatatgtcagcgacaagcctgggagccatgacttcaatctgctcaagaagctcgtgcttcccgacggatcgatcctgcgcgcaaagctccccgggaggccaaccagagactgcctcttctctgaccccgcaagggacggcaaaagcgttctcaagatatggaacctgaacgaacactccggcgtcgttggcgccttcaactgccaaggcgccggctggtgccgggtagccaagaagaacctcatccatgaccagcagcccggaacggtgagcggcgtcatccgggcgcaggacgtggagcaccttgcaagggtggctgatcacggctggaacggcgacgtggtcgtgtactcgcacgtgggaggggaggtggtgtacctgtcgaagaacgccttgctttctgtgacactgagatcgcacgagtacgaggtgttcaccgtcgtccctcttaagcacctgccaaacgatgtctcctttgcgacgatcggccttctcggcatgttcaactccggtggcgcggtgagggagctgaaattcggtggtgaggatgctgacgtcgagctcagagtgcgaggctcaggcacggttttcttcttcttggactgggtaaaatacctgctaaacaatgctagactgttcaagtcattccttcgaattacccttacatgtgtgattactgttggcaccctggctcttggtattggtactgcatctggttacatctctccttggacagtacgattttactccctgctagatcctacctatgcaaaggaccatataccaatcatcgcatctgtttctgagcatcaaccaacagcatggtcatctttcatgtttgacttccacatcctcctttttctattcccagctggcctttatttctgtttcaagcacctgtcagatgccacaatatttattgttatgtatggcctcacaagtatgtactttgctggtgtgatggtctggttaattcttgtagcagcaccagccgtttgccttattagtgctattgctgcatctgctacaataaaaaatctaaccactttgattaggacaaagggcagaagtccacagactacttctgggaaaacaactggctcaaagtcagctgctaagtgctccaagaccaagaccctgctccaagaccaagaccaagacctcgccgtgccggaggatctgttgcccggcagcgtcctcggcgccagcacgctcttctcgacgcacttcttccatgcgagggctgcgtccgcctctagcagccgctcgacggactggtcccgcgagctgcacgacgcccgcgcgctcggcaccgacgacctggccgacagagaggactcgtcggagctctccctcgctgacgcttcttcagcgttcatcgtcgcgacctctgctgtggccacggcagtagcttcgactggtagagggtttagggtttag

SEQ ID NO: 3255 - DNA, 2868 bp, Zea Mays
ctgataactaacccaacccaacccaaataagctcgatcctgctctctgccgacgcggccggattcgaatccgaggacgatcgatgacggtgggcgccggcatcgccgtccaggacggcagcctcctggcgctgggcgccaaggtcctgcgggaggtgcgcggcaacgtgctcgtgacgccggccgccggcgggggcctaaccaacggcgcgttcctcggcgtccggtccgcgcccgccgccagccgcagcatcttccccgtcgggaagctccgggaccagcggttcgtgtgcacgttccggttcaagatgtggtggatgacgcagaggatgggctccgcaggccgcgacatcccctccgagacgcagttcctgctcgtggaagtgtccggcggcggcgagcagcccgccgtcgtgtacaccgtcttcctccccgtgctggagggctcattccgtgccgttcttcaggggaacgccgacgacgagctggagatctgcctggagagcggcgacccggacgtggaatctttccaaggctcccatctggtcttcgttggcgccggatcggacccgttcgaggtcatcacaagttcagtcaaggctgtcgagaggcacttgcagacgttctctcacagggagaagaaaaagatgccagacattctgaactggtttggctggtgcacgtgggacgcgttctacaccaatgtcaccgcccagggagtgaagcaaggattgcagagcttggagaaaggcggggtttctcctaggttcgtcataatcgacgacggatggcagtccgtcgccatggaccctgtgggaatcgcttgcctatctgacaactcagccaacttcgcaaacaggctgactcacatcagggagaaccacaagtttcagaaaaatggcagggagggtcacagggaagatgacccagcgaagggcctagcacacgtcgtcaatgagattaaggggaagcatcagctcaagtatgtgtacgtatggcatgccatcaccggatactggggcggagtgaggccgggtgcagctggaatggagcactacggatcaaagatgcagcggcccgtgccatcgccgggggttcagaagaacgagcgctgcgaagccctggacagcatgacggccaacgggctgggcctcgtgaaccttgacagggcgttcagtttctacgacgagctccactcgtacctcgcgtctgccgggatcgacggggtgaaggtggacgtgcagaacgtcctcgagacgctgggcgccggccatggcgggagggtgatgctggcgaggaagtaccagcaggctctggaagcgtccgtcgccaggaacttccccgacaatggcatcatatcgtgcatgagccacagcacggacaacttgtacagctcgaaacggagcgcggtgattagagcctctgacgatttctggccgagagaccctgcttcccataccatacacgtcgcgtccgtcgcttataacaccgtctttcttggggagttcatgcagccagactgggacatgttccatagtgttcatcccatggctgagtaccatgctgcggctcgagcggttggtggctgtgccatatatgtcagcgacaagcctgggagccatgacttcaatctgctcaagaagctcgtgcttcccgacggatcgatcctgcgcgcaaagctccccgggaggccaaccagagactgcctcttctctgaccccgcaagggacggcaaaagcgttctcaagatatggaacctgaacgaacactccggcgtcgttggcgccttcaactgccaaggcgccggctggtgccgggtagccaagaagaacctcatccatgaccagcagcccggaacggtgagcggcgtcatccgggcgcaggacgtggagcaccttgcaagggtggctgatcacggctggaacggcgacgtggtcgtgtactcgcacgtgggaggggaggtggtgtacctgccgaagaacgccttgctgcctgtgacgttgagatcgcgcgagtacgaggtgttcaccgtcgtccctctcaagcacctgccaaacggtgcctctttgcggcgatcggccttctcggcatgttcaactccggtggcgcgatgagggagctgagattcggtggtgaggatgccgacgtcgagctcaaagtgcggggctcgggcacggtcggagcttattcctcgacgaagccaacgtgtgtcgccgtcgattctaaggcggttggtttctcctacgatggcacctgtggcctcatcagcttcgagctcggcatccccgaccaagaaatgtacttgtggacgatggatccctacggcctaagggcccccggatctgtcacaccatccgaaccccctccccttcagtgttctcaagatatggaacctgaacgaacactcaggcatcgttggcgccttcaactgtcaaggcactggttggtgccgggtagccaagaagtacctcatccacgaccaccagcccagaacggggaggtggtgtacctgccgaagaacaccttgctgcctgtgacgctgagatcgcgcgagtatgaggtgttcaccgtcgtccctctcaagcacctgccaaatggtgtctcctttgcggagatcggccttctcggcatgttcaactccagtggcgcggtgagggagctgagattcagtggtgaggatgccgacgtcgagctcagagtgcggggctcgggcacggtcggagcttattcctcaaccaagccaaggtgtgtcgccgtcaactccaaggcggttggtttctcctacgatggcacatgtggcctcatcagcttcgagctcgacatccccgaccaagaaatgtacttgtggacggttacagtagggtattga

SEQ ID NO: 3256 - DNA, 2247 bp, Zea Mays
atgacggtgggcgccggcatcgccgtccaggacggcagcctcctggcgctgggcgccaaggtcctgcgggaggtgcgcggcaacgtgctcgtgacgccggccgccggcgggggcctaaccaacggcgcgttcctcggcgtccggtccgcgcccgccgccagccgcagcatcttccccgtcgggaagctccgggaccagcggttcgtgtgcacgttccggttcaagatgtggtggatgacgcagaggatgggctccgcaggccgcgacatcccctccgagacgcagttcctgctcgtggaagtgtccggcggcggcgagcagcccgccgtcgtgtacaccgtcttcctccccgtgctggagggctcattccgtgccgttcttcaggggaacgccgacgacgagctggagatctgcctggagagcggcgacccggacgtggaatctttccaaggctcccatctggtcttcgttggcgccggatcggacccgttcgaggtcatcacaagttcagtcaaggctgtcgagaggcacttgcagacgttctctcacagggagaagaaaaagatgccagacattctgaactggtttggctggtgcacgtgggacgcgttctacaccaatgtcaccgcccagggagtgaagcaaggattgcagagcttggagaaaggcggggtttctcctaggttcgtcataatcgacgacggatggcagtccgtcgccatggaccctgtgggaatcgcttgcctatctgacaactcagccaacttcgcaaacaggctgactcacatcagggagaaccacaagtttcagaaaaatggcagggagggtcacagggaagatgacccagcgaagggcctagcacacgtcgtcaatgagattaaggggaagcatcagctcaagtatgtgtacgtatggcatgccatcaccggatactggggcggagtgaggccgggtgcagctggaatggagcactacggatcaaagatgcagcggcccgtgccatcgccgggggttcagaagaacgagcgctgcgaagccctggacagcatgacggccaacgggctgggcctcgtgaaccttgacagggcgttcagtttctacgacgagctccactcgtacctcgcgtctgccgggatcgacggggtgaaggtggacgtgcagaacgtcctcgagacgctgggcgccggccatggcgggagggtgatgctggcgaggaagtaccagcaggctctggaagcgtccgtcgccaggaacttccccgacaatggcatcatatcgtgcatgagccacagcacggacaacttgtacagctcgaaacggagcgcggtgattagagcctctgacgatttctggccgagagaccctgcttcccataccatacacgtcgcgtccgtcgcttataacaccgtctttcttggggagttcatgcagccagactgggacatgttccatagtgttcatcccatggctgagtaccatgctgcggctcgagcggttggtggctgtgccatatatgtcagcgacaagcctgggagccatgacttcaatctgctcaagaagctcgtgcttcccgacggatcgatcctgcgcgcaaagctccccgggaggccaaccagagactgcctcttctctgaccccgcaagggacggcaaaagcgttctcaagatatggaacctgaacgaacactccggcgtcgttggcgccttcaactgccaaggcgccggctggtgccgggtagccaagaagaacctcatccatgaccagcagcccggaacggtgagcggcgtcatccgggcgcaggacgtggagcaccttgcaagggtggctgatcacggctggaacggcgacgtggtcgtgtactcgcacgtgggaggggaggtggtgtacctgccgaagaacaccttgctgcctgtgacgctgagatcgcgcgagtatgaggtgttcaccgtcgtccctctcaagcacctgccaaatggtgtctcctttgcggagatcggccttctcggcatgttcaactccagtggcgcggtgagggagctgagattcagtggtgaggatgccgacgtcgagctcagagtgcggggctcgggcacggtcggagcttattcctcaaccaagccaaggtgtgtcgccgtcaactccaaggcggttggtttctcctacgatggcacatgtggcctcatcagcttcgagctcgacatccccgaccaagaaatgtacttgtggacggttacagtagggtattga

SEQ ID NO: 3257 - DNA, 2009 bp, Zea Mays
ccgagttgccaacacagcacagccacagccacggcgcaaaaggtctctcctttcacctctgttcagccaaagccacctccccaaacccaatcccgtcactatctcattcccctgaccgccggaacaccctaggcaatggagcccaaatccaccacccctcccccgccccccgtgatgggcgcgcccatcgcgtatcctcccccgcccggcgccgcgtaccccgccgggccgtacgtgcacgcgccggcggccgcgctctaccctcctcctcccctgccgccggcgcccccctcctcgcagcagggcgccgcggcggcgcaccagcagcagctattctgggcggagcaataccgcgagatcgaggccaccaccgacttcaagaaccacaacctgccgctcgcccgcatcaagaagatcatgaaggccgacgaggacgtgcgcatgatcgccgccgaggcgcccgtcgtcttctcccgcgcctgcgagatgttcatcctcgagctcacccaccgcggctgggcacacgccgaggagaacaagcgccgcacgctgcagaagtccgacatcgccgccgccgtcgcgcgcaccgaggtcttcgacttcctcgtcgacatcgtgccgcgggacgaggccaaggacgccgactccgccgccatgggagcagccgggatcccgcaccccgccgccggcctgcccgccgccgatcccatgggctactactacgtccagccgcagtaacgaatttgcttccttatcatggtttcgcttccatgcagcctttgcgggtttttagtaaactattattattactgagagtgccctgttgttacccatgctctgttgttgccacccaataactcgatgacctgatgatcatctgatgtgcctcccgttccgtaacaagtgattccatttctgattacagagagatggctgctcgtaattaagagtgaggctgtgtgatggttatggtacatgtcatgcttgtcgtgattattaatcattagtgctggtactcttaccttgtccaactcccaactaccgtaaaattactcatgtatacttgtgttgagcaatgtcatgctgctctttagatttttgtaggctagaaaagcaaccgtttccaattgtaatgctatgggggcttcatgtaatctcaagcttgttggtagcacaaatatttgattagtccccattctctgtatcattaaattatttgttttttcctggtgttccttcttggaataatttcagggaccttatgtttgctcattttccagagtatgaatgtgttccctgattcatcttggaatatattcaggctggtatattttgccgaatttccatattgtagatggatgtatatcatgttcctcgttgggttgggatagtttgagtccactgttgtggtagccgagctatggagagtttacttccttgcagtgctctttgcggtggcagctatgcaaagatccggagtttgtgtttgctatggaaacttccatacattttctggtgctttgtgggcgttgaggttcatgtttattttcctcaagttggacgaaatggtggcttgtctgaacaaatgactagtggcccctggtgttcatttggttaacggttggcctgtctgaacaaatgactagtgacatttggttaactgtccaagtagccgcttcttctcaagacttttttcaggtcgaaactctacgtatccatgattttgtcccgttatattctgtaagtatatgtgctgaaatggggatgcatctttattttttgttcttttaattttcctcaagcttttttttcttcgatattaacgaaaactcagactttggctcttttttgctaaaaatgttggtcatacgtccattaatcgtgagtgagcgttttctattaattactcaggctttcatgacataaaccacattatttggtttttggtggagaccatttatcgttaaaaaattcatatgtgttagttttcgatattaacaaaaactcag

SEQ ID NO: 3258 - DNA, 933 bp, Zea Mays
gaataactgaaactgagtttcaaacagacagcttattagcaattccatgatcgatgattacatatgcatgcatgtgaaagcaaagccctcagcaggtctcaatcaattacgtagactcacgtctcgcccgtaggataggatgatctaatcgtagtcgtacggtgtaagtatgggatagataacagaaagcgggaatcttaattgagactctgatcacccagaaaagatgggtcgccgaatacctacagcttgttcagcaaaagtaaacgtatcgttctccagtttcttcacagcaacacctatgaacatagccacaactttcttgcttctaaagcctgtgatgtcgacctcacaggtctacaccagcacaagctcacagtgttgaatcaaggtacgagtagaaccgtcgccgactgaactggaggaggcagcagttgaagaagcgatcatgcacaccgacaaagagagcttcagtgtcaggactgaacgatatgcctgcgatctcaccaaagaagtccagctcctgcttcctgctgtacccactctcaacatcgaagatgtggatgaagtccgcgggttcagtcatcgccatgaacttcccgtctggcgtgtagcgaatcgacctgacggctccgatgttgccacccaatacaacaactgatctggagagattgcggacgtcccagaccctgcacgtcttgtcttggttccccgtggcgaatgttcggccgtctggattccatgccgacgcaaaggagtaatccaaatggccatggagtttgtgaaccgtctgcgagcaagcttgtatatatcaatcgtgcatttattatataaaaagaaatcagttactgtgcactgcgttccgcttacctttcctgaattagcgtcaatcagaagtccatcaggactgtcccccacaatagcagcaagttt

SEQ ID NO: 3259 - DNA, 1111 bp, Zea Mays
ataagtcattgctgaccaatgaagcacagaaaagtttgacataagatacacatcgtgccttgttgttgcccacactaaattcctcaactgcaagacagggacggaacaagcttaacaaattcgcaggacttgacagggcatctgacttttcggtataacatatgtacagagctacaaggtcctgcattgtagctgccttaaaatagggcagctgactcccaatgtgaaacagaaatgtggatccattttttagaatacttcaatttgtgtatgtccctgtgttaggattccaaaaaaattgcaaatttaactgaattgccgatgatcggatacatagatatggagggtatcagaggaggctaggctcttggtggtactactcaaagagcgtttgtagtttactagttacaacagctactactactactgttcatcaagataagtatcctcatctttctagttagacatgagaaacatgccaagcaatcaacaatatcctagaataattcaacttcaagacatgattgacaaaccttcaacagataagggggaaaaaggagagcagataaactatctcaatcatggaacgtatatggtgcaaactaacctctccgtgaaactgtgcaaacttctaatctgaaccacatgatgttgatccaaggggacgtgcggagagagtgggaggggatttgaaaaagtgtgattagcaacgggtggttaaatgtaaaattatccacgctcatgtgtcacttgaatcaacatgatgtggcctagattagaagtttgcacggttgcatggaagggtggctggctgtatgtagaatgaactaaccaagtaaaacaaacattcggaacaaggaacactgaaaaccatggctcgcctggaaatgacggatggtcggtttcaccgacctcgtgctgtgctgaaactcgtagtagagttggcctttctctgcaggcatgcattcctgcaccagcatcgccacatgagatgtttactcggcctaaatagatgctcaactcgaccaggtagtataactaatctgaaacgcgtagctatggcatgccttctcagaaagccttccggaattaggcacgttctcaaagttgg

SEQ ID NO: 3260 - DNA, 2528 bp, Zea Mays
agatttggaagcgccaccactcaccgtgccggccccaaccccaagcggagcccccaacgcatccattcctctctcgtcttccctttcccctccggcgagccccttgttctcgccctccgttctacaaggttcgctcgttcatgttctaggtgctggacaccttttgcttcgcatggctcgggcgctgcacagtccctgtttcgtggctccgctgctgtggctgacgttgttactggttgccgtgtcaccggggggtgcgttctacttgcctggcagctacatgcacacatactcccaaggcgaggtgatacacgccaaggtgaactctctcacgtccatcgagacggagatgcctttcaactactacagcctaccatactgccgcccccagggcggcatcaagaagagtgccgagaatctgggtgagcttctgatgggtgaccagattgacaactccccctaccggttccatgtgaatgttaacgagtctgtcttcctctgcaccacaaaagggctcaatgagaatgacgccaagctccttaagcagcgcacccgtgatctttaccaggtcaacatgatgctagacaatctgcctgtcatgcgtttcactaagcagaacgatgtcacggtacagtggactggttttcctgttggttactctccacccggtgcctcggatgattatatcatcaaccacttgaagtttaaggtcttggtccatgagtatgagggtagaaatgtggaaatcattggcaccggagaagaaggatctgctgtcatctcagagacggacaagaatgggatgtctgggtatcagattgttggatttcaggttgtgccttgcagcgtgaagcgtaacgccgatgatttttctaagcttaatatgtacgacaacattgatccggtggactgccccgtggagcttaagaagtctcaagtgatcaggcaacaggagaggatcacgttcacttatgatgttgagtttgtcaagagcgacatcaggtggccatctaggtgggatgtctatctgaagatggaggctggcgccaaggtccactggttctctataatgaactccctcttggtgatcttgttcttggctggaattgtctttgttatattcctcagaactgttaggagggacctgactaggtatgaagagcttgacaaggaagcgcaagctcagatgaatgaggaactatctggttggaagctcgtcgtcggtgatgtattcagagagccatcttgctccaagctgttatgcataatgattggtgatggggttcagattttgggcatggcagtcgtaacaatcgtttttgccacacttgggttcatgtctccagcctcaagaggaatgctccttactgggatgattgttctatatcttttccttggtattgcaagtgggtatgtcagtgttcggttctggaggactattaagggcacatccgaaggatggagatcagtgtcctggttgactgcttgctttttccctggtgtcatgtttacggtccttactgtcctaaactttgtgttgtggaaaagtgagagcactggggctttacctatctcactatttttcaccctcctggctctatggttctgcatttctgtgccattgacgcttgttggtggttttcttggtacaagagcggagaaaatagaattcccggttcggaccaatcagatccccagagagatcccagcaaggaagtatccatcgtggcttcttgtccttggtgcaggaacactgccatttggtaccctgtttattgagctcttcttcattctatcgagcatatggcttggaaggttctactatgtgtttggtttcctgctgattgtcctgctgctgcttgttgctgtctgtgccgaggtgtccgttgtactaacatacatgaacctctgtgtggaggactggaggtggtggtggaaggctttcttcgcctctggttctgtcgctgtctacgtgtttctctactccatcaactacttggtctttgacctcagaagcctgagcgggcctgtctctgcaatgctttatgtttgctactcattcctcatggcatttgcaatcatgctgacaaccggaaccattggctttttgacatcattcgcctttgtgcactacctcttctcatccgtaaagattgattgatgtattccacagtctgcagacagattcgttcacagctgtgcgtacctgtgatgggcgtagtttacgagatgaggtggttttgggtaaactagtgacgtgtttagttccaagtaggagtgcagtatctgtttccagttccaattggtcagagttgtaagtgctccatctgatctagatactacagcctggctttgttagagtttaggagcaatggtactactgtgtttgttcggcaaattgtattggagtggaaatggcgtgcttattacaggctttgccgaagaagccatttgtaatccactttttcttgtttggatgtgcctagaatcatctctcagttgtatgttaccagctctgtgcacaaaat

SEQ ID NO: 3261 - DNA, 4341 bp, Zea Mays
cgcgtgcttgtgaatacgaactcgcacgggggctatatgcaaaacacgcgcgtacctctgcagccactgcagagggcatttgtgactgcatgtgggtccgggtacccgccgggctcacctggcagcgtctgtagaggatctcaatcccacggccacaccacacccacctagctttgctttcctcgtccgcttccggcttgccctgcctctctccgccccgcgtcgcctcatcgccaacaaccgacgagatccggcgcgggaaaacgagccctagatccggcggcaccctcatgcgaccttgttgagtccgggccttcctcctcccgccgctggtgtcgccatggcggggagcgacctcgagccgctgcgcgcgagcgcggcggcgctgccgtcctcgtcggacccggactcgcccgccgtgaccccgcgccggagccgcgtgcgggacctgctgcgcaacctggaccgccggctctccaaccgaagccgcggcggcgcggacgcggggcacggcggcggcgaggccggggcgtcaccgaggaggcccgaggaggatagcgacgagctcggcgacggcgcgccgcccgagtgggcgctgctgctcgtaggatgccttcttgggctcgccaccggcatctgcgtcgctgtgttcaatcgcggggtacatgtcatacatgaatgggcatgggcaggcactcccactgagggtgctgcttggcttcgtctgcagaggcttgctgatacctggcataggatattgttaattccagtgactggtggagtagttgtgggcatgatgcatggattattggagatttttgagcagataaagcaatccttatcatctcaaagggagggtattgatttcatggctgcgatttttcccacaatcaaagctatccaagccgcaattactttagggacagggtgttcactggggccagaaggacccagtgttgatattggtaaatcatgcgcaaatgggtgtgcggaaatgatggagaacaatagggaacgaagaattgctcttgttgctgccggatcagctgctggaatcgcctcaggtttcaatgctgcagttgctgggtgcttttttgctatcgaaacagtattacggccacttcgagcagaaaattctccaccatttactactgctatgattatattagcatcagttatatcatcaactgtttccaatgttctgctaggggaaaaggcagcatttattgtgccgacgtatgaactaaaatctgctgctggtattttactttattctgattatttttggtgttaataaggtagttgtttcttagttaccttcaagatatagggaagtatgcgttctcaccttatttttggctctaattttcatccatatttttgagataatttcagtctgtcatttttgtgatacatggcctgtacgttttttgtgcttttgctattttgggtaacattcatgttagtgaatatctgtaataaactctgttgcgaacatccgattttaagtcatttatagctactgttcatcaccatgccatcttatgtctccaacttctatattcctccagccgcctgtctagcattctctttttgaaacttgggaactcaaataaagcttctatttcctactttaggctctagtgcccaatcaaactttatctggctctttaatcttcctctaggcttatggtaagaacttgaacatgtgttcttttttctttttaagtttggtgttaattgcttttccaagagaaaaaaatatagttgtattgcgctttagtctttaataatcaaatgtggcaggttcatgtcagcctgttctatttaccaccatgatgcagcacatgtgattcaacatagaagtatttacattttacaactccgttttattagtgtattcatgagttaacatttttattgacatttagagtttggtaattcggaatactttgtgatctaacatgagttgtatttctccaacttttttactgttaactttgtttcaacataaaactgactaagattatattcaccagagctgccactctaccttattctgggcatgctttgcggtgttgtaagtgtggcattcaggcagttggttgtttggttcactaagacttttgacttgataaagaagaagtttggccttcctgctgtagtatgtcctgctctaggtggtcttggagcaggcttaatagctctaaggtatcctggaatattatattggggtttcaccaatgtggatgagattctacatacgggcaaaagtgcttcagcccctggaatctggctcttggctcaattagctgctgcgaaagttgtagcaacggcactttgcaaaggttctggtcttgttggtggcctttatgctccaagtttgatgattggcgctgctgttggtgctgtttttggaggctcagcagcagaattaataaactctgcgattccgggtaacactgctgttgcacatcctcaagcttatgcactggtgggaatggctgctacgctggcttcagtgtgttctgttccactgacatctgtgctgctactctttgaattgaccaaggattacagaattctacttcctctaatgggagctgttggtttagcaatatgggtcccatctgttgtaaatcaatctggtagcaaagatacattcgaggcaacatcaccccgtcatggctattcgtcattgttacctcccacagataggaatgagacagattggaggcgacaagatggagacgatgtggaactcacaattctagacgttgatccctaccactatggtagtaacaatgaggagatgcttcttgatgacttgaaggtatcacaagcaatgacaaagcattatgtgaaggtcacacctacattcaccatcgaggagacaacaaggcttatgcaagagaagcagcaaagctgtgttgttgttgtagataatgaagattttcttgagggaattgtaacattaggtgaccttcgtcgtaaaggatttgtgccaagtgaaaactctgatagtacccaggcaaattcatcaaccgtggatgcaaattcttctcttgtgtcatcatgccttactcgaggttttcagttccatggcaatgaaagaggactggtgacctgctttccagatacagacctgagtaccgccaaggttctcatggaagttaaaggtattaaacagcttccagtggtcaaacgtggtgctggccgtagaaatgatgggaggcgtaaggtccttggccttcttcattatgattcaataggatggtgcttaagggaagagcttgagcggtggaaggcaatataccagagagagaatttccagcagactgcagttaatgggcactgaatatgcaaaattgaaggcttgtttacctcgtagcgaagaagataagatacgaaatatataaagtgacattccgataaaactagggttaacttaggaacactgctgttaaagagtctcctcatcaaagtgtaaattcttgagttttgccaagatatgcattctgtatcaaacatatacgatgaggtttaagaggtgatcgatatataagagatgtgtcatgtgcggtgtgctgttgtcagatttcgttgtggagtgctgaagttcggacacgaaatatgtacagtaacatgctttgttcctttttgggttcagttttgtgggtacattttttatgtcctatgctcttggactcgtaccgattttcatgtttttagcatttttatgagctatatagttcatgggttttagatgttttagggtcccggaactatcgggcaccagacgttcttaatgaaacattaaggagagcagtatgtaccttggtcgagactatttttctaggtagtctttgcgatgagttctttatgttttgtaggctcgctaccactcatgattattttttgcatcaaatttgggataggattccaaggattttggttgtcgtgcacatcaaatttgtctatctaggcaactacatgtagttttaagaatccaacgtgagttcatgttctgtagactcaccaccactcaaatgattattttttgcatcaaatttgggataggattcaaaggattttggttatcttgtacattaaatttgtctatctagtcactcaactacatgcagttttaagaatccagcgctcttagaccgactttgatagttttcaatatttttttgagctatagttcatgaaattcatgtgttttggggtgtcctagaatggtcaagccctatacactctaagggcatagttaaagccaacaggatgtatctacggtgagaacattttttgagctagctttacctcttgaaacaataa

SEQ ID NO: 3262 - DNA, 3464 bp, Zea Mays
ccgggtacccgccgggctcacctggcagcgtctgtagaggatctcaatcccacggccacaccacacccacctagctttgctttcctcgtccgcttccggcttgccctgcctctctccgccccgcgtcgcctcatcgccaacaaccgacgagatccggcgcgggaaaacgagccctagatccggcggcaccctcatgcgaccttgttgagtccgggccttcctcctcccgccgctggtgtcgccatggcggggagcgacctcgagccgctgcgcgcgagcgcggcggcgctgccgtcctcgtcggacccggactcgcccgccgtgaccccgcgccggagccgcgtgcgggacctgctgcgcaacctggaccgccggctctccaaccgaagccgcggcggcgcggacgcggggcacggcggcggcgaggccggggcgtcaccgaggaggcccgaggaggatagcgacgagctcggcgacggcgcgccgcccgagtgggcgctgctgctcgtaggatgccttcttgggctcgccaccggcatctgcgtcgctgtgttcaatcgcggggtacatgtcatacatgaatgggcatgggcaggcactcccactgagggtgctgcttggcttcgtctgcagaggcttgctgatacctggcataggatattgttaattccagtgactggtggagtagttgtgggcatgatgcatggattattggagatttttgagcagataaagcaatccttatcatctcaaagggagggtattgatttcatggctgcgatttttcccacaatcaaagctatccaagccgcaattactttagggacagggtgttcactggggccagaaggacccagtgttgatattggtaaatcatgcgcaaatgggtgtgcggaaatgatggagaacaatagggaacgaagaattgctcttgttgctgccggatcagctgctggaatcgcctcaggtttcaatgctgcagttgctgggtgcttttttgctatcgaaacagtattacggccacttcgagcagaaaattctccaccatttactactgctatgattatattagcatcagttatatcatcaactgtttccaatgttctgctaggggaaaaggcagcatttattgtgccgacgtatgaactaaaatctgctgctgagctgccactctaccttattctgggcatgctttgcggtgttgtaagtgtggcattcaggcagttggttgtttggttcactaagacttttgacttgataaagaagaagtttggccttcctgctgtagtatgtcctgctctaggtggtcttggagcaggcttaatagctctaaggtatcctggaatattatattggggtttcaccaatgtggatgagattctacatacgggcaaaagtgcttcagcccctggaatctggctcttggctcaattagctgctgcgaaagttgtagcaacggcactttgcaaaggttctggtcttgttggtggcctttatgctccaagtttgatgattggcgctgctgttggtgctgtttttggaggctcagcagcagaattaataaactctgcgattccgggtaacactgctgttgcacatcctcaagcttatgcactggtgggaatggctgctacgctggcttcagtgtgttctgttccactgacatctgtgctgctactctttgaattgaccaaggattacagaattctacttcctctaatgggagctgttggtttagcaatatgggtcccatctgttgtaaatcaatctggtagcaaagatacattcgaggcaacatcaccccgtcatggctattcgtcattgttacctcccacagataggaatgagacagattggaggcgacaagatggagacgatgtggaactcacaattctagacgttgatccctaccactatggtagtaacaatgaggagatgcttcttgatgacttgaaggtatcacaagcaatgacaaagcattatgtgaaggtcacacctacattcaccatcgaggagacaacaaggcttatgcaagagaagcagcaaagctgtgttgttgttgtagataatgaagattttcttgagggaattgtaacattaggtgaccttcgtcgtaaaggatttgtgccaagtgaaaactctgatagtacccaggcaaattcatcaaccgtggatgcaaattcttctcttgtgtcatcatgccttactcgaggttttcagttccatggcaatgaaagaggactggtgacctgctttccagatacagacctgagtaccgccaaggttctcatggaagttaaaggtattaaacagcttccagtggtcaaacgtggtgctggccgtagaaatgatgggaggcgtaaggtccttggccttcttcattatgattcaataggatggtgcttaagggaagagcttgagcggtggaaggcaatataccagagagagaatttccagcagactgcagttaatgggcactgaatatgcaaaattgaaggcttgtttacctcgtagcgaagaagataagatacgaaatatataaagtgacattccgataaaactagggttaacttaggaacactgctgttaaagagtctcctcatcaaagtgtaaattcttgagttttgccaagatatgcattctgtatcaaacatatacgatgaggtttaagaggtgatcgatatataagagatgtgtcatgtgcggtgtgctgttgtcagatttcgttgtggagtgctgaagttcggacacgaaatatgtacagtaacatgctttgttcctttttgggttcagttttgtgggtacattttttatgtcctatgctcttggactcgtaccgattttcatgtttttagcatttttatgagctatatagttcatgggttttagatgttttagggtcccggaactatcgggcaccagacgttcttaatgaaacattaaggagagcagtatgtaccttggtcgagactatttttctaggtagtctttgcgatgagttctttatgttttgtaggctcgctaccactcatgattattttttgcatcaaatttgggataggattccaaggattttggttgtcgtgcacatcaaatttgtctatctaggcaactacatgtagttttaagaatccaacgtgagttcatgttctgtagactcaccaccactcaaatgattattttttgcatcaaatttgggataggattcaaaggattttggttatcttgtacattaaatttgtctatctagtcactcaactacatgcagttttaagaatccagcgctcttagaccgactttgatagttttcaatatttttttgagctatagttcatgaaattcatgtgttttggggtgtcctagaatggtcaagccctatacactctaagggcatagttaaagccaacaggatgtatctacggtgagaacattttttgagctagctttacctcttgaaacaataa

SEQ ID NO: 3263 - DNA, 3846 bp, Zea Mays
acggccacaccacacccacctagctttgctttcctcgtccgcttccggcttgccctgcctctctccgccccgcgtcgcctcatcgccaacaaccgacgagatccggcgcgggaaaacgagccctagatccggcggcaccctcatgcgaccttgttgagtccgggccttcctcctcccgccgctggtgtcgccatggcggggagcgacctcgagccgctgcgcgcgagcgcggcggcgctgccgtcctcgtcggacccggactcgcccgccgtgaccccgcgccggagccgcgtgcgggacctgctgcgcaacctggaccgccggctctccaaccgaagccgcggcggcgcggacgcggggcacggcggcggcgaggccggggcgtcaccgaggaggcccgaggaggatagcgacgagctcggcgacggcgcgccgcccgagtgggcgctgctgctcgtaggatgccttcttgggctcgccaccggcatctgcgtcgctgtgttcaatcgcggggtacatgtcatacatgaatgggcatgggcaggcactcccactgagggtgctgcttggcttcgtctgcagaggcttgctgatacctggcataggatattgttaattccagtgactggtggagtagttgtgggcatgatgcatggattattggagatttttgagcagataaagcaatccttatcatctcaaagggagggtattgatttcatggctgcgatttttcccacaatcaaagctatccaagccgcaattactttagggacagggtgttcactggggccagaaggacccagtgttgatattggtaaatcatgcgcaaatgggtgtgcggaaatgatggagaacaatagggaacgaagaattgctcttgttgctgccggatcagctgctggaatcgcctcaggtttcaatgctgcagttgctgggtgcttttttgctatcgaaacagtattacggccacttcgagcagaaaattctccaccatttactactgctatgattatattagcatcagttatatcatcaactgtttccaatgttctgctaggggaaaaggcagcatttattgtgccgacgtatgaactaaaatctgctgctggtattttactttattctgattatttttggtgttaataaggtagttgtttcttagttaccttcaagatatagggaagtatgcgttctcaccttatttttggctctaattttcatccatatttttgagataatttcagtctgtcatttttgtgatacatggcctgtacgttttttgtgcttttgctattttgggtaacattcatgttagtgaatatctgtaataaactctgttgcgaacatccgattttaagtcatttatagctactgttcatcaccatgccatcttatgtctccaacttctatattcctccagccgcctgtctagcattctctttttgaaacttgggaactcaaataaagcttctatttcctactttaggctctagtgcccaatcaaactttatctggctctttaatcttcctctaggcttatgagctgccactctaccttattctgggcatgctttgcggtgttgtaagtgtggcattcaggcagttggttgtttggttcactaagacttttgacttgataaagaagaagtttggccttcctgctgtagtatgtcctgctctaggtggtcttggagcaggcttaatagctctaaggtatcctggaatattatattggggtttcaccaatgtggatgagattctacatacgggcaaaagtgcttcagcccctggaatctggctcttggctcaattagctgctgcgaaagttgtagcaacggcactttgcaaaggttctggtcttgttggtggcctttatgctccaagtttgatgattggcgctgctgttggtgctgtttttggaggctcagcagcagaattaataaactctgcgattccgggtaacactgctgttgcacatcctcaagcttatgcactggtgggaatggctgctacgctggcttcagtgtgttctgttccactgacatctgtgctgctactctttgaattgaccaaggattacagaattctacttcctctaatgggagctgttggtttagcaatatgggtcccatctgttgtaaatcaatctggtagcaaagatacattcgaggcaacatcaccccgtcatggctattcgtcattgttacctcccacagataggaatgagacagattggaggcgacaagatggagacgatgtggaactcacaattctagacgttgatccctaccactatggtagtaacaatgaggagatgcttcttgatgacttgaaggtatcacaagcaatgacaaagcattatgtgaaggtcacacctacattcaccatcgaggagacaacaaggcttatgcaagagaagcagcaaagctgtgttgttgttgtagataatgaagattttcttgagggaattgtaacattaggtgaccttcgtcgtaaaggatttgtgccaagtgaaaactctgatagtacccaggcaaattcatcaaccgtggatgcaaattcttctcttgtgtcatcatgccttactcgaggttttcagttccatggcaatgaaagaggactggtgacctgctttccagatacagacctgagtaccgccaaggttctcatggaagttaaaggtattaaacagcttccagtggtcaaacgtggtgctggccgtagaaatgatgggaggcgtaaggtccttggccttcttcattatgattcaataggatggtgcttaagggaagagcttgagcggtggaaggcaatataccagagagagaatttccagcagactgcagttaatgggcactgaatatgcaaaattgaaggcttgtttacctcgtagcgaagaagataagatacgaaatatataaagtgacattccgataaaactagggttaacttaggaacactgctgttaaagagtctcctcatcaaagtgtaaattcttgagttttgccaagatatgcattctgtatcaaacatatacgatgaggtttaagaggtgatcgatatataagagatgtgtcatgtgcggtgtgctgttgtcagatttcgttgtggagtgctgaagttcggacacgaaatatgtacagtaacatgctttgttcctttttgggttcagttttgtgggtacattttttatgtcctatgctcttggactcgtaccgattttcatgtttttagcatttttatgagctatatagttcatgggttttagatgttttagggtcccggaactatcgggcaccagacgttcttaatgaaacattaaggagagcagtatgtaccttggtcgagactatttttctaggtagtctttgcgatgagttctttatgttttgtaggctcgctaccactcatgattattttttgcatcaaatttgggataggattccaaggattttggttgtcgtgcacatcaaatttgtctatctaggcaactacatgtagttttaagaatccaacgtgagttcatgttctgtagactcaccaccactcaaatgattattttttgcatcaaatttgggataggattcaaaggattttggttatcttgtacattaaatttgtctatctagtcactcaactacatgcagttttaagaatccagcgctcttagaccgactttgatagttttcaatatttttttgagctatagttcatgaaattcatgtgttttggggtgtcctagaatggtcaagccctatacactctaagggcatagttaaagccaacaggatgtatctacggtgagaacattttttgagctagctttacctcttgaaacaataa

SEQ ID NO: 3264 - DNA, 2927 bp, Zea Mays
aacacactcacagacacagaatttaaggtacatgtcatacatgaatgggcatgggcaggcactcccactgagggtgctgcttggcttcgtctgcagaggcttgctgatacctggcataggatattgttaattccagtgactggtggagtagttgtgggcatgatgcatggattattggagatttttgagcagataaagcaatccttatcatctcaaagggagggtattgatttcatggctgcgatttttcccacaatcaaagctatccaagccgcaattactttagggacagggtgttcactggggccagaaggacccagtgttgatattggtaaatcatgcgcaaatgggtgtgcggaaatgatggagaacaatagggaacgaagaattgctcttgttgctgccggatcagctgctggaatcgcctcaggtttcaatgctgcagttgctgggtgcttttttgctatcgaaacagtattacggccacttcgagcagaaaattctccaccatttactactgctatgattatattagcatcagttatatcatcaactgtttccaatgttctgctaggggaaaaggcagcatttattgtgccgacgtatgaactaaaatctgctgctgagctgccactctaccttattctgggcatgctttgcggtgttgtaagtgtggcattcaggcagttggttgtttggttcactaagacttttgacttgataaagaagaagtttggccttcctgctgtagtatgtcctgctctaggtggtcttggagcaggcttaatagctctaaggtatcctggaatattatattggggtttcaccaatgtggatgagattctacatacgggcaaaagtgcttcagcccctggaatctggctcttggctcaattagctgctgcgaaagttgtagcaacggcactttgcaaaggttctggtcttgttggtggcctttatgctccaagtttgatgattggcgctgctgttggtgctgtttttggaggctcagcagcagaattaataaactctgcgattccgggtaacactgctgttgcacatcctcaagcttatgcactggtgggaatggctgctacgctggcttcagtgtgttctgttccactgacatctgtgctgctactctttgaattgaccaaggattacagaattctacttcctctaatgggagctgttggtttagcaatatgggtcccatctgttgtaaatcaatctggtagcaaagatacattcgaggcaacatcaccccgtcatggctattcgtcattgttacctcccacagataggaatgagacagattggaggcgacaagatggagacgatgtggaactcacaattctagacgttgatccctaccactatggtagtaacaatgaggagatgcttcttgatgacttgaaggtatcacaagcaatgacaaagcattatgtgaaggtcacacctacattcaccatcgaggagacaacaaggcttatgcaagagaagcagcaaagctgtgttgttgttgtagataatgaagattttcttgagggaattgtaacattaggtgaccttcgtcgtaaaggatttgtgccaagtgaaaactctgatagtacccaggcaaattcatcaaccgtggatgcaaattcttctcttgtgtcatcatgccttactcgaggttttcagttccatggcaatgaaagaggactggtgacctgctttccagatacagacctgagtaccgccaaggttctcatggaagttaaaggtattaaacagcttccagtggtcaaacgtggtgctggccgtagaaatgatgggaggcgtaaggtccttggccttcttcattatgattcaataggatggtgcttaagggaagagcttgagcggtggaaggcaatataccagagagagaatttccagcagactgcagttaatgggcactgaatatgcaaaattgaaggcttgtttacctcgtagcgaagaagataagatacgaaatatataaagtgacattccgataaaactagggttaacttaggaacactgctgttaaagagtctcctcatcaaagtgtaaattcttgagttttgccaagatatgcattctgtatcaaacatatacgatgaggtttaagaggtgatcgatatataagagatgtgtcatgtgcggtgtgctgttgtcagatttcgttgtggagtgctgaagttcggacacgaaatatgtacagtaacatgctttgttcctttttgggttcagttttgtgggtacattttttatgtcctatgctcttggactcgtaccgattttcatgtttttagcatttttatgagctatatagttcatgggttttagatgttttagggtcccggaactatcgggcaccagacgttcttaatgaaacattaaggagagcagtatgtaccttggtcgagactatttttctaggtagtctttgcgatgagttctttatgttttgtaggctcgctaccactcatgattattttttgcatcaaatttgggataggattccaaggattttggttgtcgtgcacatcaaatttgtctatctaggcaactacatgtagttttaagaatccaacgtgagttcatgttctgtagactcaccaccactcaaatgattattttttgcatcaaatttgggataggattcaaaggattttggttatcttgtacattaaatttgtctatctagtcactcaactacatgcagttttaagaatccagcgctcttagaccgactttgatagttttcaatatttttttgagctatagttcatgaaattcatgtgttttggggtgtcctagaatggtcaagccctatacactctaagggcatagttaaagccaacaggatgtatctacggtgagaacattttttgagctagctttacctcttgaaacaataa

SEQ ID NO: 3265 - DNA, 2921 bp, Zea Mays
cacatagtcattgtataagaggtacatgtcatacatgaatgggcatgggcaggcactcccactgagggtgctgcttggcttcgtctgcagaggcttgctgatacctggcataggatattgttaattccagtgactggtggagtagttgtgggcatgatgcatggattattggagatttttgagcagataaagcaatccttatcatctcaaagggagggtattgatttcatggctgcgatttttcccacaatcaaagctatccaagccgcaattactttagggacagggtgttcactggggccagaaggacccagtgttgatattggtaaatcatgcgcaaatgggtgtgcggaaatgatggagaacaatagggaacgaagaattgctcttgttgctgccggatcagctgctggaatcgcctcaggtttcaatgctgcagttgctgggtgcttttttgctatcgaaacagtattacggccacttcgagcagaaaattctccaccatttactactgctatgattatattagcatcagttatatcatcaactgtttccaatgttctgctaggggaaaaggcagcatttattgtgccgacgtatgaactaaaatctgctgctgagctgccactctaccttattctgggcatgctttgcggtgttgtaagtgtggcattcaggcagttggttgtttggttcactaagacttttgacttgataaagaagaagtttggccttcctgctgtagtatgtcctgctctaggtggtcttggagcaggcttaatagctctaaggtatcctggaatattatattggggtttcaccaatgtggatgagattctacatacgggcaaaagtgcttcagcccctggaatctggctcttggctcaattagctgctgcgaaagttgtagcaacggcactttgcaaaggttctggtcttgttggtggcctttatgctccaagtttgatgattggcgctgctgttggtgctgtttttggaggctcagcagcagaattaataaactctgcgattccgggtaacactgctgttgcacatcctcaagcttatgcactggtgggaatggctgctacgctggcttcagtgtgttctgttccactgacatctgtgctgctactctttgaattgaccaaggattacagaattctacttcctctaatgggagctgttggtttagcaatatgggtcccatctgttgtaaatcaatctggtagcaaagatacattcgaggcaacatcaccccgtcatggctattcgtcattgttacctcccacagataggaatgagacagattggaggcgacaagatggagacgatgtggaactcacaattctagacgttgatccctaccactatggtagtaacaatgaggagatgcttcttgatgacttgaaggtatcacaagcaatgacaaagcattatgtgaaggtcacacctacattcaccatcgaggagacaacaaggcttatgcaagagaagcagcaaagctgtgttgttgttgtagataatgaagattttcttgagggaattgtaacattaggtgaccttcgtcgtaaaggatttgtgccaagtgaaaactctgatagtacccaggcaaattcatcaaccgtggatgcaaattcttctcttgtgtcatcatgccttactcgaggttttcagttccatggcaatgaaagaggactggtgacctgctttccagatacagacctgagtaccgccaaggttctcatggaagttaaaggtattaaacagcttccagtggtcaaacgtggtgctggccgtagaaatgatgggaggcgtaaggtccttggccttcttcattatgattcaataggatggtgcttaagggaagagcttgagcggtggaaggcaatataccagagagagaatttccagcagactgcagttaatgggcactgaatatgcaaaattgaaggcttgtttacctcgtagcgaagaagataagatacgaaatatataaagtgacattccgataaaactagggttaacttaggaacactgctgttaaagagtctcctcatcaaagtgtaaattcttgagttttgccaagatatgcattctgtatcaaacatatacgatgaggtttaagaggtgatcgatatataagagatgtgtcatgtgcggtgtgctgttgtcagatttcgttgtggagtgctgaagttcggacacgaaatatgtacagtaacatgctttgttcctttttgggttcagttttgtgggtacattttttatgtcctatgctcttggactcgtaccgattttcatgtttttagcatttttatgagctatatagttcatgggttttagatgttttagggtcccggaactatcgggcaccagacgttcttaatgaaacattaaggagagcagtatgtaccttggtcgagactatttttctaggtagtctttgcgatgagttctttatgttttgtaggctcgctaccactcatgattattttttgcatcaaatttgggataggattccaaggattttggttgtcgtgcacatcaaatttgtctatctaggcaactacatgtagttttaagaatccaacgtgagttcatgttctgtagactcaccaccactcaaatgattattttttgcatcaaatttgggataggattcaaaggattttggttatcttgtacattaaatttgtctatctagtcactcaactacatgcagttttaagaatccagcgctcttagaccgactttgatagttttcaatatttttttgagctatagttcatgaaattcatgtgttttggggtgtcctagaatggtcaagccctatacactctaagggcatagttaaagccaacaggatgtatctacggtgagaacattttttgagctagctttacctcttgaaacaataa

SEQ ID NO: 3266 - DNA, 2035 bp, Zea Mays
ctctcgcccgcctctcgagagtccgctggacggagcggtgcgttgcgcctccacgccgcccctctcccccgctcgctcacttcgccgcccaccacgcccatggccgccgcagccgccaccgcgccctaggcatcgagcgaggccagatgctctccctgggcgccctccgcaagctctgcgcagcctttgacgccgtcgcgctcaccgtcatcgctgcggggctctcgcgcccgccctcgggccgccaccctttctcctccgcgcacgcgcactcctcgcaccccgctgacttccccaccatcgccgcctgccgcgccgcgatatccgcctccaagggtgaccgccgccgccgacccggcgtcggccagccctcctcctccccttccccctctctcgcagccgctgcagccaaggaggagcaggagcagccggtgctggtaaggatcaagcacgagcgggacccggagcggctgtaccagctgttcagggccaatgcgcacaaccgcctcctggtggagaaccgcttcgcgttcgaggacgcggtggcgcgcctggcgggtgctcgtcggaatgacctcgtcgaggagatcctcgagcagcacaaggcgctgccccaggggaggcgggaagggttcgtggtcaggatcatcggcctgtacgggaaggccgggatgccaggccacgcgctacggactttccaggagatggggatgtacgggtgcccgcgcaccgcaaagtcgctcaatgccaccatgaaggtcctgctgcgggcacggatgtttgatgaggctctgtcgctgtttgaggaggggccagagaagtacgacgtcgaggtggatgacatctcgtgtaacacggtggtgaagatgttctgcgacatgggggacttgcgtgcggcgtaccaggtcatgcaggggatggagagggctggtgtgcggccggatgtcatcacgtacacgacgctcatggctgctttctataagtgtggccgacgcgaggttggggatggtttgtggaatctcatgaggctgaggggttgtgtgccgacacttgctacctacaatgtgaggatccagttcctggttaacaggggaagggggtggcaggcaaatgagttggcacggaaaatgtatgtggcggggatcaaaccagatgagatcacatacaatctaattatcaagggtttcttcatgatgggtgagcatgagatggccaagacggtctttggcgcgatgcacgggaggggatgcaagccaaacagtaaggtttaccagacaatggtccattacctctgtgagagaagggactttgatttggcattcaggttgtgcaaggatagcatggagaaaaattggtttccgagtgtcgatactattaaccaactgttgaaaggcctcatggctatctcaaaggataggaatgggaaagagataatgaagttggttactgggagaaaaccttcgtattcagatggtgaaatgagggtcttcaaagatatattatctcataggaagactggaagataagttgatgtctggataggaaatttgctgtaaatccaccacttgtaactcaagtctggctcggaacttcctgagatactttgagccaccgctgtttggagggctgcggtggcttggcgtcggcaagaatgtggctcaacgtcgtggctgcagcccgacagtcgcggacgttctggagcgaaaaccaggattaaccatctgctgcaacgccaacgcctgggacatgggctgcaggaacaagtgccatccagacattcgctttcctttcctcagtaagtggacattcagaaagtagatgtgccggatctaacccatccatctgtggtggcgtctgctgactttggttgcactaaaagttttcttcaggacttgttactgccatttgagttgatactgtgatgcccaatttttcttttgattaaacacgtactattcgtgatctatggttccttgtgccacaacgggattctgtggtacccttttgttttcttattttgacaatggtaatttat

SEQ ID NO: 3267 - DNA, 2093 bp, Zea Mays
ctctcgcccgcctctcgagagtccgctggacggagcggtgcgttgcgcctccacgccgcccctctcccccgctcgctcacttcgccgcccaccacgcccatggccgccgcagccgccaccgcgccctaggcatcgagcgaggccagatgctctccctgggcgccctccgcaagctctgcgcagcctttgacgccgtcgcgctcaccgtcatcgctgcggggctctcgcgcccgccctcgggccgccaccctttctcctccgcgcacgcgcactcctcgcaccccgctgacttccccaccatcgccgcctgccgcgccgcgatatccgcctccaagggtgaccgccgccgccgacccggcgtcggccagccctcctcctccccttccccctctctcgcagccgctgcagccaaggaggagcaggagcagccggtgctggtaaggatcaagcacgagcgggacccggagcggctgtaccagctgttcagggccaatgcgcacaaccgcctcctggtggagaaccgcttcgcgttcgaggacgcggtggcgcgcctggcgggtgctcgtcggaatgacctcgtcgaggagatcctcgagcagcacaaggcgctgccccaggggaggcgggaagggttcgtggtcaggatcatcggcctgtacgggaaggccgggatgccaggccacgcgctacggactttccaggagatggggatgtacgggtgcccgcgcaccgcaaagtcgctcaatgccaccatgaaggtcctgctgcgggcacggatgtttgatgaggctctgtcgctgtttgaggaggggccagagaagtacgacgtcgaggtggatgacatctcgtgtaacacggtggtgaagatgttctgcgacatgggggacttgcgtgcggcgtaccaggtcatgcaggggatggagagggctggtgtgcggccggatgtcatcacgtacacgacgctcatggctgctttctataagtgtggccgacgcgaggttggggatggtttgtggaatctcatgaggctgaggggttgtgtgccgacacttgctacctacaatgtgaggatccagttcctggttaacaggggaagggggtggcaggcaaatgagttggcacggaaaatgtatgtggcggggatcaaaccagatgagatcacatacaatctaattatcaagggtttcttcatgatgggtgagcatgagatggccaagacggtctttggcgcgatgcacgggaggggatgcaagccaaacagtaaggtttaccagacaatggtccattacctctgtgagagaagggactttgatttggcattcaggttgtgcaaggatagcatggagaaaaattggtttccgagtgtcgatactattaaccaactgttgaaaggcctcatggctatctcaaaggataggaatgggaaagagataatgaagttggttactgggagaaaaccttcgtattcagatggtgaaatgagggtcttcaaagatatattatctcataggaagactggaagataagttgatgtctggataggaaatttgctgtaaatccaccacttgtaactatgatagttacacagcttttaattgtccctgaggatgcttgatattggcctactgcagcaagtctggctcggaacttcctgagatactttgagccaccgctgtttggagggctgcggtggcttggcgtcggcaagaatgtggctcaacgtcgtggctgcagcccgacagtcgcggacgttctggagcgaaaaccaggattaaccatctgctgcaacgccaacgcctgggacatgggctgcaggaacaagtgccatccagacattcgctttcctttcctcagtaagtggacattcagaaagtagatgtgccggatctaacccatccatctgtggtggcgtctgctgactttggttgcactaaaagttttcttcaggacttgttactgccatttgagttgatactgtgatgcccaatttttcttttgattaaacacgtactattcgtgatctatggttccttgtgccacaacgggattctgtggtacccttttgttttcttattttgacaatggtaatttat

SEQ ID NO: 3268 - DNA, 2424 bp, Zea Mays
atcactgcacctggatgttgacgaccttggcccccgccgacagcttggggatggtgagtcaataaaggaacttcctggttctgttaatgtcccatctacatctgactttagcgtgtctgctcctttgtcaaacatccctggttcagaaaatgagttcaaacaagaccagcgacctcttgcacggggtgctgactttattcgaggtggtcctgctaatgattggattgagtcttttcggcctccgagggttcctcaacttggtgtagaagcacaatttccagattttgagcaaatttataacaatgcagggacaacctttcagtttcagccgccattggatggtccaccacaaagagtgttgtccggtgtcttgcattcctttctcacaagtggcccagctggtgtgccatttcaaccacttccggtaccagctgctcttggtttatctgaaagcgacaaacaatgcattcgtgatcgtagctgcataatggcacggcatattttttctgaccaaccagaagaatatatacagagtcaggtcaatactttgctgcattcgcttgatattgacaaccgtatgagaggacctatgcatgggcaatacccagaactacaggagtactggaagcagtcccaaagttctacgcgtcctgccccaatgcataatgctgctgataaatggattactgagtttggcaagcaaaataataatccagaaaattgggcgaactctttcgaacaacaatatggccccaatgggtgggcctctgagtttgaacagtctcagatggccatgcgccagatgggaggagcgaacatggccaacctggctgctatggagcaatcccgagtgcttgcacaaactttagcaagtaataatgatcccaagtttcagctttcacaaggggcggataagtgggttagcgagttctctagtcaacctaatcatggtgcactaaatgagaactgggttgatgagttctcgaaattaaatgttactgacgaatgggcagaggaattcagtggaggtggttttggcgaaagctctgctgatccatgggtagatgagttccaagaacacttgtcatctttcaaacaaagtccgggcgcctctcgaggggtttatgttttttctgagaacaacccgtatgttggtcaccctaatccaatgcaggaaggacaggagctcttccgcaagggcctcttaagtgaagctgttcttgctttagaggctgaagttttgaagaatcctgataacacagaaggttggaggttgttaggcgtaacacatgcagaaaatgatgatgaccaacaggccattgcagcaatgatgcgtgcgttggaagctaatccaacaaaccttgaagttcttcttgctcttggtgttagtcacacaaatgaattggagcagggggaagcattaagatatctttataggtggcttcagaatcaaccaaaatatggtggccttgtccctctgcagtcaactgattcaccttatggtcctgatgttgttagattgtttaatgaagctgctcagatgtcacctgaagatgcagatgttcatatagttctgggagtcttatacaacctatcaagagagtatgataaagctatagcttcatttaagacagcactacagctcaaaccacaggactattcactctggaacaagcttggtgcaacccaagcaaacagcatccagagtgctgatgcaatattggcgtatcagcaggctctggacttgaaacccaactacgtgcgtgcatgggcgaatatgggaatcagctatgccaaccagggtttgtatgaggattccattcgatactatgtaagggcagttgcaatgaacccaaaagctgacaatgcctggcagtacctgaggatctctcttagcaatgcttcgcgagcggacatgattgctgcatgcgacgcccgcaaccttgacgctcttcagaaagagtttcctctgtgagccctccggtccaaggcattagagcttccatggaaggaagcagcacactagcaagccgagtgactgcacctgtggtcatggaaatggaattggaaaccagtagcgttttgtatttgcctgttgattcttatatttatttttaggaagtgggggaatgtgtagcaactaggaagcgagggaacaacatccagttgatgtgaagcattcatggcacagtaggcaatagtggcaaaggggtactatacatacacacttacgggacgcacaacataaataaagaatggttgattaataaactatttattttggggacacacccctaggatcaacccctacttgtttcgagtttgaatactgatttgtatcaacaggcaataaataatgcgctttgtaaccttttatatcataatgtaatgcgcacgcccaaatcagttgtgtctaagaaaaaa

SEQ ID NO: 3269 - DNA, 2588 bp, Zea Mays
ccgcacgtcgtcccgcgccatccctggcatgtcgaaccggaccagtcaataaaggaacttcctggttctgttaatgtcccatctacatctgactttagcgtgtctgctcctttgtcaaacatccctggttcagaaaatgagttcaaacaagaccagcgacctcttgcacggggtgctgactttattcgaggtggtcctgctaatgattggattgagtcttttcggcctccgagggttcctcaacttggtgtagaagcacaatttccagattttgagcaaatttataacaatgcagggacaacctttcagtttcagccgccattggatggtccaccacaaagagtgttgtccggtgtcttgcattcctttctcacaagtggcccagctggtgtgccatttcaaccacttccggtaccagctgctcttggtttatctgaaagcgacaaacaatgcattcgtgatcgtagctgcataatggcacggcatattttttctgaccaaccagaagaatatatacagagtcaggtcaatactttgctgcattcgcttgatattgacaaccgtatgagaggacctatgcatgggcaatacccagaactacaggagtactggaagcagtcccaaagttctacgcgtcctgccccaatgcataatgctgctgataaatggattactgagtttggcaagcaaaataataatccagaaaattgggcgaactctttcgaacaacaatatggccccaatgggtgggcctctgagtttgaacagcatcagtctcagatggccatgcgccagatgggaggagcgaacatggccaacctggctgctatggagcaatcccgagtgcttgcacaaactttagcaagtaataatgatcccaagtttcagaattctaagttcttccagtttgtttcaaagatgagccgaggtgaacttattatagaagataatcaagtaaaagaaggttcagcatcccaatccagtggctgggctgatgaatttcaaacaccgtacattgctaatgcaaactcatgggcagatcagtttgcacatgaagagctttcacaaggggcggataagtgggttagcgagttctctagtcaacctaatcatggtgcactaaatgagaactgggttgatgagttctcgaaattaaatgttactgacgaatgggcagaggaattcagtggaggtggttttggcgaaagctctgctgatccatgggtagatgagttccaagaacacttgtcatctttcaaacaaagtccgggcgcctctcgaggggtttatgttttttctgagaacaacccgtatgttggtcaccctaatccaatgcaggaaggacaggagctcttccgcaagggcctcttaagtgaagctgttcttgctttagaggctgaagttttgaagaatcctgataacacagaaggttggaggttgttaggcgtaacacatgcagaaaatgatgatgaccaacaggccattgcagcaatgatgcgtgcgttggaagctaatccaacaaaccttgaagttcttcttgctcttggtgttagtcacacaaatgaattggagcagggggaagcattaagatatctttataggtggcttcagaatcaaccaaaatatggtggccttgtccctctgcagtcaactgattcaccttatggtcctgatgttgttagattgtttaatgaagctgctcagatgtcacctgaagatgcagatgttcatatagttctgggagtcttatacaacctatcaagagagtatgataaagctatagcttcatttaagacagcactacagctcaaaccacaggactattcactctggaacaagcttggtgcaacccaagcaaacagcatccagagtgctgatgcaatattggcgtatcagcaggctctggacttgaaacccaactacgtgcgtgcatgggcgaatatgggaatcagctatgccaaccagggtttgtatgaggattccattcgatactatgtaagggcagttgcaatgaacccaaaagctgacaatgcctggcagtacctgaggatctctcttagcaatgcttcgcgagcggacatgattgctgcatgcgacgcccgcaaccttgacgctcttcagaaagagtttcctctgtgagccctccggtccaaggcattagagcttccatggaaggaagcagcacactagcaagccgagtgactgcacctgtggtcatggaaatggaattggaaaccagtagcgttttgtatttgcctgttgattcttatatttatttttaggaagtgggggaatgtgtagcaactaggaagcgagggaacaacatccagttgatgtgaagcattcatggcacagtaggcaatagtggcaaaggggtactatacatacacacttacgggacgcacaacataaataaagaatggttgattaataaactatttattttggggacacacccctaggatcaacccctacttgtttcgagtttgaatactgatttgtatcaacaggcaataaataatgcgctttgtaaccttttatatcataatgtaatgcgcacgcccaaatcagttgtgtctaagaaaaaa

SEQ ID NO: 3270 - DNA, 2796 bp, Zea Mays
caacgacccgtaccgtaccatacgtgggccaatctgtcacgtgtccggcgcgttttacaaagccctgtccctgtgtgggcagcttgggctgtggcttatcgggtcaggactcaggacgtcaggtcacacccgcaaagccaacaacgcctccacggcgactccggctcctccacggctccagctccaggccccagctcaccctcccccctcccctcgaggcggaccgcccccacgtcgccggcgatcgaatcggcggccgtagcctcgcgcttccagcgtcggagagtgcgcccgtccggcggatgagatggcgctgcggcacctcgtcacgggccagaataactgcgtgccggacggcgcctcgtcgtccaaccccctcaacgccctcgccaacgccttcctcggccagtcctccaaggcgcagtcaataaaggaacttcctggttctgttaatgtcccatctacatctgactttagcgtgtctgctcctttgtcaaacatccctggttcagaaaatgagttcaaacaagaccagcgacctcttgcacggggtgctgactttattcgaggtggtcctgctaatgattggattgagtcttttcggcctccgagggttcctcaacttggtgtagaagcacaatttccagattttgagcaaatttataacaatgcagggacaacctttcagtttcagccgccattggatggtccaccacaaagagtgttgtccggtgtcttgcattcctttctcacaagtggcccagctggtgtgccatttcaaccacttccggtaccagctgctcttggtttatctgaaagcgacaaacaatgcattcgtgatcgtagctgcataatggcacggcatattttttctgaccaaccagaagaatatatacagagtcaggtcaatactttgctgcattcgcttgatattgacaaccgtatgagaggacctatgcatgggcaatacccagaactacaggagtactggaagcagtcccaaagttctacgcgtcctgccccaatgcataatgctgctgataaatggattactgagtttggcaagcaaaataataatccagaaaattgggcgaactctttcgaacaacaatatggccccaatgggtgggcctctgagtttgaacagcatcagtctcagatggccatgcgccagatgggaggagcgaacatggccaacctggctgctatggagcaatcccgagtgcttgcacaaactttagcaagtaataatgatcccaagtttcagctttcacaaggggcggataagtgggttagcgagttctctagtcaacctaatcatggtgcactaaatgagaactgggttgatgagttctcgaaattaaatgttactgacgaatgggcagaggaattcagtggaggtggttttggcgaaagctctgctgatccatgggtagatgagttccaagaacacttgtcatctttcaaacaaagtccgggcgcctctcgaggggtttatgttttttctgagaacaacccgtatgttggtcaccctaatccaatgcaggaaggacaggagctcttccgcaagggcctcttaagtgaagctgttcttgctttagaggctgaagttttgaagaatcctgataacacagaaggttggaggttgttaggcgtaacacatgcagaaaatgatgatgaccaacaggccattgcagcaatgatgcgtgcgttggaagctaatccaacaaaccttgaagttcttcttgctcttggtgttagtcacacaaatgaattggagcagggggaagcattaagatatctttataggtggcttcagaatcaaccaaaatatggtggccttgtccctctgcagtcaactgattcaccttatggtcctgatgttgttagattgtttaatgaagctgctcagatgtcacctgaagatgcagatgttcatatagttctgggagtcttatacaacctatcaagagagtatgataaagctatagcttcatttaagacagcactacagctcaaaccacaggactattcactctggaacaagcttggtgcaacccaagcaaacagcatccagagtgctgatgcaatattggcgtatcagcaggctctggacttgaaacccaactacgtgcgtgcatgggcgaatatgggaatcagctatgccaaccagggtttgtatgaggattccattcgatactatgtaagggcagttgcaatgaacccaaaagctgacaatgcctggcagtacctgaggatctctcttagcaatgcttcgcgagcggacatgattgctgcatgcgacgcccgcaaccttgacgctcttcagaaagagtttcctctgtgagccctccggtccaaggcattagagcttccatggaaggaagcagcacactagcaagccgagtgactgcacctgtggtcatggaaatggaattggaaaccagtagcgttttgtatttgcctgttgattcttatatttatttttaggaagtgggggaatgtgtagcaactaggaagcgagggaacaacatccagttgatgtgaagcattcatggcacagtaggcaatagtggcaaaggggtactatacatacacacttacgggacgcacaacataaataaagaatggttgattaataaactatttattttggggacacacccctaggatcaacccctacttgtttcgagtttgaatactgatttgtatcaacaggcaataaataatgcgctttgtaaccttttatatcataatgtaatgcgcacgcccaaatcagttgtgtctaagaaaaaa

SEQ ID NO: 3271 - DNA, 2576 bp, Zea Mays
gcgcgttttacaaagccctgtccctgtgtgggcagcttgggctgtggcttatcgggtcaggactcaggacgtcaggtcacacccgcaaagccaacaacgcctccacggcgactccggctcctccacggctccagctccaggccccagctcaccctcccccctcccctcgaggcggaccgcccccacgtcgccggcgatcgaatcggcggccgtagcctcgcgcttccagcgtcggagagtgcgcccgtccggcggatgagatggcgctgcggcacctcgtcacgggccagaataactgcgtgccggacggcgcctcgtcgtccaaccccctcaacgccctcgccaacgccttcctcggccagtcctccaaggcgcagtcaataaaggaacttcctggttctgttaatgtcccatctacatctgactttagcgtgtctgctcctttgtcaaacatccctggttcagaaaatgagttcaaacaagaccagcgacctcttgcacggggtgctgactttattcgaggtggtcctgctaatgattggattgagtcttttcggcctccgagggttcctcaacttggtgtagaagcacaatttccagattttgagcaaatttataacaatgcagggacaacctttcagtttcagccgccattggatggtccaccacaaagagtgttgtccggtgtcttgcattcctttctcacaagtggcccagctggtgtgccatttcaaccacttccggtaccagctgctcttggtttatctgaaagcgacaaacaatgcattcgtgatcgtagctgcataatggcacggcatattttttctgaccaaccagaagaatatatacagagtcaggtcaatactttgctgcattcgcttgatattgacaaccgtatgagaggacctatgcatgggcaatacccagaactacaggagtactggaagcagtcccaaagttctacgcgtcctgccccaatgcataatgctgctgataaatggattactgagtttggcaagcaaaataataatccagaaaattgggcgaactctttcgaacaacaatatggccccaatgggtgggcctctgagtttgaacagcatcagtctcagatggccatgcgccagatgggaggagcgaacatggccaacctggctgctatggagcaatcccgagtgcttgcacaaactttagcaagtaataatgatcccaagtttcaggttccaagaacacttgtcatctttcaaacaaagtccgggcgcctctcgaggggtttatgttttttctgagaacaacccgtatgttggtcaccctaatccaatgcaggaaggacaggagctcttccgcaagggcctcttaagtgaagctgttcttgctttagaggctgaagttttgaagaatcctgataacacagaaggttggaggttgttaggcgtaacacatgcagaaaatgatgatgaccaacaggccattgcagcaatgatgcgtgcgttggaagctaatccaacaaaccttgaagttcttcttgctcttggtgttagtcacacaaatgaattggagcagggggaagcattaagatatctttataggtggcttcagaatcaaccaaaatatggtggccttgtccctctgcagtcaactgattcaccttatggtcctgatgttgttagattgtttaatgaagctgctcagatgtcacctgaagatgcagatgttcatatagttctgggagtcttatacaacctatcaagagagtatgataaagctatagcttcatttaagacagcactacagctcaaaccacaggactattcactctggaacaagcttggtgcaacccaagcaaacagcatccagagtgctgatgcaatattggcgtatcagcaggctctggacttgaaacccaactacgtgcgtgcatgggcgaatatgggaatcagctatgccaaccagggtttgtatgaggattccattcgatactatgtaagggcagttgcaatgaacccaaaagctgacaatgcctggcagtacctgaggatctctcttagcaatgcttcgcgagcggacatgattgctgcatgcgacgcccgcaaccttgacgctcttcagaaagagtttcctctgtgagccctccggtccaaggcattagagcttccatggaaggaagcagcacactagcaagccgagtgactgcacctgtggtcatggaaatggaattggaaaccagtagcgttttgtatttgcctgttgattcttatatttatttttaggaagtgggggaatgtgtagcaactaggaagcgagggaacaacatccagttgatgtgaagcattcatggcacagtaggcaatagtggcaaaggggtactatacatacacacttacgggacgcacaacataaataaagaatggttgattaataaactatttattttggggacacacccctaggatcaacccctacttgtttcgagtttgaatactgatttgtatcaacaggcaataaataatgcgctttgtaaccttttatatcataatgtaatgcgcacgcccaaatcagttgtgtctaagaaaaaa

SEQ ID NO: 3272 - DNA, 2691 bp, Zea Mays
cgggtcaggactcaggacgtcaggtcacacccgcaaagccaacaacgcctccacggcgactccggctcctccacggctccagctccaggccccagctcaccctcccccctcccctcgaggcggaccgcccccacgtcgccggcgatcgaatcggcggccgtagcctcgcgcttccagcgtcggagagtgcgcccgtccggcggatgagatggcgctgcggcacctcgtcacgggccagaataactgcgtgccggacggcgcctcgtcgtccaaccccctcaacgccctcgccaacgccttcctcggccagtcctccaaggcgcagtcaataaaggaacttcctggttctgttaatgtcccatctacatctgactttagcgtgtctgctcctttgtcaaacatccctggttcagaaaatgagttcaaacaagaccagcgacctcttgcacggggtgctgactttattcgaggtggtcctgctaatgattggattgagtcttttcggcctccgagggttcctcaacttggtgtagaagcacaatttccagattttgagcaaatttataacaatgcagggacaacctttcagtttcagccgccattggatggtccaccacaaagagtgttgtccggtgtcttgcattcctttctcacaagtggcccagctggtgtgccatttcaaccacttccggtaccagctgctcttggtttatctgaaagcgacaaacaatgcattcgtgatcgtagctgcataatggcacggcatattttttctgaccaaccagaagaatatatacagagtcaggtcaatactttgctgcattcgcttgatattgacaaccgtatgagaggacctatgcatgggcaatacccagaactacaggagtactggaagcagtcccaaagttctacgcgtcctgccccaatgcataatgctgctgataaatggattactgagtttggcaagcaaaataataatccagaaaattgggcgaactctttcgaacaacaatatggccccaatgggtgggcctctgagtttgaacagtctcagatggccatgcgccagatgggaggagcgaacatggccaacctggctgctatggagcaatcccgagtgcttgcacaaactttagcaagtaataatgatcccaagtttcagctttcacaaggggcggataagtgggttagcgagttctctagtcaacctaatcatggtgcactaaatgagaactgggttgatgagttctcgaaattaaatgttactgacgaatgggcagaggaattcagtggaggtggttttggcgaaagctctgctgatccatgggtagatgagttccaagaacacttgtcatctttcaaacaaagtccgggcgcctctcgaggggtttatgttttttctgagaacaacccgtatgttggtcaccctaatccaatgcaggaaggacaggagctcttccgcaagggcctcttaagtgaagctgttcttgctttagaggctgaagttttgaagaatcctgataacacagaaggttggaggttgttaggcgtaacacatgcagaaaatgatgatgaccaacaggccattgcagcaatgatgcgtgcgttggaagctaatccaacaaaccttgaagttcttcttgctcttggtgttagtcacacaaatgaattggagcagggggaagcattaagatatctttataggtggcttcagaatcaaccaaaatatggtggccttgtccctctgcagtcaactgattcaccttatggtcctgatgttgttagattgtttaatgaagctgctcagatgtcacctgaagatgcagatgttcatatagttctgggagtcttatacaacctatcaagagagtatgataaagctatagcttcatttaagacagcactacagctcaaaccacaggactattcactctggaacaagcttggtgcaacccaagcaaacagcatccagagtgctgatgcaatattggcgtatcagcaggctctggacttgaaacccaactacgtgcgtgcatgggcgaatatgggaatcagctatgccaaccagggtttgtatgaggattccattcgatactatgtaagggcagttgcaatgaacccaaaagctgacaatgcctggcagtacctgaggatctctcttagcaatgcttcgcgagcggacatgattgctgcatgcgacgcccgcaaccttgacgctcttcagaaagagtttcctctgtgagccctccggtccaaggcattagagcttccatggaaggaagcagcacactagcaagccgagtgactgcacctgtggtcatggaaatggaattggaaaccagtagcgttttgtatttgcctgttgattcttatatttatttttaggaagtgggggaatgtgtagcaactaggaagcgagggaacaacatccagttgatgtgaagcattcatggcacagtaggcaatagtggcaaaggggtactatacatacacacttacgggacgcacaacataaataaagaatggttgattaataaactatttattttggggacacacccctaggatcaacccctacttgtttcgagtttgaatactgatttgtatcaacaggcaataaataatgcgctttgtaaccttttatatcataatgtaatgcgcacgcccaaatcagttgtgtctaagaaaaaa

SEQ ID NO: 3273 - DNA, 3119 bp, Zea Mays
aggacgtcaggtcacacccgcaaagccaacaacgcctccacggcgactccggctcctccacggctccagctccaggccccagctcaccctcccccctcccctcgaggcggaccgcccccacgtcgccggcgatcgaatcggcggccgtagcctcgcgcttccagcgtcggagagtgcgcccgtccggcggatgagatggcgctgcggcacctcgtcacgggccagaataactgcgtgccggacggcgcctcgtcgtccaaccccctcaacgccctcgccaacgccttcctcggccagtcctccaaggcgcagtcaataaaggaacttcctggttctgttaatgtcccatctacatctgactttagcgtgtctgctcctttgtcaaacatccctggttcagaaaatgagttcaaacaagaccagcgacctcttgcacggggtgctgactttattcgaggtggtcctgctaatgattggattgagtcttttcggcctccgagggttcctcaacttggtgtagaagcacaatttccagattttgagcaaatttataacaatgcagggacaacctttcagtttcagccgccattggatggtccaccacaaagagtgttgtccggtgtcttgcattcctttctcacaagtggcccagctggtgtgccatttcaaccacttccggtaccagctgctcttggtttatctgaaagcgacaaacaatgcattcgtgatcgtagctgcataatggcacggcatattttttctgaccaaccagaagaatatatacagagtcaggtcaatactttgctgcattcgcttgatattgacaaccgtatgagaggacctatgcatgggcaatacccagaactacaggagtactggaagcagtcccaaagttctacgcgtcctgccccaatgcataatgctgctgataaatggattactgagtttggcaagcaaaataataatccagaaaattgggcgaactctttcgaacaacaatatggccccaatgggtgggcctctgagtttgaacagcatcagtctcagatggccatgcgccagatgggaggagcgaacatggccaacctggctgctatggagcaatcccgagtgcttgcacaaactttagcaagtaataatgatcccaagtttcagaattctaagttcttccagtttgtttcaaagatgagccgaggtgaacttattatagaagataatcaagtaaaagaaggttcagcatcccaatccagtggctgggctgatgaatttcaaacaccgtacattgctaatgcaaactcatgggcagatcagtttgcacatgaagagctttcacaaggggcggataagtgggttagcgagttctctagtcaacctaatcatggtgcactaaatgagaactgggttgatgagttctcgaaattaaatgttactgacgaatgggcagaggaattcagtggaggtggttttggcgaaagctctgctgatccatgggtagatgagttccaagaacacttgtcatctttcaaacaaagtccgggcgcctctcgaggggtttatgttttttctgagaacaacccgtatgttggtcaccctaatccaatgcaggaaggacaggagctcttccgcaagggcctcttaagtgaagctgttcttgctttagaggctgaagttttgaagaatcctgataacacagaaggttggaggttgttaggcgtaacacatgcagaaaatgatgatgaccaacaggccattgcagcaatgatgcgtgcgttggaagctaatccaacaaaccttgaagttcttcttgctcttggtgttagtcacacaaatgaattggagcagggggaagcattaagatatctttataggtggcttcagaatcaaccaaaatatggtggccttgtccctctgcagtcaactgattcaccttatggtcctgatgtaagtatacgactgcatgctataagtgtgtatgtttcagtttagtcaattaacttatggagcaattgtgatcataccattcaccggcgttgcaattgcgattttacccactctggcatcttcagatttcggatgggtatcctatgtacaagattatatgtttttttgctgtagagatgtacttttgctgatttctaatatctttcaatatattaatttctcttaataatttacttctgccatactaaatgttggcatcatcaggttgttagattgtttaatgaagctgctcagatgtcacctgaagatgcagatgttcatatagttctgggagtcttatacaacctatcaagagagtatgataaagctatagcttcatttaagacagcactacagctcaaaccacaggactattcactctggaacaagcttggtgcaacccaagcaaacagcatccagagtgctgatgcaatattggcgtatcagcaggctctggacttgaaacccaactacgtgcgtgcatgggcgaatatgggaatcagctatgccaaccagggtttgtatgaggattccattcgatactatgtaagggcagttgcaatgaacccaaaagctgacaatgcctggcagtacctgaggatctctcttagcaatgcttcgcgagcggacatgattgctgcatgcgacgcccgcaaccttgacgctcttcagaaagagtttcctctgtgagccctccggtccaaggcattagagcttccatggaaggaagcagcacactagcaagccgagtgactgcacctgtggtcatggaaatggaattggaaaccagtagcgttttgtatttgcctgttgattcttatatttatttttaggaagtgggggaatgtgtagcaactaggaagcgagggaacaacatccagttgatgtgaagcattcatggcacagtaggcaatagtggcaaaggggtactatacatacacacttacgggacgcacaacataaataaagaatggttgattaataaactatttattttggggacacacccctaggatcaacccctacttgtttcgagtttgaatactgatttgtatcaacaggcaataaataatgcgctttgtaaccttttatatcataatgtaatgcgcacgcccaaatcagttgtgtctaagaaaaaa

SEQ ID NO: 3274 - DNA, 2839 bp, Zea Mays
gtcacacccgcaaagccaacaacgcctccacggcgactccggctcctccacggctccagctccaggccccagctcaccctcccccctcccctcgaggcggaccgcccccacgtcgccggcgatcgaatcggcggccgtagcctcgcgcttccagcgtcggagagtgcgcccgtccggcggatgagatggcgctgcggcacctcgtcacgggccagaataactgcgtgccggacggcgcctcgtcgtccaaccccctcaacgccctcgccaacgccttcctcggccagtcctccaaggcgcagtcaataaaggaacttcctggttctgttaatgtcccatctacatctgactttagcgtgtctgctcctttgtcaaacatccctggttcagaaaatgagttcaaacaagaccagcgacctcttgcacggggtgctgactttattcgaggtggtcctgctaatgattggattgagtcttttcggcctccgagggttcctcaacttggtgtagaagcacaatttccagattttgagcaaatttataacaatgcagggacaacctttcagtttcagccgccattggatggtccaccacaaagagtgttgtccggtgtcttgcattcctttctcacaagtggcccagctggtgtgccatttcaaccacttccggtaccagctgctcttggtttatctgaaagcgacaaacaatgcattcgtgatcgtagctgcataatggcacggcatattttttctgaccaaccagaagaatatatacagagtcaggtcaatactttgctgcattcgcttgatattgacaaccgtatgagaggacctatgcatgggcaatacccagaactacaggagtactggaagcagtcccaaagttctacgcgtcctgccccaatgcataatgctgctgataaatggattactgagtttggcaagcaaaataataatccagaaaattgggcgaactctttcgaacaacaatatggccccaatgggtgggcctctgagtttgaacagtctcagatggccatgcgccagatgggaggagcgaacatggccaacctggctgctatggagcaatcccgagtgcttgcacaaactttagcaagtaataatgatcccaagtttcagaattctaagttcttccagtttgtttcaaagatgagccgaggtgaacttattatagaagataatcaagtaaaagaaggttcagcatcccaatccagtggctgggctgatgaatttcaaacaccgtacattgctaatgcaaactcatgggcagatcagtttgcacatgaagagctttcacaaggggcggataagtgggttagcgagttctctagtcaacctaatcatggtgcactaaatgagaactgggttgatgagttctcgaaattaaatgttactgacgaatgggcagaggaattcagtggaggtggttttggcgaaagctctgctgatccatgggtagatgagttccaagaacacttgtcatctttcaaacaaagtccgggcgcctctcgaggggtttatgttttttctgagaacaacccgtatgttggtcaccctaatccaatgcaggaaggacaggagctcttccgcaagggcctcttaagtgaagctgttcttgctttagaggctgaagttttgaagaatcctgataacacagaaggttggaggttgttaggcgtaacacatgcagaaaatgatgatgaccaacaggccattgcagcaatgatgcgtgcgttggaagctaatccaacaaaccttgaagttcttcttgctcttggtgttagtcacacaaatgaattggagcagggggaagcattaagatatctttataggtggcttcagaatcaaccaaaatatggtggccttgtccctctgcagtcaactgattcaccttatggtcctgatgttgttagattgtttaatgaagctgctcagatgtcacctgaagatgcagatgttcatatagttctgggagtcttatacaacctatcaagagagtatgataaagctatagcttcatttaagacagcactacagctcaaaccacaggactattcactctggaacaagcttggtgcaacccaagcaaacagcatccagagtgctgatgcaatattggcgtatcagcaggctctggacttgaaacccaactacgtgcgtgcatgggcgaatatgggaatcagctatgccaaccagggtttgtatgaggattccattcgatactatgtaagggcagttgcaatgaacccaaaagctgacaatgcctggcagtacctgaggatctctcttagcaatgcttcgcgagcggacatgattgctgcatgcgacgcccgcaaccttgacgctcttcagaaagagtttcctctgtgagccctccggtccaaggcattagagcttccatggaaggaagcagcacactagcaagccgagtgactgcacctgtggtcatggaaatggaattggaaaccagtagcgttttgtatttgcctgttgattcttatatttatttttaggaagtgggggaatgtgtagcaactaggaagcgagggaacaacatccagttgatgtgaagcattcatggcacagtaggcaatagtggcaaaggggtactatacatacacacttacgggacgcacaacataaataaagaatggttgattaataaactatttattttggggacacacccctaggatcaacccctacttgtttcgagtttgaatactgatttgtatcaacaggcaataaataatgcgctttgtaaccttttatatcataatgtaatgcgcacgcccaaatcagttgtgtctaagaaaaaa

SEQ ID NO: 3275 - DNA, 2672 bp, Zea Mays
gtcacacccgcaaagccaacaacgcctccacggcgactccggctcctccacggctccagctccaggccccagctcaccctcccccctcccctcgaggcggaccgcccccacgtcgccggcgatcgaatcggcggccgtagcctcgcgcttccagcgtcggagagtgcgcccgtccggcggatgagatggcgctgcggcacctcgtcacgggccagaataactgcgtgccggacggcgcctcgtcgtccaaccccctcaacgccctcgccaacgccttcctcggccagtcctccaaggcgcagtcaataaaggaacttcctggttctgttaatgtcccatctacatctgactttagcgtgtctgctcctttgtcaaacatccctggttcagaaaatgagttcaaacaagaccagcgacctcttgcacggggtgctgactttattcgaggtggtcctgctaatgattggattgagtcttttcggcctccgagggttcctcaacttggtgtagaagcacaatttccagattttgagcaaatttataacaatgcagggacaacctttcagtttcagccgccattggatggtccaccacaaagagtgttgtccggtgtcttgcattcctttctcacaagtggcccagctggtgtgccatttcaaccacttccggtaccagctgctcttggtttatctgaaagcgacaaacaatgcattcgtgatcgtagctgcataatggcacggcatattttttctgaccaaccagaagaatatatacagagtcaggtcaatactttgctgcattcgcttgatattgacaaccgtatgagaggacctatgcatgggcaatacccagaactacaggagtactggaagcagtcccaaagttctacgcgtcctgccccaatgcataatgctgctgataaatggattactgagtttggcaagcaaaataataatccagaaaattgggcgaactctttcgaacaacaatatggccccaatgggtgggcctctgagtttgaacagcatcagtctcagatggccatgcgccagatgggaggagcgaacatggccaacctggctgctatggagcaatcccgagtgcttgcacaaactttagcaagtaataatgatcccaagtttcagaattctaagttcttccagtttgtttcaaagatgagccgaggtgaacttattatagaagataatcaagtaaaagaaggttcagcatcccaatccagtggctgggctgatgaatttcaaacaccgtacattgctaatgcaaactcatgggcagatcagtttgcacatgaagaggttccaagaacacttgtcatctttcaaacaaagtccgggcgcctctcgaggggtttatgttttttctgagaacaacccgtatgttggtcaccctaatccaatgcaggaaggacaggagctcttccgcaagggcctcttaagtgaagctgttcttgctttagaggctgaagttttgaagaatcctgataacacagaaggttggaggttgttaggcgtaacacatgcagaaaatgatgatgaccaacaggccattgcagcaatgatgcgtgcgttggaagctaatccaacaaaccttgaagttcttcttgctcttggtgttagtcacacaaatgaattggagcagggggaagcattaagatatctttataggtggcttcagaatcaaccaaaatatggtggccttgtccctctgcagtcaactgattcaccttatggtcctgatgttgttagattgtttaatgaagctgctcagatgtcacctgaagatgcagatgttcatatagttctgggagtcttatacaacctatcaagagagtatgataaagctatagcttcatttaagacagcactacagctcaaaccacaggactattcactctggaacaagcttggtgcaacccaagcaaacagcatccagagtgctgatgcaatattggcgtatcagcaggctctggacttgaaacccaactacgtgcgtgcatgggcgaatatgggaatcagctatgccaaccagggtttgtatgaggattccattcgatactatgtaagggcagttgcaatgaacccaaaagctgacaatgcctggcagtacctgaggatctctcttagcaatgcttcgcgagcggacatgattgctgcatgcgacgcccgcaaccttgacgctcttcagaaagagtttcctctgtgagccctccggtccaaggcattagagcttccatggaaggaagcagcacactagcaagccgagtgactgcacctgtggtcatggaaatggaattggaaaccagtagcgttttgtatttgcctgttgattcttatatttatttttaggaagtgggggaatgtgtagcaactaggaagcgagggaacaacatccagttgatgtgaagcattcatggcacagtaggcaatagtggcaaaggggtactatacatacacacttacgggacgcacaacataaataaagaatggttgattaataaactatttattttggggacacacccctaggatcaacccctacttgtttcgagtttgaatactgatttgtatcaacaggcaataaataatgcgctttgtaaccttttatatcataatgtaatgcgcacgcccaaatcagttgtgtctaagaaaaaa

SEQ ID NO: 3276 - DNA, 2794 bp, Zea Mays
acgcctccacggcgactccggctcctccacggctccagctccaggccccagctcaccctcccccctcccctcgaggcggaccgcccccacgtcgccggcgatcgaatcggcggccgtagcctcgcgcttccagcgtcggagagtgcgcccgtccggcggatgagatggcgctgcggcacctcgtcacgggccagaataactgcgtgccggacggcgcctcgtcgtccaaccccctcaacgccctcgccaacgccttcctcggccagtcctccaaggcgcagtcaataaaggaacttcctggttctgttaatgtcccatctacatctgactttagcgtgtctgctcctttgtcaaacatccctggttcagaaaatgagttcaaacaagaccagcgacctcttgcacggggtgctgactttattcgaggtggtcctgctaatgattggattgagtcttttcggcctccgagggttcctcaacttggtgtagaagcacaatttccagattttgagcaaatttataacaatgcagggacaacctttcagtttcagccgccattggatggtccaccacaaagagtgttgtccggtgtcttgcattcctttctcacaagtggcccagctggtgtgccatttcaaccacttccggtaccagctgctcttggtttatctgaaagcgacaaacaatgcattcgtgatcgtagctgcataatggcacggcatattttttctgaccaaccagaagaatatatacagagtcaggtcaatactttgctgcattcgcttgatattgacaaccgtatgagaggacctatgcatgggcaatacccagaactacaggagtactggaagcagtcccaaagttctacgcgtcctgccccaatgcataatgctgctgataaatggattactgagtttggcaagcaaaataataatccagaaaattgggcgaactctttcgaacaacaatatggccccaatgggtgggcctctgagtttgaacagcatcagtctcagatggccatgcgccagatgggaggagcgaacatggccaacctggctgctatggagcaatcccgagtgcttgcacaaactttagcaagtaataatgatcccaagtttcagatgagccgaggtgaacttattatagaagataatcaagtaaaagaaggttcagcatcccaatccagtggctgggctgatgaatttcaaacaccgtacattgctaatgcaaactcatgggcagatcagtttgcacatgaagagctttcacaaggggcggataagtgggttagcgagttctctagtcaacctaatcatggtgcactaaatgagaactgggttgatgagttctcgaaattaaatgttactgacgaatgggcagaggaattcagtggaggtggttttggcgaaagctctgctgatccatgggtagatgagttccaagaacacttgtcatctttcaaacaaagtccgggcgcctctcgaggggtttatgttttttctgagaacaacccgtatgttggtcaccctaatccaatgcaggaaggacaggagctcttccgcaagggcctcttaagtgaagctgttcttgctttagaggctgaagttttgaagaatcctgataacacagaaggttggaggttgttaggcgtaacacatgcagaaaatgatgatgaccaacaggccattgcagcaatgatgcgtgcgttggaagctaatccaacaaaccttgaagttcttcttgctcttggtgttagtcacacaaatgaattggagcagggggaagcattaagatatctttataggtggcttcagaatcaaccaaaatatggtggccttgtccctctgcagtcaactgattcaccttatggtcctgatgttgttagattgtttaatgaagctgctcagatgtcacctgaagatgcagatgttcatatagttctgggagtcttatacaacctatcaagagagtatgataaagctatagcttcatttaagacagcactacagctcaaaccacaggactattcactctggaacaagcttggtgcaacccaagcaaacagcatccagagtgctgatgcaatattggcgtatcagcaggctctggacttgaaacccaactacgtgcgtgcatgggcgaatatgggaatcagctatgccaaccagggtttgtatgaggattccattcgatactatgtaagggcagttgcaatgaacccaaaagctgacaatgcctggcagtacctgaggatctctcttagcaatgcttcgcgagcggacatgattgctgcatgcgacgcccgcaaccttgacgctcttcagaaagagtttcctctgtgagccctccggtccaaggcattagagcttccatggaaggaagcagcacactagcaagccgagtgactgcacctgtggtcatggaaatggaattggaaaccagtagcgttttgtatttgcctgttgattcttatatttatttttaggaagtgggggaatgtgtagcaactaggaagcgagggaacaacatccagttgatgtgaagcattcatggcacagtaggcaatagtggcaaaggggtactatacatacacacttacgggacgcacaacataaataaagaatggttgattaataaactatttattttggggacacacccctaggatcaacccctacttgtttcgagtttgaatactgatttgtatcaacaggcaataaataatgcgctttgtaaccttttatatcataatgtaatgcgcacgcccaaatcagttgtgtctaagaaaaaa

SEQ ID NO: 3277 - DNA, 2585 bp, Zea Mays
caatgatactagctagcagcaagcaatagcgtggaactcaagtcaataaaggaacttcctggttctgttaatgtcccatctacatctgactttagcgtgtctgctcctttgtcaaacatccctggttcagaaaatgagttcaaacaagaccagcgacctcttgcacggggtgctgactttattcgaggtggtcctgctaatgattggattgagtcttttcggcctccgagggttcctcaacttggtgtagaagcacaatttccagattttgagcaaatttataacaatgcagggacaacctttcagtttcagccgccattggatggtccaccacaaagagtgttgtccggtgtcttgcattcctttctcacaagtggcccagctggtgtgccatttcaaccacttccggtaccagctgctcttggtttatctgaaagcgacaaacaatgcattcgtgatcgtagctgcataatggcacggcatattttttctgaccaaccagaagaatatatacagagtcaggtcaatactttgctgcattcgcttgatattgacaaccgtatgagaggacctatgcatgggcaatacccagaactacaggagtactggaagcagtcccaaagttctacgcgtcctgccccaatgcataatgctgctgataaatggattactgagtttggcaagcaaaataataatccagaaaattgggcgaactctttcgaacaacaatatggccccaatgggtgggcctctgagtttgaacagcatcagtctcagatggccatgcgccagatgggaggagcgaacatggccaacctggctgctatggagcaatcccgagtgcttgcacaaactttagcaagtaataatgatcccaagtttcagaattctaagttcttccagtttgtttcaaagatgagccgaggtgaacttattatagaagataatcaagtaaaagaaggttcagcatcccaatccagtggctgggctgatgaatttcaaacaccgtacattgctaatgcaaactcatgggcagatcagtttgcacatgaagagctttcacaaggggcggataagtgggttagcgagttctctagtcaacctaatcatggtgcactaaatgagaactgggttgatgagttctcgaaattaaatgttactgacgaatgggcagaggaattcagtggaggtggttttggcgaaagctctgctgatccatgggtagatgagttccaagaacacttgtcatctttcaaacaaagtccgggcgcctctcgaggggtttatgttttttctgagaacaacccgtatgttggtcaccctaatccaatgcaggaaggacaggagctcttccgcaagggcctcttaagtgaagctgttcttgctttagaggctgaagttttgaagaatcctgataacacagaaggttggaggttgttaggcgtaacacatgcagaaaatgatgatgaccaacaggccattgcagcaatgatgcgtgcgttggaagctaatccaacaaaccttgaagttcttcttgctcttggtgttagtcacacaaatgaattggagcagggggaagcattaagatatctttataggtggcttcagaatcaaccaaaatatggtggccttgtccctctgcagtcaactgattcaccttatggtcctgatgttgttagattgtttaatgaagctgctcagatgtcacctgaagatgcagatgttcatatagttctgggagtcttatacaacctatcaagagagtatgataaagctatagcttcatttaagacagcactacagctcaaaccacaggactattcactctggaacaagcttggtgcaacccaagcaaacagcatccagagtgctgatgcaatattggcgtatcagcaggctctggacttgaaacccaactacgtgcgtgcatgggcgaatatgggaatcagctatgccaaccagggtttgtatgaggattccattcgatactatgtaagggcagttgcaatgaacccaaaagctgacaatgcctggcagtacctgaggatctctcttagcaatgcttcgcgagcggacatgattgctgcatgcgacgcccgcaaccttgacgctcttcagaaagagtttcctctgtgagccctccggtccaaggcattagagcttccatggaaggaagcagcacactagcaagccgagtgactgcacctgtggtcatggaaatggaattggaaaccagtagcgttttgtatttgcctgttgattcttatatttatttttaggaagtgggggaatgtgtagcaactaggaagcgagggaacaacatccagttgatgtgaagcattcatggcacagtaggcaatagtggcaaaggggtactatacatacacacttacgggacgcacaacataaataaagaatggttgattaataaactatttattttggggacacacccctaggatcaacccctacttgtttcgagtttgaatactgatttgtatcaacaggcaataaataatgcgctttgtaaccttttatatcataatgtaatgcgcacgcccaaatcagttgtgtctaagaaaaaa

SEQ ID NO: 3278 - DNA, 2427 bp, Zea Mays
cggggctgtgcgccgccgccgtgccagtcgcgtcgtccaggcttcgatccggaggtcaataaaggaacttcctggttctgttaatgtcccatctacatctgactttagcgtgtctgctcctttgtcaaacatccctggttcagaaaatgagttcaaacaagaccagcgacctcttgcacggggtgctgactttattcgaggtggtcctgctaatgattggattgagtcttttcggcctccgagggttcctcaacttggtgtagaagcacaatttccagattttgagcaaatttataacaatgcagggacaacctttcagtttcagccgccattggatggtccaccacaaagagtgttgtccggtgtcttgcattcctttctcacaagtggcccagctggtgtgccatttcaaccacttccggtaccagctgctcttggtttatctgaaagcgacaaacaatgcattcgtgatcgtagctgcataatggcacggcatattttttctgaccaaccagaagaatatatacagagtcaggtcaatactttgctgcattcgcttgatattgacaaccgtatgagaggacctatgcatgggcaatacccagaactacaggagtactggaagcagtcccaaagttctacgcgtcctgccccaatgcataatgctgctgataaatggattactgagtttggcaagcaaaataataatccagaaaattgggcgaactctttcgaacaacaatatggccccaatgggtgggcctctgagtttgaacagcatcagtctcagatggccatgcgccagatgggaggagcgaacatggccaacctggctgctatggagcaatcccgagtgcttgcacaaactttagcaagtaataatgatcccaagtttcagctttcacaaggggcggataagtgggttagcgagttctctagtcaacctaatcatggtgcactaaatgagaactgggttgatgagttctcgaaattaaatgttactgacgaatgggcagaggaattcagtggaggtggttttggcgaaagctctgctgatccatgggtagatgagttccaagaacacttgtcatctttcaaacaaagtccgggcgcctctcgaggggtttatgttttttctgagaacaacccgtatgttggtcaccctaatccaatgcaggaaggacaggagctcttccgcaagggcctcttaagtgaagctgttcttgctttagaggctgaagttttgaagaatcctgataacacagaaggttggaggttgttaggcgtaacacatgcagaaaatgatgatgaccaacaggccattgcagcaatgatgcgtgcgttggaagctaatccaacaaaccttgaagttcttcttgctcttggtgttagtcacacaaatgaattggagcagggggaagcattaagatatctttataggtggcttcagaatcaaccaaaatatggtggccttgtccctctgcagtcaactgattcaccttatggtcctgatgttgttagattgtttaatgaagctgctcagatgtcacctgaagatgcagatgttcatatagttctgggagtcttatacaacctatcaagagagtatgataaagctatagcttcatttaagacagcactacagctcaaaccacaggactattcactctggaacaagcttggtgcaacccaagcaaacagcatccagagtgctgatgcaatattggcgtatcagcaggctctggacttgaaacccaactacgtgcgtgcatgggcgaatatgggaatcagctatgccaaccagggtttgtatgaggattccattcgatactatgtaagggcagttgcaatgaacccaaaagctgacaatgcctggcagtacctgaggatctctcttagcaatgcttcgcgagcggacatgattgctgcatgcgacgcccgcaaccttgacgctcttcagaaagagtttcctctgtgagccctccggtccaaggcattagagcttccatggaaggaagcagcacactagcaagccgagtgactgcacctgtggtcatggaaatggaattggaaaccagtagcgttttgtatttgcctgttgattcttatatttatttttaggaagtgggggaatgtgtagcaactaggaagcgagggaacaacatccagttgatgtgaagcattcatggcacagtaggcaatagtggcaaaggggtactatacatacacacttacgggacgcacaacataaataaagaatggttgattaataaactatttattttggggacacacccctaggatcaacccctacttgtttcgagtttgaatactgatttgtatcaacaggcaataaataatgcgctttgtaaccttttatatcataatgtaatgcgcacgcccaaatcagttgtgtctaagaaaaaa

SEQ ID NO: 3279 - DNA, 1724 bp, Zea Mays
caaaacctttccccaagcaaccagaattctaagttcttccagtttgtttcaaagatgagccgaggtgaacttattatagaagataatcaagtaaaagaaggttcagcatcccaatccagtggctgggctgatgaatttcaaacaccgtacattgctaatgcaaactcatgggcagatcagtttgcacatgaagagctttcacaaggggcggataagtgggttagcgagttctctagtcaacctaatcatggtgcactaaatgagaactgggttgatgagttctcgaaattaaatgttactgacgaatgggcagaggaattcagtggaggtggttttggcgaaagctctgctgatccatgggtagatgagttccaagaacacttgtcatctttcaaacaaagtccgggcgcctctcgaggggtttatgttttttctgagaacaacccgtatgttggtcaccctaatccaatgcaggaaggacaggagctcttccgcaagggcctcttaagtgaagctgttcttgctttagaggctgaagttttgaagaatcctgataacacagaaggttggaggttgttaggcgtaacacatgcagaaaatgatgatgaccaacaggccattgcagcaatgatgcgtgcgttggaagctaatccaacaaaccttgaagttcttcttgctcttggtgttagtcacacaaatgaattggagcagggggaagcattaagatatctttataggtggcttcagaatcaaccaaaatatggtggccttgtccctctgcagtcaactgattcaccttatggtcctgatgttgttagattgtttaatgaagctgctcagatgtcacctgaagatgcagatgttcatatagttctgggagtcttatacaacctatcaagagagtatgataaagctatagcttcatttaagacagcactacagctcaaaccacaggactattcactctggaacaagcttggtgcaacccaagcaaacagcatccagagtgctgatgcaatattggcgtatcagcaggctctggacttgaaacccaactacgtgcgtgcatgggcgaatatgggaatcagctatgccaaccagggtttgtatgaggattccattcgatactatgtaagggcagttgcaatgaacccaaaagctgacaatgcctggcagtacctgaggatctctcttagcaatgcttcgcgagcggacatgattgctgcatgcgacgcccgcaaccttgacgctcttcagaaagagtttcctctgtgagccctccggtccaaggcattagagcttccatggaaggaagcagcacactagcaagccgagtgactgcacctgtggtcatggaaatggaattggaaaccagtagcgttttgtatttgcctgttgattcttatatttatttttaggaagtgggggaatgtgtagcaactaggaagcgagggaacaacatccagttgatgtgaagcattcatggcacagtaggcaatagtggcaaaggggtactatacatacacacttacgggacgcacaacataaataaagaatggttgattaataaactatttattttggggacacacccctaggatcaacccctacttgtttcgagtttgaatactgatttgtatcaacaggcaataaataatgcgctttgtaaccttttatatcataatgtaatgcgcacgcccaaatcagttgtgtctaagaaaaaa

SEQ ID NO: 3280 - DNA, 1694 bp, Zea Mays
aatgaacaacataaacaactatgtcttattatcatatataaacagaaataatcattgaattacaaatgtaccttcaacttgaaggagatgaaagtacaagcgtgacgcaaaagtgaatgcccaatcagccccccacagtacgggggtactgttcacctatttatagacacaggtcacagcctatgcaaaattacattcatgccctttacatttgataataattctattgtaatctatcgaggtctgaatagccttttcatctttaagtcagtttcattttgttgctatcataccgaagctttcctgctcacaccttcggcgctgtatcaaccttcgtattattctggtctgctgtgataccgatttgagtccgaagatacctgttcacacattaaactccagaaatactgttaaatcctgtttttgaggaccttcgtaagccgaaggcccccaacactagtataccagttttacactctgcagaggttgcgcatctttacccacaagtcgtgttacccatttgccacggagttgatcagaccccctacacctctaccaaggaagcgaggcagggtaccactacgaggcctttacaaagttccactagcttcagactacccgctacagtttataggaagctccagtgcaggaatccctcgcctgaccgccatcgcagcaaaatcaacccaaggacctccctacactgaccactcccctactgcccttgcccctttcgggtaaggtagccctccactagctttcctagttaatcagccaagggcatcccattaaacccttgtggtagctctgttttcccgggtggttctccatgttcccattaacataatgatcttatcatgaacagaaaataatgaacagataataacaagtataaaaatgagtgatgaatatctctatacccaaatccacataaagcaatagcatgaactacccaaaactttagtagtaaaaccagtggtgaaacaaggtataaagatagtaaaaatctagggtaacctattgggtcccagcaaaattaacctatgcggattattatgattaataagaacatggatgggtaaaagaagtgatcaagggcacaacttgccttcaatgagctcctgctcagctacttctacttgcggtacctcagaatccacagtggcttgctcgtctactcgcatcaacacgatacatacataatatagcataaatcaacatcacatcaaacatgtaaataaaatatacagtgaaactctacacattaaaatgagatcataggaactggaatcattaaatttggggttacagattttaagatatgaatttctgaaggttttaagtatttactacaagattaattgctagataaattctaaggtgtatttcatgccaaaacagtggtaatatttgatagagaataatattacaaaattatagaaactgaaatggattaatttggactacaaatggattttctatgatttaatcaagttctagcatatatttttgtattaaaaatctatttttccaattcaattactcaatttaatacagctctagactgggcctcgaatactgaaaactataggggcttcctagtaagtagctcgagactcagacaatggtgatactggacggcgggttgattcttaagttttctagggtctcttctgcgaactggcaaagtgaag

SEQ ID NO: 3281 - DNA, 638 bp, Zea Mays
gggcgctcaatacgtccacccgcaatttcgatttgctcagttgaagtatttaaatcgattcagcgactgtttctgtgacgggatgatggttctcgttcctggcgaggcgaattttgtcatctcgagcaagatggatgggaacaggatagctcggttttcggtcacctggaggggcagccaacttgatgtggatgcggatccaagttgtaccgtgaaagagtttgggcaactgttgcaggacttgactagtgttaggccagagacgttgaagctcattgttccacgatctacaaacaaaggctccaagctgatcatgccattttcggatgcacattcgagattgacactgaatggagtgggtattagcgagggaaaacctatccgaatgatgggagtttatgatgatgaaatcgaggaggtatccgacaatggcaaaagacctgaccaacgcattattggatttgatgaagaagaacagcggcttaggcaaagatcattaggcaggccacagatttcactcaaacttccccagggacaatacatcttctgcgattttcggacgcttcacttacctgggattgagccggatcctgcgcgctcgcaaggtccaaagcgaacaaccagctgcagacgaatct

SEQ ID NO: 3282 - DNA, 542 bp, Zea Mays
aatcctactagatcagatgcgcttgaggagcaagatggatgggaacaggatagctcggttttcggtcacctggaggggcagccaacttgatgtggatgcggatccaagttgtaccgtgaaagagtttgggcaactgttgcaggacttgactagtgttaggccagagacgttgaagctcattgttccacgatctacaaacaaaggctccaagctgatcatgccattttcggatgcacattcgagattgacactgaatggagtgggtattagcgagggaaaacctatccgaatgatgggagtttatgatgatgaaatcgaggaggtatccgacaatggcaaaagacctgaccaacgcattattggatttgatgaagaagaacagcggcttaggcaaagatcattaggcaggccacagatttcactcaaacttccccagggacaatacatcttctgcgattttcggacgcttcacttacctgggattgagccggatcctgcgcgctcgcaaggtccaaagcgaacaaccagctgcagacgaatct

SEQ ID NO: 3283 - DNA, 2778 bp, Zea Mays
cctatgcctatcctatcgcccccgccaggcgccagcctcccgtatttgatgtttcacaaacgcgtgagcggctcgccctcctctccagtccctcctccctccggtccgcacaggggagcagccggcagcagctagctaccacagcagcaataagctaatcagctacgatggcggactacgtgtatggccccgggcggacccacctgttcgtgccgggccccgtgaacatcccggaccccgtgatccgcgccatgaaccggcagaacgaggactaccgctcgccggcggtgccggcgctgaccaaggtcctgctggaggacgttaagaagatcttcaagaccacgacgggcacgcccttcatgatcccgacgacggggacgggcgcgtgggagagcgcgctgaccaacacgctgtccccgggcgacagggtcgtgtccttcctcatcgggcagttcagcctgctgtggatcgaccagcagcggcgcctgggcttcgacgtggacgcggtggagagcgagtggggccagggcgccgacctggccgcgctggagcgcaggctccgcgaggacgcgccgcggcacgccatcaaggccgtggccatcgtgcacaacgagacggccacgggcgtcaccaacgacctggccgccgtgcgcgcgctgctggacaagcacgcgcacccggcgctgctgctggtggacggcgtgtcgtccatctgcgcgctggacttccgcatggacgagtggggcgtggacgtggcgctcacgggctcgcagaaggcgctgtcgatgccgacggggatgggcatcgtgtgcgccagccccagggcgctggaggccagcaagacggccaggtccgtgcgcgtcttcttcgactggaaggactacctcaggttctacgacatgggcacgtactggccctacacgccctccatccagctcctctacggcctccgcaccgcgctcgacctcatcttcgaggaagggctggacaacgtcgtgaggaggcacaaccgccttgggacagccaccaggctcgccgtcgaggcgtgggggctcagcaactgctgccagaaggaggagtggttcagcgacaccgtcaccgccgccgtcgtgccgcccaacatcgacagcgccgaggtcgtcaggcacgcgtggaagcggtacaacctcagtctcggcctcggcctcaacaaggtcgccgggaaggtcttcaggatcggccatctcggcaacctcaacgagctgcaacttctgggatgtctgagcggtgtggagatggtgctcaaggatgtggggtacccagtgaaactaggtagcggcgtggcagccgcggcggcgtacctgtcaaactccacgccgctcatcccatctaggatctgagaacaatgtaaggggaggatatcgcaaacaaggccagcgacaacgagtgggcagacgaacgaacaaagcgttgctacatagtactctctcagaatgtaaaggttggtggggcaacaagtaaagcatgcatgcatttattgtcgtttcgaaaaaagtaatacaatatgtgatcatgtagaaccattggtgataccagtagttgtctgaccctctatttatcgacaacaatagttattggatccattaattctatttgtaaacaaaataagtcctcctttattatgtaggccccgtttggttcctttagtctacggactaaagtttagtcaggagactaaagtttagtccctaccttgtttggttctaaggactaaaactattgaaaacacattaaataaatcataagaagactaaaatactcaacattctcccgccattagtgcatctgaaataaaagagggcaaatagtggaatttatatgatttagtctcttttagtcacctcttgagggtctagagactaaaacagtttggtccctgttttagtcccaccgtttggcaatttagtgactaaatgagactaaaatagatgaactaatctttagtccatcaaaccaaacgggactgtaattagtaaatagtcaacaaccctacaaatctatatctaagctactcgcttttacccaaaatatagtataaaagtaaatccttaattttattactattttatcacctctaccattttctaagatatcataaattagccctccacaaatatgcatcttattacctatatgtgttattacatagaacaaactaaaacaatcccttaaatctgtatatacattatctaaatatgttttatggaaaagatactataactcctaatactcttataaatacccattcctactgctattggtgtccgtgcgtgcctgtgtgtgctctaaatatgcatgcatcaacatatatatatagacatgcatgtatcttgatcaggatagagaatataatgcgaatcatatagtatggctaaaatcaaattttagcatcatgtttattaataccctcaccagatagattattgttagagaaacaagaaacctagcggaaataagtttacataaagagagagcaatataacctgtacaattattttgaaggtatgggtttccttggaagccatcagaacacttgcagcggtacccgtcacgtatattcccttgcatgacatctttgcatatactgttgtcacttacgcacgcatatgtagcattattttgcattgctttctgacaagttatgtttgctataacccattttattgttgtatcctcctgagagaaatcataattaccatccacaaccgccatgtaagttggttggaagttgttgtgata

SEQ ID NO: 3284 - DNA, 1077 bp, Zea Mays
aacacgtcatctttttttaaaaaaaagaacaacttttaattatctaagcagagctaagcctcattagttctttttataaaacaggtatcaaggaagataatcaaattccaaggaatggtaatgcatcaattgtttcatcacttaactcatatcacctaatgcaccatataagtgataaaagttttaaaacaacaaggaggtggcaaatgcaccggggcttgcctgggatacactagcttagtgtggttagatgacgttcgcttggcgagcatcaacaatcctgacacttgatcaagtcgtccatatcgagatgggtccatcaatgccaccttgtgatccatcctgatccatgccctccaattcgcataattatctagcgtacgacatcatgctccgacccgatttcagcaagaacgaagacggccaccagttcgagcatatcatcaaacacctaaggagcgttgaacttaaccttcttctccacctatttctccaaggattttactccatatcgcacacatcaacacacataaaacatcacatcagcaggatattaacaagaactagtaaaacaactaagaaatttagagatcaccatgggagcagcagaggtggctgggcgagctaggttgggcgaccatgggacttgtgcttggggaaggagatggaagaggggctatccatggcaacaagagagggggctggcgtccataccatgggcagcagggagggcgctggacagagggcaggggcgagctccagggaggagcgtcgagctgcagcagggaggggcggccatggcaggaaggggagggcgccatgggagagacgtcgagagagcagggatgaccagcgaggctctgtaggatcggcgcctagggaggaggcgacgtgaagaagctgacttcctatgcgcaggggatgagggagagatcacaggtgaagaaactagaagcctctgccctgcatacacggataagaagaaggaacgatagtggccaagtgagaaaaaaatgtgaattctcctctcttaaaaacagaaacataattgttttcctattaggatttggataagag

SEQ ID NO: 3285 - DNA, 745 bp, Zea Mays
aatgcatcaattgtttcatcacttaactcatatcacctaatgcaccatataagtgataaaagttttaaaacaacaaggaggtggcaaatgcaccggggcttgcctgggatacactagcttagtgtggttagatgacgttcgcttggcgagcatcaacaatcctgacacttgatcaagtcgtccatatcgagatgggtccatcaatgccaccttgtgatccatcctgatccatgccctccaattcgcataattatctagcgtaccatgggagcagcagaggtggctgggcgagctaggttgggcgaccatgggacttgtgcttggggaaggagatggaagaggggctatccatggcaacaagagagggggctggcgtccataccatgggcagcagggagggcgctggacagagggcaggggcgagctccagggaggagcgtcgagctgcagcagggaggggcggccatggcaggaaggggagggcgccatgggagagacgtcgagagagcagggatgaccagcgaggctctgtaggatcggcgcctagggaggaggcgacgtgaagaagctgacttcctatgcgcaggggatgagggagagatcacaggtgaagaaactagaagcctctgccctgcatacacggataagaagaaggaacgatagtggccaagtgagaaaaaaatgtgaattctcctctcttaaaaacagaaacataattgttttcctattaggatttggataagag

SEQ ID NO: 3286 - DNA, 172 bp, Zea Mays
gccaactagggaggcgacgctgccgccgatagcagcagcgactctgcagcttcctccacatcctctcgcgaccgccgacgacaacgacgccgcagcttcctccgcatcctctcgcgaccgccacttttccagttaggattcaaggcgtacatttgctggaattggatctttg

SEQ ID NO: 3287 - DNA, 2356 bp, Zea Mays
attaaaaggtaatctaataatgaagtgaaaacaacgatttcagttcatggatccaaacaagtcatcagatttgtccaaaccaagaaactccaaacaagtactactacacatataataaaaaaaagttattaaagatttgacctcgggtaaacacagccctcgatggctagatgtttggatgcaaagacgtgcatgtgcggatgtaccatgtagtgaatcacgtacaaaacgcgtactcatagatgcatcatgcatgaacggatgccgcagtttttgggcgctccgatgtgggctggaatgggccgcccaaactggtctgtcacgtgactttggttgggctaccgttggatccgcaacgacgagccgtggtgactgcgcaacaacgtccgagggagcgagcgagagcggtccctggtgtgcggaacactctgtcagcatggccgccgccctctgcctgcagcgccagagcctcgccgccaacccctttctcttctccgcccatggcctccgctaccgcaagctcgaggtcatcctcactacgtcccaagagaacaaggatacctacgcatgcactagtgaaagcatctgctacgacgttctaccaccggcagtatctcaaggaggctacatttgcaagtgttcccatggcttacaaggaaacccataccttcaaaataactgtacagatattgatgagtgcactattccaaataaatgcaatggaatatgccacaattttaatggaggcttcaattgtacaagttgccctcatgggaaagagtatgatccaaaaaaacaaaaatgtgtcatgtcagctaagcagtgtattctaatttttgggattgtaattgggcttgtttgtggccttggatccataagttttgcacttggtgcaattgtactcaccggtaagtggaaaaaaggcatccaaaggagaattcgaagagagtacttcaagaaaaatcaaggtctactcttggagcaactaatatcgaatgaaaatgctacaaccaaaacaaagatattcactttggatgaactagaggaagcaaccaacaagtttgatgctactcgtgttctaggtcatggtgggcacggcactgtttacaaagggattttgtctgatcagcgtgtcgtggctataaaaaaatctaaaatagtggagcaaatagagatagatcagttcatcaatgaggttgctattttatctcaaatcattcaccgcaatgtggtgaagctttttggttgttgcctagaagatgaggtacccttgctagtgtatgagttcatatcgaatggcactttgtatgacattcttcatgaaaatattgcaacaaaatgcttgttgtcattggatgatcgaattaggattgcaacggaagcatcaggagcacttgcttatctacactcagctgctgcaataccaattttccatagagatgtgaagtcttctaatatactcttggacgacaacttcactgtaaaggtttcagattttggtgcttcaagatctctatcccttgatgaaacacatgtggtgacaattgtccaagggacattcggttatttagatccagagtattattatactggttctctaactgagaagagcgatgtgtatagttttggagtgatacttgtggaacttttgacaagaaagaaaccaatttttatcaatgaatcgggtgccaaacaaaacttatctcattacttcattgaaggactacaggaagggactctcatggaaataatagattctcaagttgtggaagaggcagaccaagaagagattaatgatatctcctcacttatagaagtgtgcttaagatccaaaggaggacatagaccaagcatgaaagaagtagatatgagattgcaatgtctaagaacaaagaggctacggaataaaacacatcttttgattgaaaagggtggagaaatggaacctttgttatgcgcagaagctcagcacccacatgaacgtatcaatccaatttataatgaggaacatttaataattccagtgatgtctgggtgctacagtttggagcaagaacttgcggcagcatctagtatggttcgctaacttggtatttgcttggatgttggacacatctatagtaaccatctattttcagagaggaactatggtatattttgttcccttcgcataagactatggtatatatggtgcgtatatgtatataatatatatgacattgctatgtttacatataatgtaatttccgtatttcaaactgtaatgcgttttagttttgttttgattacaaatttggtactctaattgtaatagtttctaaaaccaatcataatatatagttgtaatatacttgag

SEQ ID NO: 3288 - DNA, 2646 bp, Zea Mays
attaaaaggtaatctaataatgaagtgaaaacaacgatttcagttcatggatccaaacaagtcatcagatttgtccaaaccaagaaactccaaacaagtactactacacatataataaaaaaaagttattaaagatttgacctcgggtaaacacagccctcgatggctagatgtttggatgcaaagacgtgcatgtgcggatgtaccatgtagtgaatcacgtacaaaacgcgtactcatagatgcatcatgcatgaacggatgccgcagtttttgggcgctccgatgtgggctggaatgggccgcccaaactggtctgtcacgtgactttggttgggctaccgttggatccgcaacgacgagccgtggtgactgcgcaacaacgtccgagggagcgagcgagagcggtccctggtgtgcggaacactctgtcagcatggccgccgccctctgcctgcagcgccagagcctcgccgccaacccctttctcttctccgcccatggcctccgctaccgcaagctcgaggtcatcctcactacgataacagagagatcatggagagcgcaaacactggttatggtgtctgtgaagggttaggctgctgcagcattccaatacgtggccgccaaggcttcactctcaaactaggtcgcctcaatagtaccattccacagttcggtgaagcgctatccagtgtcaagattatcgtttcgcaaaactataaattcgttactgatgatgtttacgcaagttgggtgaatacaagcaacgttaatgaaatgatattttacattacaatcatggaccaaccgaactgcgcgagtgcccagtcccaagagaacaaggatacctacgcatgcactagtgaaagcatctgctacgacgttctaccaccggcagtatctcaaggaggctacatttgcaagtgttcccatggcttacaaggaaacccataccttcaaaataactgtacagatattgatgagtgcactattccaaataaatgcaatggaatatgccacaattttaatggaggcttcaattgtacaagttgccctcatgggaaagagtatgatccaaaaaaacaaaaatgtgtcatgtcagctaagcagtgtattctaatttttgggattgtaattgggcttgtttgtggccttggatccataagttttgcacttggtgcaattgtactcaccggtaagtggaaaaaaggcatccaaaggagaattcgaagagagtacttcaagaaaaatcaaggtctactcttggagcaactaatatcgaatgaaaatgctacaaccaaaacaaagatattcactttggatgaactagaggaagcaaccaacaagtttgatgctactcgtgttctaggtcatggtgggcacggcactgtttacaaagggattttgtctgatcagcgtgtcgtggctataaaaaaatctaaaatagtggagcaaatagagatagatcagttcatcaatgaggttgctattttatctcaaatcattcaccgcaatgtggtgaagctttttggttgttgcctagaagatgaggtacccttgctagtgtatgagttcatatcgaatggcactttgtatgacattcttcatgaaaatattgcaacaaaatgcttgttgtcattggatgatcgaattaggattgcaacggaagcatcaggagcacttgcttatctacactcagctgctgcaataccaattttccatagagatgtgaagtcttctaatatactcttggacgacaacttcactgtaaaggtttcagattttggtgcttcaagatctctatcccttgatgaaacacatgtggtgacaattgtccaagggacattcggttatttagatccagagtattattatactggttctctaactgagaagagcgatgtgtatagttttggagtgatacttgtggaacttttgacaagaaagaaaccaatttttatcaatgaatcgggtgccaaacaaaacttatctcattacttcattgaaggactacaggaagggactctcatggaaataatagattctcaagttgtggaagaggcagaccaagaagagattaatgatatctcctcacttatagaagtgtgcttaagatccaaaggaggacatagaccaagcatgaaagaagtagatatgagattgcaatgtctaagaacaaagaggctacggaataaaacacatcttttgattgaaaagggtggagaaatggaacctttgttatgcgcagaagctcagcacccacatgaacgtatcaatccaatttataatgaggaacatttaataattccagtgatgtctgggtgctacagtttggagcaagaacttgcggcagcatctagtatggttcgctaacttggtatttgcttggatgttggacacatctatagtaaccatctattttcagagaggaactatggtatattttgttcccttcgcataagactatggtatatatggtgcgtatatgtatataatatatatgacattgctatgtttacatataatgtaatttccgtatttcaaactgtaatgcgttttagttttgttttgattacaaatttggtactctaattgtaatagtttctaaaaccaatcataatatatagttgtaatatacttgag

SEQ ID NO: 3289 - DNA, 4032 bp, Zea Mays
attaaaaggtaatctaataatgaagtgaaaacaacgatttcagttcatggatccaaacaagtcatcagatttgtccaaaccaagaaactccaaacaagtactactacacatataataaaaaaaagttattaaagatttgacctcgggtaaacacagccctcgatggctagatgtttggatgcaaagacgtgcatgtgcggatgtaccatgtagtgaatcacgtacaaaacgcgtactcatagatgcatcatgcatgaacggatgccgcagtttttgggcgctccgatgtgggctggaatgggccgcccaaactggtctgtcacgtgactttggttgggctaccgttggatccgcaacgacgagccgtggtgactgcgcaacaacgtccgagggagcgagcgagagcggtccctggtgtgcggaacactctgtcagcatggccgccgccctctgcctgcagcgccagagcctcgccgccaacccctttctcttctccgcccatggcctccgctaccgcaagctcgaggtcatcctcactacgggggaaaatcggagtttgttttcgagccatttcgcagcgtacgggtaggttgtgcaactcatgaggtagaaatattttccgacctgctttattgacggtagaaaacttgattgaaatggctctttatgtctctccaaggccaaatatcagttaacatatcttgagttgatcttttcttggtataagaacattgacgggttagacgggattgacaatcacgagcctattaagacaaaggataagaaattttacgagagatctgaacactagctttatcaaactcctcaacgaattaaaggctacctgaatctgagttaggaagcatcgagagatcacagttatagtcaaatactattcttttctcagatatcgctttcaagaagaagaaaaaaacaccgagcacacttcaaaattcgctttggcaaacatctcggatggtaactcgtgagaagacttaacaccggtcaagctccactagttttgagcatgcatggcggtggtctctccagtctccccgtgatataaattctccagtctccagtctccactcgttgtttccatgcatcgaagaaaaaacaggaggagaatacgtctgatttggcaagtcttgttggccgcagcgacgaccgtaacatcagatgctactgtcgtccttctccttccactagctagcagaatgctagctcgccccacgcaactgcaagtgagattttttttttgttttttgttttcttctggcgcgcgctagctgttacagtctctcagcatataaattaattaaactagtatatgtagacacacacagcacacaggaaagcacaccatcttctgtctccataaacaagctacctgcagcgatgtgctccactgcagtgctgctagttcgcacatgcgttgtgcttgtgtgtttggccgccatggcgcgagcgccggccaaggtccatgctgccgccggcaccggggatgggctccttgttatccctaccaccgcctccctgtcgcactgcccctctcgctgcggggatgtacaaatctcgtacccgttcgggatagggccgggctgcttccgtcaaggcttcgagctcacctgcgatcaaacagctccttctcccaggctcttcttcatgtcggggaacagctcgattcaggtgacttctctagatgtcggcaacaatatgggttgggcttcagctgttgggttcaacgtcaccatgagcgcaggcgtggacacctacaccaagtcttgggaggcccctactgccactggtgccagtttttatgcagataataataataatctgtacactgttggatgtggtgtctacgtctacgtgttgggtgataatatgacagatatcattggttattgcacgagtatttgcacagataacagagagatcatggagagcgcaaacactggttatggtgtctgtgaagggttaggctgctgcagcattccaatacgtggccgccaaggcttcactctcaaactaggtcgcctcaatagtaccattccacagttcggtgaagcgctatccagtgtcaagattatcgtttcgcaaaactataaattcgttactgatgatgtttacgcaagttgggtgaatacaagcaacgttaatgaaatgatattttacattacaatcatggaccaaccgaactgcgcgagtgcccagtcccaagagaacaaggatacctacgcatgcactagtgaaagcatctgctacgacgttctaccaccggcagtatctcaaggaggctacatttgcaagtgttcccatggcttacaaggaaacccataccttcaaaataactgtacagatattgatgagtgcactattccaaataaatgcaatggaatatgccacaattttaatggaggcttcaattgtacaagttgccctcatgggaaagagtatgatccaaaaaaacaaaaatgtgtcatgtcagctaagcagtgtattctaatttttgggattgtaattgggcttgtttgtggccttggatccataagttttgcacttggtgcaattgtactcaccggtaagtggaaaaaaggcatccaaaggagaattcgaagagagtacttcaagaaaaatcaaggtctactcttggagcaactaatatcgaatgaaaatgctacaaccaaaacaaagatattcactttggatgaactagaggaagcaaccaacaagtttgatgctactcgtgttctaggtcatggtgggcacggcactgtttacaaagggattttgtctgatcagcgtgtcgtggctataaaaaaatctaaaatagtggagcaaatagagatagatcagttcatcaatgaggttgctattttatctcaaatcattcaccgcaatgtggtgaagctttttggttgttgcctagaagatgaggtacccttgctagtgtatgagttcatatcgaatggcactttgtatgacattcttcatgaaaatattgcaacaaaatgcttgttgtcattggatgatcgaattaggattgcaacggaagcatcaggagcacttgcttatctacactcagctgctgcaataccaattttccatagagatgtgaagtcttctaatatactcttggacgacaacttcactgtaaaggtttcagattttggtgcttcaagatctctatcccttgatgaaacacatgtggtgacaattgtccaagggacattcggttatttagatccagagtattattatactggttctctaactgagaagagcgatgtgtatagttttggagtgatacttgtggaacttttgacaagaaagaaaccaatttttatcaatgaatcgggtgccaaacaaaacttatctcattacttcattgaaggactacaggaagggactctcatggaaataatagattctcaagttgtggaagaggcagaccaagaagagattaatgatatctcctcacttatagaagtgtgcttaagatccaaaggaggacatagaccaagcatgaaagaagtagatatgagattgcaatgtctaagaacaaagaggctacggaataaaacacatcttttgattgaaaagggtggagaaatggaacctttgttatgcgcagaagctcagcacccacatgaacgtatcaatccaatttataatgaggaacatttaataattccagtgatgtctgggtgctacagtttggagcaagaacttgcggcagcatctagtatggttcgctaacttggtatttgcttggatgttggacacatctatagtaaccatctattttcagagaggaactatggtatattttgttcccttcgcataagactatggtatatatggtgcgtatatgtatataatatatatgacattgctatgtttacatataatgtaatttccgtatttcaaactgtaatgcgttttagttttgttttgattacaaatttggtactctaattgtaatagtttctaaaaccaatcataatatatagttgtaatatacttgag

SEQ ID NO: 3290 - DNA, 1529 bp, Zea Mays
caggacactagcgtaggcttcgtcttccccaccatctcttcttattcccccaagctcatccatggccacctccccgccatctccctcagcacacgccaagctcccctccgatctgttcagagcagggagtagcagctcccattccccagcaacatcttcctcatcgacgccccctgctcggagcctcccatggcacaatcacccatggtcgaggttccccctgcttggcctcgcttccgtgggcgctagcagcagaagctcccaagcacagagtcgttcttccccaaggtgcgggcgccatttcttccatggccgagctcaccacctgctaggacaagccggacccctctgctcctccatggctgtgagctcgacgtccccttcttcctcctctgatgggcagctcggctccctctgctccattcccccactcggcacccaactttctgcaggagcttgccaacgctctcctccccccactcagcactccatggtcagatcctcgtctcccccatcaacgctaggtatttgaacctgcaccctgtcaacatccccagggcaaagactcgatgcccccttctctgtccctactcctccctctatggatattcccatggcgcagttccctagccggcttcctgcctccggtaagcagcaattattctctgctcgcgagctcgccgttaggactcccaagtcgctgcatgcccctgcccaagctccaaatccatggccggaatcctcaccgaaagcgacgctagccgcgagcctcactgctccttgtgcatagttgctgttgtccattgccttgaagttcctccgtcatcgtgttgcttcttcgctgctcctccatagcacgccctccttgacagctcaccatcgatctccattttggactgttgtggccatgtgaatggggtgttcgacgaaatgcttagtagggcagcgagtcgtggagagcatcatcgatcttgatgtgctcggcattttctcatgcaaccccgccgcccatgtagctccagcacgccgatgccatctcccagctcgtccctaccgtgtccatcgctgtcccatgcctcgctgtgctacgctagccgcagcagcacactgcccctatgtcttacccttgtcgtgcttgcgtgttgttcgaacaaatgcccagcagcagcatcctggtgtcttgtgttgtcgcttttggtgccctgctccattaatgccccttgacgctatccttcctgttgttttgccacacaaaacagcagccgcaacaactcctcagtggcgcgtgctccaccttgttgcgtcgtggtgcccgtcgtgctccttcggcttcgctctgctctccggtacacgttggcacgttcatctccacgccatgtgtgcagtgatatcgaccgagttgtttatggtaagctgttttgttgtttcaggtagtgttcgattaatggatataatatattttggtaatcacaatgattctttatgtgttgcacaaatgtgtcgtggttatattaaatcgtggttaaacg

SEQ ID NO: 3291 - DNA, 917 bp, Zea Mays
caggacactagcgtaggcttcgtcttccccaccatctcttcttattcccccaagctcatccatggccacctccccgccatctccctcagcacacgccaagctcccctccgatctgttcagagcagggagtagcagctcccattccccagcaacatcttcctcatcgacgccccctgctcggagcctcccatggcacaatcacccatggtcgaggttccccctgcttggcctcgcttccgtgggcgctagcagcagaagctcccaagcacagagtcgttcttccccaaggtgcgggcgccatttcttccatggccgagctcaccacctgctaggacaagccggacccctctgctcctccatggctgtgagctcgacgtccccttcttcctcctctgatgggcagctcggctccctctgctccattcccccactcggcacccaactttctgcaggagcttgccaacgctctcctccccccactcagcactccatggtcagatcctcgtctcccccatcaacgctaggtatttgaacctgcaccctgtcaacatccccagggcaaagactcgatgcccccttctctgtccctactcctccctctatggatattcccatggcgcagttccctagccggcttcctgcctccgcagccgcaacaactcctcagtggcgcgtgctccaccttgttgcgtcgtggtgcccgtcgtgctccttcggcttcgctctgctctccggtacacgttggcacgttcatctccacgccatgtgtgcagtgatatcgaccgagttgtttatggtaagctgttttgttgtttcaggtagtgttcgattaatggatataatatattttggtaatcacaatgattctttatgtgttgcacaaatgtgtcgtggttatattaaatcgtggttaaacg

SEQ ID NO: 3292 - DNA, 2002 bp, Zea Mays
cgatgagcccaggacaatagcgcaggctccgtcttccccaccgtctcttcttcttcccccaagctcgtccatggccacctccccaccatctccctcagcacacgccgagctcccctccgatctgttcagagcagggagcagcagctcccattccccagcaacatcttcctcatcggcgccccctgctcggagcctcccatggcgcaatcgcccatggccgaggttccccctgcttggcctcgcttccgtgggcactagcagcagaagctcccaagcacagagccgttcttccccaaggagcgggcgccatttctcccatggccgagctcaccacctgctaggacaagccggacccctctgctcctccatggctgtgagctcaacgtccccttcttcctcctctaatgggcagctcgactccctctactccattcccccactcggcacccaactttctacaggagcttgccaatgctctcctccccccactcagcactcctcttcccttttctctgtgatgggcgcatgcaaccgtaagctccatggtcagatccctgtcttccccatcgacgctagttattcgaacctgcaccctgtcaacttccccaaggcaaagactcggcgcccccttctctgtccctactcctccctctatggatattcccatggcgtagttccccagccagcttcctgcctccggcaagcagcaattgttccctgctcgcgagctcgccgccaggactcccaagtcgctgcatgcccctgcccaagctctaaatccatggctggaatcctcaccggaagcgacgctagccgcgagcctcactgctccttgtgcatagttgttgttgtccatcgccttgaagttcctccgtcatcgtgctgcttcttcgcctctcctccatagcacgccctcccctacagctcaccatcgatctccattttggattgttgtggccatgtgaatggggtgttcgacgaaatgctaagtagggcagcgagtcgtggagagcatcatcgatcttgatgtgctcatcattttctcatgcaaccccgccgcccatgcagctccagcacgccgatgacgtctcccaactcgtccctgccttgtccatcgctgtcccatgcctcgctgtgctacgctagccgcagcagcacattacccctatgtcttacccttgtcgtgcttgcgtgctgttcgacaaaatgcccaacagcagcatcccggtgtctagtgtcatcgcttttggtgccctgctccattcctgcctgttgacgctatccttccggttttttttgccacacaaaacagcagccgcaacaactcctctatggcgtgtgctccaccttgttgcgtcgtggtgcccgtcgtgctccttcggcttcgctctgctctccggtacacgttggcacgttcatctccacgccatatgtgcagcggtatcaaccgagttgtttatggtgtgctggagtatgttacatcaattgttgcgccaggtggatggaagtgttctgaatacatgccgcaatatggttgtattcgtgacaaggaggtgtaggttttactcgactagaagtttggttgatgtggctaggcattgctttggcttgtgtggtgaggtgatgacatgccaaagtagtcatcgtttcctctatgtttataagtcgagtcgtgacgatacacagtatgcgtttgttaaattatgctttgcatattgtgtatggttgtgctcacgatttcgattagacacattgggtggtcaagtaggttcgtgatacaagttgtgtaatgtagttagtttgttttagaatgattattgaaatgctcagttcatatgataaacatgtatgtgttcacgatttgggaagtaagtgcatggtggttgcgagttggagattagtggtttacggttcgtatgatttggtcgaagtgcgaatatacgcgtaaatatgtatatttataaaaaaatgttgtagtgtatgttgtgtcttggattgcgat

SEQ ID NO: 3293 - DNA, 3657 bp, Zea Mays
ataacccaattgccgcggacatgtagagaagtcacccggatcgagctgttccccgacacgaagaagagcctgggagaaggagttgtgcgatcgcagctgagctcgaagccttgccggaaacagcccggccctatcccgaacgggtaggaaatttggacattcccgcaccaagaggggcagtgcgacagggaggcgttggtagggatagcaaaagtatgaaatatggtataatcaatgttgttactgcgtagtaaatattcatacaagactaacacaactggaacggttcaatttggaattaaaatggagaagttacgaatttccaaagttttatgtatttgatataggattaattaggaaattaattttattgttgttttcatgacaaaacagaggtattatatgataaaaaataatattatagaattatagaaattggaatgaactcatttggatttaatatgaaattcccatgaattaaatgggtttttacaattatttttaaactaaaaatcaatttctaaactctttttccgtattttctttatttcctgaactgcgtcccaaatttcagaaagatcaagagccaagctgtaaatgtttttttagactcagtgagcatacagagacgggttaaacacaaaagacgtcttagttgaagttgtacacaattcaatatgagtcacgttggctagagggtggaaggttaagcattctgctcaatagatccaaggtttgattcctgagcagccacagtttgattttttttctgcgcgcctttttaataagtagtatagatatagactggtttaattaatttatatgctgagagacgctaacagctagcgcgcgccagaagaaaacaaaaaacaataaaaaaaaatctcacttgcagttgcgtcatgcgtggggcaagctagcattctgctagctagtggaaggagaaggacgacctggtcttggaatctcagggcaacagtagcattctgatgttacggtcgtcgctgcggccaacaagacttgccaaatcagacgtattctcctcctgttttttcttcgatgcatggaaacaacgagtggagagtggagactagagaatttatatcacggggagactggagagaccaccgccatgcatgcatgctcaaaactagtggagcttgaccggtgttaagtcttctcacgagttatcatccgagatgtttgccaaagcgaattttgaagtgtgctcggtgttttttttttcttcttgaaagcgatatctgagaaaagaatagtatttgactataactgtgatctctcgatgcttcctaacttagattcagatagcctttaattcactgaggagtttgataaagctagtgttcagatctctcgtaaaatttcttatcctttgtcttgataggctcgtgattgccaatcccgtctaacccgtcaatgttcttataccaagaaaagaccaactgaagatatgttaactgatatttgattttttccgaggccagattcaggtagcctttaattcgctgaggagtttgataaagctagcgttcagatctctcgtaaaatttcttatcctttgtcttgataggctcgtgattgccaatcccgtctaacccgtctatgttcttagaccaaaaacatatcaactgaagatatggtaactgatatttggccttggagagacataaagagccatttcaatcaagttttctaccgtcaataaagcagatcggaaaatatttctagctcatgagttgcacagcctacccgtgcatcattacgaaatggctcgaaaacaaactccgattattttcccttttgtagtgagttgcgaccgtcccaggacagcacagctgaaaactagatcagaaaaacctcgcagtaactgaaataaacgaccgtttggctaacacacacccaccgtagtattaataaacggggagagactgagagagaggagagagagagagagagtggaggcgttaccgtagtgaggatgacctcgagcttgcggtgcggaggccatgggcggagaagagaaaggggctggcggcgagactctggcgttgcaggcggagggcggcggccatgccgacagtgtgttccgcacaccagcggtcgctccctccctcggacgtcgctgcgcagtcaccacggctcgtcgttgcggatccaacggtagcccaaccaaagtcacgtgacagaccagtttgggcggcccattccagcccacagcggagcgcccaaaaactgcggcatccgttcatgcatgatgcatctatgagtacgcgttttgtacgtgaatcactacatggtatatgcacgtctttgcatccaaacatcgagccatcgagggctgtgtttacccgaggtcaaatctttaataacttttaactatgtgtagtagtacttgtttggagtttcttggtttggacaaatctgatgacttgtttggatccatgaactgaaatatcgttattttcacttaattattagattaccttttaatcccgcctaatttattagaaccaaatagtctttttttcccatcctatacatctacttggattcacatacctagttactatctgatctaagatcattatttgtcggaaagtaactaacctacatcgttattaagctttatcctcatataaccccagaaacaaatttactctttactgggccgtgtctgctagatagtctacttcctgcacgcgctcactagctatgcacctcaagtcttctgtgtcgtgtcgtgtgtgtcggagtggccagccgacaatcgttaccgacctggcacaggttttcttcacgatgaaacgacggctgaacgagccgaaacaaatgaaactttaggcagttccctcccaggcacccgccacacaactcgcgcccacggcatctgaccggcgtcaaaacccaccggcccagcccaatccaacccgtctgcagaaaccgtcggctcagacgcgccttccaggtacgtccagtcgcaaccctataaaaaaaggcagagcagagatcccagagcaaactcacacaccaacacatccaaggaacacgaacaacgagaggaaccaaagatgagtgtggagatcctggacgggagcacggtgcggagcttcgtggaggacgagcgcgccttcaactcctcggtggacggccgcttcgccgcgctggacgccgacccgacggcctgctcacctacgccgagatggccggggagctcatgagcctgcgcgtgctggagaggcacttcggcgtggacgaggccgctgtggcgccggaggagctcggggcgctctaccacggcctgttcgcgcggttcgacagggacggcagcggcaaggtggaccgacacgagttccgcgcggagatgaaggaggtgatgctcgccgtggccaacggcctcggcttcctccccgtgcagatggtcgtcgaggaaggcagcttcctcaaggtcgtcgtcgacagggagctcggccagctcgccaaagctgcgtaaatgaagctcactcacgcgcgcgaaatactaccagtatatacactattcgagagagagcgaggaaatttcgaacataaaatatatggagaataaattatactatataaaatttcttgtatcggtgagtaaattggaatatattcata

SEQ ID NO: 3294 - DNA, 2685 bp, Zea Mays
tcataaaccccctccttgatcacctttcctaaccgctaaacttattagatccaccctcaccaaccagccgcctgacgttcgagccgcaccggccctaaacccttccacctccagccgccataactgtaatcccttccaccatcagctgtccctccgttcgagccgtcgacgccctaaccctatcaccttctggccgcccaaatccctttcggctcctgccgccctctgtttaaggcgcagaccatggagtcgtcggttatggcggcacagaccatggagtcacaggctatgatggcgcaggtcttagtctttaggccatggagtcgcagtcaggcgttcaagatgctctgagacttgtgtcaggttcttccaacatgcatgatggattcagtacaccaaaaaaattaatatccttctgacatcgctgtccatctgtgtacttgattgtgatgataaattgaagccagtaattggaacgtcatttggttctctagaggaggtggaagaattgtacaagatatatgctcttgagaattttattggctgcaacattccagaacatatcgaaatccatccaccatccgatgttcactcccagtaaaaacatcaagaaatccaaagaactatttaaatcgtgtaaagggaaaaatagtaaagtgagacgaaggtagtcaaacagtcatattgctaaagtattacaggtatgagaaagaatccaacaacatgttgaggagcttctacagtgttattggcatgggaattttgttagcttctatagtgctattggtatgttgaggagcttcaaccaggtatggaatttttaactctagcgagagtttttagttgtcacacactaatggctgaattggggaaagtagtaactgaaaatgagagtaaccagcatcaacaatagattgctttcaaaattcaggaggatagatccttgttttgtacaacatttttttaagtataagagttttaaaatagaacatagcagcatgaaaggcttattttttccagaacatagtttaatagacttaataagtttaaacgacccataattctggtgctctattctgtaagtataagagttttaaagtagaacatagcagcatgaaaggcttatttttttccagaacatagtttaatagacttaataagttcaaatgacccataattctggtgttctattctgtcttttatctgttgggtcattaaaatctatagactttagcgtcctatcttgtcatgtgttagtgacgtatgaaatcatttggagtcgatgggaagattaatagccaaaaatgttagaagatcatgcttgtttagacctctatgttgtacggaccagcaggtttgaaatgatgttgtcactgatccttgttctcaactgttgtattaagcaagtactaccatggggaagtggggtgggactagtccaaatgttgtagttactagagttagcaagcagaggaattggtaatggtgatgcattctcaacttcttatgtgtgcttgtcgttcgatcgtccatcagtttttagacgtacaaaacatatcaccgcattgacgtccatggctgcgagtacagtacagtggtcggccggttccaagtttacaaacagcaagcagtactagtgagtaggtgacattagcagtacaagccctgaaacctgcaactaagcacgatagagagtaggggtggagctcaggctcgtccatctcggttaggtggaaatggccggcatatgtgtttctttcatgctttactgcatcctgtatttttattttgttgcactggcacgaccgcctggcactggcactggcaccccgcgtactgatctgatgctgtaatagcacgtagcatgcgttcagattagttaggatagggagctgagctcgctgccaacaaggtcaatactagcatccatttttttgcaaactaggacacaatcaggtgaaaagcttgagctgcattctttgtctatttaactttattagttctgtttgtttcgtggtatgctgttatttacatgtaagccctagagattcttttattgatgttaaacaattacttttggatgctcctgaaacatgcttctatgcatgatacaatttgatattgcatactgaagtcagctcatcagttagaagactacaatgaaatatctgaaatagcagatataacttctagtggatgttcactggagatggttgctacaacatacaatgagaggtctattaggtcacatctctgacgtgtgaaggggctactatctctgtctagtctttatgtttccctgtcaacgtccttagctctgcttcaggagtctgctcaaggaaaattagcaggacttatatatgtgatctctgttcactgatgtggctggagcgtcatgtcaactgctcaccctccccctaacaaattaaactacacggatgagtggagcttcatgttggatgatccatgcaccttttaagttttggaacgtcgtactcaaatgtagcttgtgttggttgaacctattgtactttcttttggatttaaattatatgatatttaaacattttttatgtttaatacttgtgttggatgctttatgcttcaaataatcatcacaattcgtttgatgtttaatacttgtgttggatgctttatggttcaaatattcgtcacaattcgttt

SEQ ID NO: 3295 - DNA, 1360 bp, Zea Mays
tcataaaccccctccttgatcacctttcctaaccgctaaacttattagatccaccctcaccaaccagccgcctgacgttcgagccgcaccggccctaaacccttccacctccagccgccataactgtaatcccttccaccatcagctgtccctccgttcgagccgtcgacgccctaaccctatcaccttctggccgcccaaatccctttcggctcctgccgccctctgtttaaggcgcagaccatggagtcgtcggttatggcggcacagaccatggagtcacaggctatgatggcgcaggtcttagtctttaggccatggagtcgcagtcaggcgttcaagatgctctgagacttgtgtcaggttcttccaacatgcatgatggattcagtacaccaaaaaaattaatatccttctgacatcgctgtccatctgtgtacttgattgtgatgataaattgaagccagtaattggaacgtcatttggttctctagaggaggtggaagaattgtacaagatatatgctcttgagaattttattggctgcaacattccagaacatatcgaaatccatccaccatccgatgttcactcccagtaaaaacatcaagaaatccaaagaactatttaaatcgtgtaaagggaaaaatagtaaagtgagacgaaggtagtcaaacagtcatattgctaaagtattacaggtatgagaaagaatccaacaacatgttgaggagcttctacagtgttattggcatgggaattttgttagcttctatagtgctattggtatgttgaggagcttcaaccagtcagctcatcagttagaagactacaatgaaatatctgaaatagcagatataacttctagtggatgttcactggagatggttgctacaacatacaatgagaggtctattaggtcacatctctgacgtgtgaaggggctactatctctgtctagtctttatgtttccctgtcaacgtccttagctctgcttcaggagtctgctcaaggaaaattagcaggacttatatatgtgatctctgttcactgatgtggctggagcgtcatgtcaactgctcaccctccccctaacaaattaaactacacggatgagtggagcttcatgttggatgatccatgcaccttttaagttttggaacgtcgtactcaaatgtagcttgtgttggttgaacctattgtactttcttttggatttaaattatatgatatttaaacattttttatgtttaatacttgtgttggatgctttatgcttcaaataatcatcacaattcgtttgatgtttaatacttgtgttggatgctttatggttcaaatattcgtcacaattcgttt

SEQ ID NO: 3296 - DNA, 2624 bp, Zea Mays
tcataaaccccctccttgatcacctttcctaaccgctaaacttattagatccaccctcaccaaccagccgcctgacgttcgagccgcaccggccctaaacccttccacctccagccgccataactgtaatcccttccaccatcagctgtccctccgttcgagccgtcgacgccctaaccctatcaccttctggccgcccaaatccctttcggctcctgccgccctctgtttaaggcgcagaccatggagtcgtcggttatggcggcacagaccatggagtcacaggctatgatggcgcaggtcttagtctttaggccatggagtcgcagtcaggcgttcaagatgctctgagacttgtgtcagctgtccatctgtgtacttgattgtgatgataaattgaagccagtaattggaacgtcatttggttctctagaggaggtggaagaattgtacaagatatatgctcttgagaattttattggctgcaacattccagaacatatcgaaatccatccaccatccgatgttcactcccagtaaaaacatcaagaaatccaaagaactatttaaatcgtgtaaagggaaaaatagtaaagtgagacgaaggtagtcaaacagtcatattgctaaagtattacaggtatgagaaagaatccaacaacatgttgaggagcttctacagtgttattggcatgggaattttgttagcttctatagtgctattggtatgttgaggagcttcaaccaggtatggaatttttaactctagcgagagtttttagttgtcacacactaatggctgaattggggaaagtagtaactgaaaatgagagtaaccagcatcaacaatagattgctttcaaaattcaggaggatagatccttgttttgtacaacatttttttaagtataagagttttaaaatagaacatagcagcatgaaaggcttattttttccagaacatagtttaatagacttaataagtttaaacgacccataattctggtgctctattctgtaagtataagagttttaaagtagaacatagcagcatgaaaggcttatttttttccagaacatagtttaatagacttaataagttcaaatgacccataattctggtgttctattctgtcttttatctgttgggtcattaaaatctatagactttagcgtcctatcttgtcatgtgttagtgacgtatgaaatcatttggagtcgatgggaagattaatagccaaaaatgttagaagatcatgcttgtttagacctctatgttgtacggaccagcaggtttgaaatgatgttgtcactgatccttgttctcaactgttgtattaagcaagtactaccatggggaagtggggtgggactagtccaaatgttgtagttactagagttagcaagcagaggaattggtaatggtgatgcattctcaacttcttatgtgtgcttgtcgttcgatcgtccatcagtttttagacgtacaaaacatatcaccgcattgacgtccatggctgcgagtacagtacagtggtcggccggttccaagtttacaaacagcaagcagtactagtgagtaggtgacattagcagtacaagccctgaaacctgcaactaagcacgatagagagtaggggtggagctcaggctcgtccatctcggttaggtggaaatggccggcatatgtgtttctttcatgctttactgcatcctgtatttttattttgttgcactggcacgaccgcctggcactggcactggcaccccgcgtactgatctgatgctgtaatagcacgtagcatgcgttcagattagttaggatagggagctgagctcgctgccaacaaggtcaatactagcatccatttttttgcaaactaggacacaatcaggtgaaaagcttgagctgcattctttgtctatttaactttattagttctgtttgtttcgtggtatgctgttatttacatgtaagccctagagattcttttattgatgttaaacaattacttttggatgctcctgaaacatgcttctatgcatgatacaatttgatattgcatactgaagtcagctcatcagttagaagactacaatgaaatatctgaaatagcagatataacttctagtggatgttcactggagatggttgctacaacatacaatgagaggtctattaggtcacatctctgacgtgtgaaggggctactatctctgtctagtctttatgtttccctgtcaacgtccttagctctgcttcaggagtctgctcaaggaaaattagcaggacttatatatgtgatctctgttcactgatgtggctggagcgtcatgtcaactgctcaccctccccctaacaaattaaactacacggatgagtggagcttcatgttggatgatccatgcaccttttaagttttggaacgtcgtactcaaatgtagcttgtgttggttgaacctattgtactttcttttggatttaaattatatgatatttaaacattttttatgtttaatacttgtgttggatgctttatgcttcaaataatcatcacaattcgtttgatgtttaatacttgtgttggatgctttatggttcaaatattcgtcacaattcgttt

SEQ ID NO: 3297 - DNA, 3447 bp, Zea Mays
cggggagggggacaaatgtgactcgtgatttgtctaatgatcagacactcgtctccttatatctccacagcattcatctttctctccatgttggattgttcgcggccgccggtcctgctcctgtcctctccacgtcgccaatcacttcaccctctcaagtctcatctcccttgccaccatggctacgcttctctccccccctgcccacgctgccgttgctcatctaatcctctcctcccagtcccaaaccatagcctcctgccaaagctgccatagttgaagttgcccacatgtgccactttggtcatcgtcgtctagttggatacattcgaggcgacgacacacatgtgatagagctcgaatagttacgactgggcattgggctcgccggaagccatggatatggttcttcccgtcgtcaccgaagaagctgcatgagtgcgggagcaaagtgcggtgcgctttacaactgcgtggcactaataaaacgcgcgcatacacggcttctcagtttcagactccagactgaaaaattcccccgctgtttgtgcctgagacgcagcgcgtgctcactagctagcgtgtcactgagcgccgggcccgtcctcggtgcgccaccttccctttccgctttccccgcgtttccatttcgtttcagtcagtggctcagtgcgcgactgaaggctgccgcaacaccattaaaccaccaaactgcttctcctccagtctccgcttcccgtgcgccgcgggaacaaggttctggaagcttcggagatggggaggagtagacgccacgaaggaggaggaggaggagaacgacggggtgcgggtgctggaggggtggccgccgccgccttcgccgctctgctgctgggctgcgtcgtcatggccctcgtcggcggcgccgccgcgcagggcccccggctcccctccgactacaaaaccctcagcggcgccgctccgctcgtggtggccagaggcgggttctcaggagcgttcccggactccagcgagggcgcctactccttcggggcgtccgccagcgcgcctggcacggccatgtggtgcgacgtccagctgaccaaggacggcgtcgggctctgcctccgcgacgtcaacatgaagaactgcaccaccgtcgaccagacgtaccccgggaggaagcggacctacgtcatcgacggcgtccacaagaccggctggttcgtcccggacttcaccagcgccgagcttcttcagtccgtgtacctaacacaagcaatctggtctcgcactgagaggatggacggcatataccctatcgtcactgtccctgacgttcagtccatcgtcaacacgtctcctatctggctgaatgtccagcatcccatcttctacaaacaacgcgatctggacatgagcagctacatacactcgatccggaagctggtgcgcatggactacatctcgtcgcctgagatcggcttcctcagaaacatatccgcaagagtccgccgcagaaccaagctcgtgttcagctttctcgacaaaaaactcctggatcactccgtgaaccagacatacggttcgctggcgaggaacctgacgttcgtcaggtccgtcgcgtctggcatactggtcccgaaggactacatctggccggtgacggccgataactacctgctgccgtccacgtcgatcgtcaccgaagcgcacgaagcggggctggagatatacgcctctggttttgtgaacgataaggctgtcccctttaactacagctacgatcctctggcggagtacctgaacttcgtcggcgatggtggcttctcggttgatggcgtactgtcggactaccctattactgcatcagaggcaattggttgttttgctaacctgaattcaagtaagactgatcatgttacagggaaacccttagttatctcccacaatggcgctagtggagactacccggactgtacagacctggcctaccacagtgccgttgacgatggcgcagatgtcatcgactgtcctgttcaagtgacaagcgatggagtcctcatgtgcatgagttccattaacctgcttgacaccaccaataatgctgcgttcatagcaaagtcactagggatcgacatggttgactccgtaaccgccgccttaagtgccgccggcttcagtaaccagaccaccaaggaagttctgatccggtcaacagacagcgccgtcctcgtcaaactgaagcagcagaaaacgagatgcaagctcgtgtacaccctccccctaggcatcggggacgcttccaaaccctcgctgaaggacatcaaggcgttcgcggaagccgtagtcgtcgacaggacctccgtcttcgctctgagctacgatttcatcatgggacagaacaggatcgtgcgagacctgcaggcggcggggctggctgtgtacgcgcaggtgttccggaacgagtacgtagcgcacccgtttgatttcttgggggatccgaccgtggagatcaactactatgttcagacgtttaatctgtccggcatgatcactgatttccccaagacagtcagaagatacaaagagaacacctgtacagctctggggaaggatatgcccaagtacatgcggccagttgaggctggctcccttgcagatttcctccggtccttccaaacccagccgccgtctgtggcaccgatgccggcgctgaactcttcaagcgtggaggagccgcctcttccaactgctgcgccgagaaacgtgccgcctggtggtggcgccccagcggacgccgccgggactgctggcggcgctgctccttctgatgcgagttccggcggcgctcctccttctgacgcgcgtcacacggctaccggaagtagcggtatgctgcttgtggtgctggtttccgcggctctgctgatctgattctgagcagacacatgagactgtatagtagacagagccgaagcaaatgcaaatctccgttggattcgatcaagctttgaccagcgatataccatacacttgtttttctcgggtatatatgtttgtatttggccgcatttttcacgtccacatgtgtaaaaaattgtcagtggaaacgttatatgtatcagccggaaattttatccggcgatgatcaaagttctgacaaggattaagcgatcaccacaaactcccaataatatggtgttatgtaactgtgaatgatttactctttattgttatatttatatctccacgctaaaaatctttactacttattaaggctgcaatagtagtctgccaccattccatgttctacaattctcatgtcttgttctgcctttctgattccctcctccccgcgcacagtccatttcccatgttatgccaccattttatatctatcattttcattctccctccccgcaaagctcattcccatttccattcccccgtacagtcgacgtctag

SEQ ID NO: 3298 - DNA, 3195 bp, Zea Mays
ttcgcggccgccggtcctgctcctgtcctctccacgtcgccaatcacttcaccctctcaagtctcatctcccttgccaccatggctacgcttctctccccccctgcccacgctgccgttgctcatctaatcctctcctcccagtcccaaaccatagcctcctgccaaagctgccatagttgaagttgcccacatgtgccactttggtcatcgtcgtctagttggatacattcgaggcgacgacacacatgtgatagagctcgaatagttacgactgggcattgggctcgccggaagccatggatatggttcttcccgtcgtcaccgaagaagcgtaaattacaggaccccaaacgaccccaaaacggtaacacaacgaccagttctattaggtagcttatcaattttctttccaccagtgcatgagtgcgggagcaaagtgcggtgcgctttacaactgcgtggcactaataaaacgcgcgcatacacggcttctcagtttcagactccagactgaaaaattcccccgctgtttgtgcctgagacgcagcgcgtgctcactagctagcgtgtcactgagcgccgggcccgtcctcgtctccgcttcccgtgcgccgcgggaacaaggttctggaagcttcggagatggggaggagtagacgccacgaaggaggaggaggaggagaacgacggggtgcgggtgctggaggggtggccgccgccgccttcgccgctctgctgctgggctgcgtcgtcatggccctcgtcggcggcgccgccgcgcagggcccccggctcccctccgactacaaaaccctcagcggcgccgctccgctcgtggtggccagaggcgggttctcaggagcgttcccggactccagcgagggcgcctactccttcggggcgtccgccagcgcgcctggcacggccatgtggtgcgacgtccagctgaccaaggacggcgtcgggctctgcctccgcgacgtcaacatgaagaactgcaccaccgtcgaccagacgtaccccgggaggaagcggacctacgtcatcgacggcgtccacaagaccggctggttcgtcccggacttcaccagcgccgagcttcttcagtccgtgtacctaacacaagcaatctggtctcgcactgagaggatggacggcatataccctatcgtcactgtccctgacgttcagtccatcgtcaacacgtctcctatctggctgaatgtccagcatcccatcttctacaaacaacgcgatctggacatgagcagctacatacactcgatccggaagctggtgcgcatggactacatctcgtcgcctgagatcggcttcctcagaaacatatccgcaagagtccgccgcagaaccaagctcgtgttcagctttctcgacaaaaaactcctggatcactccgtgaaccagacatacggttcgctggcgaggaacctgacgttcgtcaggtccgtcgcgtctggcatactggtcccgaaggactacatctggccggtgacggccgataactacctgctgccgtccacgtcgatcgtcaccgaagcgcacgaagcggggctggagatatacgcctctggttttgtgaacgataaggctgtcccctttaactacagctacgatcctctggcggagtacctgaacttcgtcggcgatggtggcttctcggttgatggcgtactgtcggactaccctattactgcatcagaggcaattggttgttttgctaacctgaattcaagtaagactgatcatgttacagggaaacccttagttatctcccacaatggcgctagtggagactacccggactgtacagacctggcctaccacagtgccgttgacgatggcgcagatgtcatcgactgtcctgttcaagtgacaagcgatggagtcctcatgtgcatgagttccattaacctgcttgacaccaccaataatgctgcgttcatagcaaagtcactagggatcgacatggttgactccgtaaccgccgccttaagtgccgccggcttcagtaaccagaccaccaaggaagttctgatccggtcaacagacagcgccgtcctcgtcaaactgaagcagcagaaaacgagatgcaagctcgtgtacaccctccccctaggcatcggggacgcttccaaaccctcgctgaaggacatcaaggcgttcgcggaagccgtagtcgtcgacaggacctccgtcttcgctctgagctacgatttcatcatgggacagaacaggatcgtgcgagacctgcaggcggcggggctggctgtgtacgcgcaggtgttccggaacgaagaacacctgtacagctctggggaaggatatgcccaagtacatgcggccagttgaggctggctcccttgcagatttcctccggtccttccaaacccagccgccgtctgtggcaccgatgccggcgctgaactcttcaagcgtggaggagccgcctcttccaactgctgcgccgagaaacgtgccgcctggtggtggcgccccagcggacgccgccgggactgctggcggcgctgctccttctgatgcgagttccggcggcgctcctccttctgacgcgcgtcacacggctaccggaagtagcggtatgctgcttgtggtgctggtttccgcggctctgctgatctgattctgagcagacacatgagactgtatagtagacagagccgaagcaaatgcaaatctccgttggattcgatcaagctttgaccagcgatataccatacacttgtttttctcgggtatatatgtttgtatttggccgcatttttcacgtccacatgtgtaaaaaattgtcagtggaaacgttatatgtatcagccggaaattttatccggcgatgatcaaagttctgacaaggattaagcgatcaccacaaactcccaataatatggtgttatgtaactgtgaatgatttactctttattgttatatttatatctccacgctaaaaatctttactacttattaaggctgcaatagtagtctgccaccattccatgttctacaattctcatgtcttgttctgcctttctgattccctcctccccgcgcacagtccatttcccatgttatgccaccattttatatctatcattttcattctccctccccgcaaagctcattcccatttccattcccccgtacagtcgacgtctag

SEQ ID NO: 3299 - DNA, 2963 bp, Zea Mays
cgctgtttgtgcctgagacgcagcgcgtgctcactagctagcgtgtcactgagcgccgggcccgtcctcggtgcgccaccttccctttccgctttccccgcgtttccatttcgtttcagtcagtggctcagtgcgcgactgaaggctgccgcaacaccattaaaccaccaaactgcttctcctccagtctccgcttcccgtgcgccgcgggaacaaggttctggaagcttcggagatggggaggagtagacgccacgaaggaggaggaggaggagaacgacggggtgcgggtgctggaggggtggccgccgccgccttcgccgctctgctgctgggctgcgtcgtcatggccctcgtcggcggcgccgccgcgcagggcccccggctcccctccgactacaaaaccctcagcggcgccgctccgctcgtggtggccagaggcgggttctcaggagcgttcccggactccagcgagggcgcctactccttcggggcgtccgccagcgcgcctggcacggccatgtggtgcgacgtccagctgaccaaggacggcgtcgggctctgcctccgcgacgtcaacatgaagaactgcaccaccgtcgaccagacgtaccccgggaggaagcggacctacgtcatcgacggcgtccacaagaccggctggttcgtcccggacttcaccagcgccgagcttcttcagtccgtgtacctaacacaagcaatctggtctcgcactgagaggatggacggcatataccctatcgtcactgtccctgacgttcagtccatcgtcaacacgtctcctatctggctgaatgtccagctacatacactcgatccggaagctggtgcgcatggactacatctcgtcgcctgagatcggcttcctcagaaacatatccgcaagagtccgccgcagaaccaagctcgtgttcagctttctcgacaaaaaactcctggatcactccgtgaaccagacatacggttcgctggcgaggaacctgacgttcgtcaggtccgtcgcgtctggcatactggtcccgaaggactacatctggccggtgacggccgataactacctgctgccgtccacgtcgatcgtcaccgaagcgcacgaagcggggctggagatatacgcctctggttttgtgaacgataaggctgtcccctttaactacagctacgatcctctggcggagtacctgaacttcgtcggcgatggtggcttctcggttgatggcgtactgtcggactaccctattactgcatcagaggcaattggttgttttgctaacctgaattcaagtaagactgatcatgttacagggaaacccttagttatctcccacaatggcgctagtggagactacccggactgtacagacctggcctaccacagtgccgttgacgatggcgcagatgtcatcgactgtcctgttcaagtgacaagcgatggagtcctcatgtgcatgagttccattaacctgcttgacaccaccaatgttcagagaacacctttcgccactccttccctggttccatctatcttaataaatgtaattctttcatcactgatcaatctatcttctctaccgcagaatgctgcgttcatagcaaagtcactagggatcgacatggttgactccgtaaccgccgccttaagtgccgccggcttcagtaaccagaccaccaaggaagttctgatccggtcaacagacagcgccgtcctcgtcaaactgaagcagcagaaaacgagatgcaagctcgtgtacaccctccccctaggcatcggggacgcttccaaaccctcgctgaaggacatcaaggcgttcgcggaagccgtagtcgtcgacaggacctccgtcttcgctctgagctacgatttcatcatgggacagaacaggatcgtgcgagacctgcaggcggcggggctggctgtgtacgcgcaggtgttccggaacgagtacgtagcgcacccgtttgatttcttgggggatccgaccgtggagatcaactactatgttcagacgtttaatctgtccggcatgatcactgatttccccaagacagtcagaagatacaaagagaacacctgtacagctctggggaaggatatgcccaagtacatgcggccagttgaggctggctcccttgcagatttcctccggtccttccaaacccagccgccgtctgtggcaccgatgccggcgctgaactcttcaagcgtggaggagccgcctcttccaactgctgcgccgagaaacgtgccgcctggtggtggcgccccagcggacgccgccgggactgctggcggcgctgctccttctgatgcgagttccggcggcgctcctccttctgacgcgcgtcacacggctaccggaagtagcggtatgctgcttgtggtgctggtttccgcggctctgctgatctgattctgagcagacacatgagactgtatagtagacagagccgaagcaaatgcaaatctccgttggattcgatcaagctttgaccagcgatataccatacacttgtttttctcgggtatatatgtttgtatttggccgcatttttcacgtccacatgtgtaaaaaattgtcagtggaaacgttatatgtatcagccggaaattttatccggcgatgatcaaagttctgacaaggattaagcgatcaccacaaactcccaataatatggtgttatgtaactgtgaatgatttactctttattgttatatttatatctccacgctaaaaatctttactacttattaaggctgcaatagtagtctgccaccattccatgttctacaattctcatgtcttgttctgcctttctgattccctcctccccgcgcacagtccatttcccatgttatgccaccattttatatctatcattttcattctccctccccgcaaagctcattcccatttccattcccccgtacagtcgacgtctag

SEQ ID NO: 3300 - DNA, 2257 bp, Zea Mays
ccatgtcccgcctcggtcgtccagcggatgccagtcatcccaccccaactacaacgtgacgattccaccggcggcctccggccgcctcggcgagatcgccgacgtctccctcgttgcaggggagaagacgaggagtgagggtcagggacagagcatgtggaccgtccatagtacaacgacttgacacgacaaccgtccgatccgaccaaccaaacacaccggctactttccccgccgcgatctgggcatgcccagtgtccctcgcggcgacacccctcgatctgcgcgagagtgcgagaccacagcggctcgccggcggcgatgatggctggcagagctcatggccacagaaaccgcctccgccgcctcatcccgcggctcctcctcctcctcgtcgccgtctacgccgcctccttcgcgatctacctcctcctccagtcccattcccaccaccagtcgccgccggaccccacccccaggactgaagcccgtgacggtgtcctggcgccgtcgtcctcgcagaagccgtggccgcgcctcccctccttcctgccctgggtgtccagcgccgtgccgccgccgccgctgcacacctgcgaggcctacttcggcaacggcttctcccgccgcgtggacgtcctgcccgcgggccgcggcagcggcggcggcggctggttccggtgccaccacagcgagacgctgggaagctcgatctgcgagggcgccagggttcggcttgacccggcgctcatcgcgatgtcgcgcggcggggagccgctggagcaggtgatgggccgcgccgaggaggaggagctacccaagtacgagcccggcgcgctgcaggtggaggggccggcggcgggtatgccggtgcccctggtggacgcagggttcctcaacgactacgtacccaccggcgggatcgggatgcacactatgagggcgctgctcgagtcgacgcgcgttgtgccacccgtgggttgaagaaccgacacttctggtcactcgtttcgaatatgcgaaccttttccacacaattacggactggtacagtgcatatgttagttccagagtcacgaatttaccaaaccgtcctaatgttgtattcttggatggccattgcaaggcacaattagaggaaacatgggaagcacttttctcaagtgtgacatatgctaagaacttcactgttcctgtttgtttccgacatgccattctttcaccattgggctatgagactgccatgtttaagggtcttagcgagagcttcagctgtgaaggtgcctccgtagattcactccgagaaaaaccagactatgaaaaaactgcacggttatctgaattcggggaaatgattgtagcttcttttgatcttctgcaggatgacatcatgtcatccaaaaaatcgaatggactcaatgttctctttgttcgacgagaagactacctggcccacccgcgccacagtggtaaggttgaatcgagactaagcaatgagcaggaggtgtatgatgcaattgacaagtgggcacaaggcctgaaatgcaaagtgaatgtcgcgaacggtctttttgcccacatgaccatgaaggagcaactccgtgctatcctggaagcttcagtggtaataggggctcatggggctggtctaacacacttggtttcagcaactcctgatacaaaggttcttgagattatcagcagcatgtaccggcgcccacattttgcacttatctcacactggaagtctttagagtaccatgccataaatctccctggatcatttgcaagggtcacagatgtcatcaacgagttgagaaaaatactggaaggtctcggatgctgaaacagaaatactcttcaaggccaccacaggccatgtagaatggacatcgtgtctacttcatcacccatacttggtcacaccagttgcaaggggtcatatggattttaattcgaagacattttcacaggctattcaacattgtgccaagaaaccaatcattctcattttccagcaaagaattttattatgctgccaaatacagaaagtcaagaaagcaatcctctgtttggtttatgtcagcaaatgataacacgtaatccagagctttaggttgtccacccttattcttggacatgattttaggaccagaattttgacaaaactgtattctttgttggattatagattagtataccttttgtgtgttacatgttgatcatctccactgtacccattgtcttctatttcttt

SEQ ID NO: 3301 - DNA, 1984 bp, Zea Mays
ctcttccccaatctctctgtcggaaaccgagtcctcttccaccgcacgccaccggccaccgcgtcccctccaacggccaccccgccccctcgctccggcccctccaccggccaccgggcggcccgccccctcgccccggcccctccaccggccgccgcgcgcccgcgcagctccggcggcgcgcgcccccctcggcccggcagcgctaccaccgcgcctcggccccgccgcctccaccgcgcctcggccccgccaccgccctcggactgtagtttgagataagctagcaatttttttaggacctcaagccgccatctcgccacatgacctgattgcagccttgcaggcacagcacagaagcagggttgcgccacctctctgagtgtcataggttggtgcataggcacacacacacaggtagccatggcatcgcgtaagcttctcgtgggcctcacagccaggaggcagctacaatcccgcactcagcaactattctgggccaccagtctccctgaagctaccacttctcggtccctaatggtggctgctgcaatggcgcggttatcggacaggtcttcagctccttttatcttatcttcaagggccatctcgtcgacgcagcctgtgatgcagtctacaggagatgtgtctggctctagcccatctgcagtggatcacaagttagcaatgcaagaggatgagtttcacaaattagcagatgagacgattcatgatttgcttgaaaaacttgaggagtatggtgactccattcagatggatggtttcgacatagagtacgggaatcaggttttgacattaaggcttggggatttggggacatatgttataaacaagcaaactccaaacaaacaaatttggctatcttctcctgtgagtgggccttctaggtttgattgggatgcaacagctaatggttggatatacaagaggactggagtgaaccttgtgcggcttctggagaaggagattggtgagctctgtggtactccagtagaactttagtaacagtactggaaatgccacacagctaggttgtatggagagcagtgctctgaatgtcgaagtgtagtacacaaaactttttttttgttctacacatttgcacatggtttggaataaataacttcccctctctggtagcggggaacagtattattcggaaatggtgggagtatttttcagcttttgtaagtaccgaattccgatcactgtcagcctgtcagactacattagtgtttctggatgcaatatcacattgcaagatgaccagatatcacactatattctgttgtgccaagcaacaaggatcaaatcacatcaatgctgaaacatcatgtatgcctcttcttccatcaggtcagggctcaatctgaccatgaggatgcagaactccatctgatccagtgccccgtcctcgtccaggtcgccttctttcatcatctccaggagctcatcatcctggagctggccaagcccgagcctggccgcgctctgcttcaagctccagatggtgatctttcctgccctgggctccatgagcagctggaaccccttgcagagctcctggatcaggccctccacgcccagcttcctcgccatcagtggcaggaagtcctgaaactgcacggaggagcccttgtcggattccatgctggagttatcccgcccgcgaagtcgtgatgaggattgaagatcagggcaatggttggcaaaagttatgcgtgcgtgggtaacgaaggaggctggtgtttatttatagcagcaggggaggaggaagttcttggaatcgggagcagttcgtttctgcgaagtagctggctggttgcttggacatgtctatctggcttcttccctttcttttttaccacataaagactcgttcggttagctctcaatccatatagattaagtgagattgagtatgtttaaattccaaacaagtcaaacttcttcttaatttttt

SEQ ID NO: 3302 - DNA, 2255 bp, Zea Mays
ctcttccccaatctctctgtcggaaaccgagtcctcttccaccgcacgccaccggccaccgcgtcccctccaacggccaccccgccccctcgctccggcccctccaccggccaccgggcggcccgccccctcgccccggcccctccaccggccgccgcgcgcccgcgcagctccggcggcgcgcgcccccctcggcccggcagcgctaccaccgcgcctcggccccgccgcctccaccgcgcctcggccccgccaccgccctcggactgtagtttgagataagctagcaatttttttaggccagtacgcatcacttctctgttttttttttctgctgaagtaatttgagataaatttgtgttttacctgaagcttctgagctctagactggtgcttccatttttagcacaagctagttatgttagcttctgtttctctaatgaaggtgctagcttccatttgatctgaacacgcctaactgagtgttacaggcttggcaactctgaatcggctataatgaacatgttcagttttagttccttctgccttgtgatgcagcaacttccacaggacctcaagccgccatctcgccacatgacctgattgcagccttgcaggcacagcacagaagcagggttgcgccacctctctgagtgtcataggttggtgcataggcacacacacacaggtagccatggcatcgcgtaagcttctcgtgggcctcacagccaggaggcagctacaatcccgcactcagcaactattctgggccaccagtctccctgaagctaccacttctcggtccctaatggtggctgctgcaatggcgcggttatcggacaggtcttcagctccttttatcttatcttcaagggccatctcgtcgacgcagcctgtgatgcagtctacaggagatgtgtctggctctagcccatctgcagtggatcacaagttagcaatgcaagaggatgagtttcacaaattagcagatgagacgattcatgatttgcttgaaaaacttgaggagtatggtgactccattcagatggatggtttcgacatagagtacgggaatcaggttttgacattaaggcttggggatttggggacatatgttataaacaagcaaactccaaacaaacaaatttggctatcttctcctgtgagtgggccttctaggtttgattgggatgcaacagctaatggttggatatacaagaggactggagtgaaccttgtgcggcttctggagaaggagattggtgagctctgtggtactccagtagaactttagtaacagtactggaaatgccacacagctaggttgtatggagagcagtgctctgaatgtcgaagtgtagtacacaaaactttttttttgttctacacatttgcacatggtttggaataaataacttcccctctctggtagcggggaacagtattattcggaaatggtgggagtatttttcagcttttgtaagtaccgaattccgatcactgtcagcctgtcagactacattagtgtttctggatgcaatatcacattgcaagatgaccagatatcacactatattctgttgtgccaagcaacaaggatcaaatcacatcaatgctgaaacatcatgtatgcctcttcttccatcaggtcagggctcaatctgaccatgaggatgcagaactccatctgatccagtgccccgtcctcgtccaggtcgccttctttcatcatctccaggagctcatcatcctggagctggccaagcccgagcctggccgcgctctgcttcaagctccagatggtgatctttcctgccctgggctccatgagcagctggaaccccttgcagagctcctggatcaggccctccacgcccagcttcctcgccatcagtggcaggaagtcctgaaactgcacggaggagcccttgtcggattccatgctggagttatcccgcccgcgaagtcgtgatgaggattgaagatcagggcaatggttggcaaaagttatgcgtgcgtgggtaacgaaggaggctggtgtttatttatagcagcaggggaggaggaagttcttggaatcgggagcagttcgtttctgcgaagtagctggctggttgcttggacatgtctatctggcttcttccctttcttttttaccacataaagactcgttcggttagctctcaatccatatagattaagtgagattgagtatgtttaaattccaaacaagtcaaacttcttcttaatttttt

SEQ ID NO: 3303 - DNA, 2000 bp, Zea Mays
ctcttccccaatctctctgtcggaaaccgagtcctcttccaccgcacgccaccggccaccgcgtcccctccaacggccaccccgccccctcgctccggcccctccaccggccaccgggcggcccgccccctcgccccggcccctccaccggccgccgcgcgcccgcgcagctccggcggcgcgcgcccccctcggcccggcagcgctaccaccgcgcctcggccccgccgcctccaccgcgcctcggccccgccaccgccctcggactgtagtttgagataagctagcaatttttttaggcagcaacttccacaggacctcaagccgccatctcgccacatgacctgattgcagccttgcaggcacagcacagaagcagggttgcgccacctctctgagtgtcataggttggtgcataggcacacacacacaggtagccatggcatcgcgtaagcttctcgtgggcctcacagccaggaggcagctacaatcccgcactcagcaactattctgggccaccagtctccctgaagctaccacttctcggtccctaatggtggctgctgcaatggcgcggttatcggacaggtcttcagctccttttatcttatcttcaagggccatctcgtcgacgcagcctgtgatgcagtctacaggagatgtgtctggctctagcccatctgcagtggatcacaagttagcaatgcaagaggatgagtttcacaaattagcagatgagacgattcatgatttgcttgaaaaacttgaggagtatggtgactccattcagatggatggtttcgacatagagtacgggaatcaggttttgacattaaggcttggggatttggggacatatgttataaacaagcaaactccaaacaaacaaatttggctatcttctcctgtgagtgggccttctaggtttgattgggatgcaacagctaatggttggatatacaagaggactggagtgaaccttgtgcggcttctggagaaggagattggtgagctctgtggtactccagtagaactttagtaacagtactggaaatgccacacagctaggttgtatggagagcagtgctctgaatgtcgaagtgtagtacacaaaactttttttttgttctacacatttgcacatggtttggaataaataacttcccctctctggtagcggggaacagtattattcggaaatggtgggagtatttttcagcttttgtaagtaccgaattccgatcactgtcagcctgtcagactacattagtgtttctggatgcaatatcacattgcaagatgaccagatatcacactatattctgttgtgccaagcaacaaggatcaaatcacatcaatgctgaaacatcatgtatgcctcttcttccatcaggtcagggctcaatctgaccatgaggatgcagaactccatctgatccagtgccccgtcctcgtccaggtcgccttctttcatcatctccaggagctcatcatcctggagctggccaagcccgagcctggccgcgctctgcttcaagctccagatggtgatctttcctgccctgggctccatgagcagctggaaccccttgcagagctcctggatcaggccctccacgcccagcttcctcgccatcagtggcaggaagtcctgaaactgcacggaggagcccttgtcggattccatgctggagttatcccgcccgcgaagtcgtgatgaggattgaagatcagggcaatggttggcaaaagttatgcgtgcgtgggtaacgaaggaggctggtgtttatttatagcagcaggggaggaggaagttcttggaatcgggagcagttcgtttctgcgaagtagctggctggttgcttggacatgtctatctggcttcttccctttcttttttaccacataaagactcgttcggttagctctcaatccatatagattaagtgagattgagtatgtttaaattccaaacaagtcaaacttcttcttaatttttt

SEQ ID NO: 3304 - DNA, 2069 bp, Zea Mays
ctcttccccaatctctctgtcggaaaccgagtcctcttccaccgcacgccaccggccaccgcgtcccctccaacggccaccccgccccctcgctccggcccctccaccggccaccgggcggcccgccccctcgccccggcccctccaccggccgccgcgcgcccgcgcagctccggcggcgcgcgcccccctcggcccggcagcgctaccaccgcgcctcggccccgccgcctccaccgcgcctcggccccgccaccgccctcggactgtagtttgagataagctagcaatttttttaggccagtacgcatcacttctctgttttttttttctgctgaagtaatttgagataaatttgtgttttacctgaagcttctgagctctagactggtgcttccatttttagcacaagctagttatgttagcttctgtttctctaatgaaggtgctagcttccatttgatctgaacacgcctaactgagtggcaagtcttccttgtcaattatgttacccagtcagtaggtttcccttgtggcatgtttaactttttaataaaaaaacaatctgacatgttattgctcagttacaggcttggcaactctgaatcggctataatgaacatgttcagttttagttccttctgccttgtgatgtaaaccacagtacagtactttcttgcattcaattgtaattttctaatagttcctctgatctcgtgttgaactttctgtgttgttatttatcctgatataggcagcaacttccacaggacctcaagccgccatctcgccacatgacctgattgcagccttgcaggcacagcacagaagcagggttgcgccacctctctgagtgtcataggttggtgcataggcacacacacacaggtagccatggcatcgcgtaagcttctcgtgggcctcacagccaggaggcagctacaatcccgcactcagcaactattctgggccaccagtctccctgaagctaccacttctcggtccctaatggtggctgctgcaatggcgcggttatcggacaggtcttcagctccttttatcttatcttcaagggccatctcgtcgacgcagcctgtgatgcagtctacaggagatgtgtctggctctagcccatctgcagtggatcacaagttagcaatgcaagaggatgagtttcacaaattagcagatgagacgattcatgatttgcttgaaaaacttgaggagtatggtgactccattcagatggatggtttcgacatagagtacgggaatcaggttttgacattaaggcttggggatttggggacatatgttataaacaagcaaactccaaacaaacaaatttggctatcttctcctgtgagtgggccttctaggtttgattgggatgcaacagctaatggttggatatacaagaggactggagtgaaccttgtgcggcttctggagaaggagattggtcagggctcaatctgaccatgaggatgcagaactccatctgatccagtgccccgtcctcgtccaggtcgccttctttcatcatctccaggagctcatcatcctggagctggccaagcccgagcctggccgcgctctgcttcaagctccagatggtgatctttcctgccctgggctccatgagcagctggaaccccttgcagagctcctggatcaggccctccacgcccagcttcctcgccatcagtggcaggaagtcctgaaactgcacggaggagcccttgtcggattccatgctggagttatcccgcccgcgaagtcgtgatgaggattgaagatcagggcaatggttggcaaaagttatgcgtgcgtgggtaacgaaggaggctggtgtttatttatagcagcaggggaggaggaagttcttggaatcgggagcagttcgtttctgcgaagtagctggctggttgcttggacatgtctatctggcttcttccctttcttttttaccacataaagactcgttcggttagctctcaatccatatagattaagtgagattgagtatgtttaaattccaaacaagtcaaacttcttcttaatttttt

SEQ ID NO: 3305 - DNA, 1980 bp, Zea Mays
tcggaaaccgagtcctcttccaccgcacgccaccggccaccgcgtcccctccaacggccaccccgccccctcgctccggcccctccaccggccaccgggcggcccgccccctcgccccggcccctccaccggccgccgcgcgcccgcgcagctccggcggcgcgcgcccccctcggcccggcagcgctaccaccgcgcctcggccccgccgcctccaccgcgcctcggccccgccaccgccctcggactgtagtttgagataagctagcaattttttaggcagcaacttccacaggacctcaagccgccatctcgccacatgacctgattgcagccttgcaggcacagcacagaagcagggttgcgccacctctctgagtgtcataggttggtgcataggcacacacacacaggtagccatggcatcgcgtaagcttctcgtgggcctcacagccaggaggcagctacaatcccgcactcagcaactattctgggccaccagtctccctgaagctaccacttctcggtccctaatggtggctgctgcaatggcgcggttatcggacaggtcttcagctccttttatcttatcttcaagggccatctcgtcgacgcagcctgtgatgcagtctacaggagatgtgtctggctctagcccatctgcagtggatcacaagttagcaatgcaagaggatgagtttcacaaattagcagatgagacgattcatgatttgcttgaaaaacttgaggagtatggtgactccattcagatggatggtttcgacatagagtacgggaatcaggttttgacattaaggcttggggatttggggacatatgttataaacaagcaaactccaaacaaacaaatttggctatcttctcctgtgagtgggccttctaggtttgattgggatgcaacagctaatggttggatatacaagaggactggagtgaaccttgtgcggcttctggagaaggagattggtgagctctgtggtactccagtagaactttagtaacagtactggaaatgccacacagctaggttgtatggagagcagtgctctgaatgtcgaagtgtagtacacaaaactttttttttgttctacacatttgcacatggtttggaataaataacttcccctctctggtagcggggaacagtattattcggaaatggtgggagtatttttcagcttttgtaagtaccgaattccgatcactgtcagcctgtcagactacattagtgtttctggatgcaatatcacattgcaagatgaccagatatcacactatattctgttgtgccaagcaacaaggatcaaatcacatcaatgctgaaacatcatgtatgcctcttcttccatcaggtcagggctcaatctgaccatgaggatgcagaactccatctgatccagtgccccgtcctcgtccaggtcgccttctttcatcatctccaggagctcatcatcctggagctggccaagcccgagcctggccgcgctctgcttcaagctccagatggtgatctttcctgccctgggctccatgagcagctggaaccccttgcagagctcctggatcaggccctccacgcccagcttcctcgccatcagtggcaggaagtcctgaaactgcacggaggagcccttgtcggattccatgctggagttatcccgcccgcgaagtcgtgatgaggattgaagatcagggcaatggttggcaaaagttatgcgtgcgtgggtaacgaaggaggctggtgtttatttatagcagcaggggaggaggaagttcttggaatcgggagcagttcgtttctgcgaagtagctggctggttgcttggacatgtctatctggcttcttccctttcttttttaccacataaagactcgttcggttagctctcaatccatatagattaagtgagattgagtatgtttaaattccaaacaagtcaaacttcttcttaatttttt

SEQ ID NO: 3306 - DNA, 2670 bp, Zea Mays
acgtaaggacaaacgcgaacggaaccctccccagcagatgagcggagtaggtgggcggggttctcctccactcccgctccagctttctctggcccgatcgatgctacattcccgcggcgagccgctcgccttcctccgcgggccttgggctacccaacccatcgccgagccgcctcgcgcggtcccccctccatctttgcccggctctctcgcctcggaggacggacagagaaagagaggatgagaagggactcctcgacccgcgtcccgcgctcgggctattggaccgaggggttgcggtggatttggagcgcggggtggactcgtcgctgatggtattctccgatgcaagaggcagggagagagcgggacagggcggcggcggcggcggatctcggaggcgtcgccgctagcgtcaggccaacggatacagcagctgtaagcacaaagccggcaaagcgatacccactggccttatggataggcatattgggcctgataataaaaggaaagggagaagccttgtcatgatcccagtattccagacacagaaatcccttacttgcactacccgatgccaaatacttatgatagaatgtgcgtgcacaggggttaggttctttgctatcttgtcaatgcagaggtccgggagtggatgggttgagacgttgttgaatagccatcctaatattagctccaatggagagatcttctctgtcaaagaaagacgcagcaatatcaccgcgatcacgaaaacactggacagattgtacaatctggattggtatagcagtgctgctaagaacgaatgtacggctgccgtggggctgaaatggatgctcaatcagggtctaatgaagcaccatcaagagatagttgaatacttcaaccgaaggggtgtttccgcaatttttctactaagaagaaatcttcttcggcgttacgtctctatattagcaaatgctcatgatagtgccatgaaacagttgaatggaactcataaagctcatgtgcactccaaacatgaggctgaaatccttgctcaatataagccaaccattgacaaaaaaacattgattactgaactaaaacggtctgataagttggcagctgatgctctggtgaatttcaagaacaccaggcacgttgtcctgtactacgaggatgttgtcagcaatcgcacgatgctcatggatgttctggattttctcagattgccaaagaggaagctgttcagtcgacatgtgaaaatccacacaaaacgattgtgcgatcatatagataactgggcagatgttactgattttttgaagggcacaccgttcgagagctttttgaatggctcaagaagatgacatggctagctgatgtatatagtgctatagtgagttgtccttctggcgcctcgtaggtttttttttttgataccatgatgaaataagtatgggccactgagagaaatagttaggtagagatgcttgatccaggctattagagctgtagaataaagattaaaaacaatacctttgtgattatcagatatctaatgcaagaacttgcaaaactgtctggagtcattcgtgtatacatcaaagtttacacttacacttgaaaatgaataggccaagctccgtggcagaggaactgaggaaaaaggcagagtagcctatacaaaactgatgatttttactagcaattacaacgcaccgcgaatcgctcagtaggtttctcgctcgtgctcagatggagctaggtctccgtggccggtggcggggcgccgggctggatggtcttgaaggactcgtgcaagcggcggagcatggcctcgtcgcggctccactcggcgttgggcgcggtgacgaagtgcgcgtacagcttgttccgtgcgcacgtcaccgatatgaggctgtgcgcgctggcgcccgccacctcgtactcgtagtacacctggccggcgccgtcggcgcgctcggcggagcgcacgtcgtcggcggacgagatctggtccagcagcccgacgtcggagagcgccaggttgtcgagcacggcgctgagcggcgccagcgcgcggatcccggacaggaacgtcaggtactccttctccgcccgctttcgcgggttgaagaactccgagtccgtgccgttggtgcccttctccaccttggacaccagccgctccttccacccctccggcacgtcgtacacgtactccgccgtgtccttcttgctcgcgttcccgccgtatccgccgtagttcgccgcgctcgccgccgtgccatagtacactgtgaactccgcctcggcgcgggacggcgccgtcgccggggacagcagcaggagccccgccgcggccgcagccaccagcgtcgtagcgacgggcctgtagttgttccctggctgaggcgggagcctcagcgactgcaggggaggggctgcggcagccgcctgctgcgacgaggcggtcggggtgcatgcggtggtgaggagaggggacgccacgcacgagaggaatgagggaagcatggtcgccgtcgaccgtcggtgacacgcggacggggcggtggcggcgaggtggtccgtggtcgtgtgctttgtgttggaggcgacccgcgagaggatagcagagatcgcgtgggcccgtggcttatccaaagagacgtcgacatggca

SEQ ID NO: 3307 - DNA, 2658 bp, Zea Mays
acgtaaggacaaacgcgaacggaaccctccccagcagatgagcggagtaggtgggcggggttctcctccactcccgctccagctttctctggcccgatcgatgctacattcccgcggcgagccgctcgccttcctccgcgggccttgggctacccaacccatcgccgagccgcctcgcgcggtcccccctccatctttgcccggctctctcgcctcggaggacggacagagaaagagaggatgagaagggactcctcgacccgcgtcccgcgctcgggctattggaccgaggggttgcggtggatttggagcgcggggtggactcgtcgctgatggtattctccgatgcaagaggcagggagagagcgggacagggcggcggcggcggcggatctcggaggcgtcgccgctagcgtcaggccaacggatacagcagctgtaagcacaaagccggcaaagcgatacccactggccttatggataggcatattgggcctgataataaaaggaaagggagaagccttgtcatgatcccagtattccagacacagaaatcccttacttgcactacccgatgccaaatacttatgataggaaagaatgtgcgtgcacaggggttaggttctttgctatcttgtcaatgcagaggtccgggagtggatgggttgagacgttgttgaatagccatcctaatattagctccaatggagagatcttctctgtcaaagaaagacgcagcaatatcaccgcgatcacgaaaacactggacagattgtacaatctggattggtatagcagtgctgctaagaacgaatgtacggctgccgtggggctgaaatggatgctcaatcagtgaaaattatagggtctaatgaagcaccatcaagagatagttgaatacttcaaccgaaggggtgtttccgcaatttttctactaagaagaaatcttcttcggcgttacgtctctatattagcaaatgctcatgatagtgccatgaaacagttgaatggaactcataaagctcatgtgcactccaaacatgaggctgaaatccttgctcaatataagccaaccattgacaaaaaaacattgattactgaactaaaacggtctgataagttggcagctgatgctctggtgaatttcaagaacaccaggcacgttgtcctgtactacgaggatgttgtcagcaatcgcacgattgccaaagaggaagctgttcagtcgacatgtgaaaatccacacaaaacgattgtgcgatcatatagataactgggcagatgttactgattttttgaagggcacaccgttcgagagctttttgaatggctcaagaagatgacatggctagctgatgtatatagtgctatagtgagttgtccttctggcgcctcgtaggtttttttttttgataccatgatgaaataagtatgggccactgagagaaatagttaggtagagatgcttgatccaggctattagagctgtagaataaagattaaaaacaatacctttgtgattatcagatatctaatgcaagaacttgcaaaactgtctggagtcattcgtgtatacatcaaagtttacacttacacttgaaaatgaataggccaagctccgtggcagaggaactgaggaaaaaggcagagtagcctatacaaaactgatgatttttactagcaattacaacgcaccgcgaatcgctcagtaggtttctcgctcgtgctcagatggagctaggtctccgtggccggtggcggggcgccgggctggatggtcttgaaggactcgtgcaagcggcggagcatggcctcgtcgcggctccactcggcgttgggcgcggtgacgaagtgcgcgtacagcttgttccgtgcgcacgtcaccgatatgaggctgtgcgcgctggcgcccgccacctcgtactcgtagtacacctggccggcgccgtcggcgcgctcggcggagcgcacgtcgtcggcggacgagatctggtccagcagcccgacgtcggagagcgccaggttgtcgagcacggcgctgagcggcgccagcgcgcggatcccggacaggaacgtcaggtactccttctccgcccgctttcgcgggttgaagaactccgagtccgtgccgttggtgcccttctccaccttggacaccagccgctccttccacccctccggcacgtcgtacacgtactccgccgtgtccttcttgctcgcgttcccgccgtatccgccgtagttcgccgcgctcgccgccgtgccatagtacactgtgaactccgcctcggcgcgggacggcgccgtcgccggggacagcagcaggagccccgccgcggccgcagccaccagcgtcgtagcgacgggcctgtagttgttccctggctgaggcgggagcctcagcgactgcaggggaggggctgcggcagccgcctgctgcgacgaggcggtcggggtgcatgcggtggtgaggagaggggacgccacgcacgagaggaatgagggaagcatggtcgccgtcgaccgtcggtgacacgcggacggggcggtggcggcgaggtggtccgtggtcgtgtgctttgtgttggaggcgacccgcgagaggatagcagagatcgcgtgggcccgtggcttatccaaagagacgtcgacatggca

SEQ ID NO: 3308 - DNA, 2675 bp, Zea Mays
acgtaaggacaaacgcgaacggaaccctccccagcagatgagcggagtaggtgggcggggttctcctccactcccgctccagctttctctggcccgatcgatgctacattcccgcggcgagccgctcgccttcctccgcgggccttgggctacccaacccatcgccgagccgcctcgcgcggtcccccctccatctttgcccggctctctcgcctcggaggacggacagagaaagagaggatgagaagggactcctcgacccgcgtcccgcgctcgggctattggaccgaggggttgcggtggatttggagcgcggggtggactcgtcgctgatggtattctccgatgcaagaggcagggagagagcgggacagggcggcggcggcggcggatctcggaggcgtcgccgctagcgtcaggccaacggatacagcagctgtaagcacaaagccggcaaagcgatacccactggccttatggataggcatattgggcctgataataaaaggaaagggagaagccttgtcatgatcccagtattccagacacagaaatcccttacttgcactacccgatgccaaatacttatgataggaaagaatgtgcgtgcacaggggttaggttctttgctatcttgtcaatgcagaggtccgggagtggatgggttgagacgttgttgaatagccatcctaatattagctccaatggagagatcttctctgtcaaagaaagacgcagcaatatcaccgcgatcacgaaaacactggacagattgtacaatctggattggtatagcagtgctgctaagaacgaatgtacggctgccgtggggctgaaatggatgctcaatcagggtctaatgaagcaccatcaagagatagttgaatacttcaaccgaaggggtgtttccgcaatttttctactaagaagaaatcttcttcggcgttacgtctctatattagcaaatgctcatgatagtgccatgaaacagttgaatggaactcataaagctcatgtgcactccaaacatgaggctgaaatccttgctcaatataagccaaccattgacaaaaaaacattgattactgaactaaaacggtctgataagttggcagctgatgctctggtgaatttcaagaacaccaggcacgttgtcctgtactacgaggatgttgtcagcaatcgcacgatgctcatggatgttctggattttctcagattgccaaagaggaagctgttcagtcgacatgtgaaaatccacacaaaacgattgtgcgatcatatagataactgggcagatgttactgattttttgaagggcacaccgttcgagagctttttgaatggctcaagaagatgacatggctagctgatgtatatagtgctatagtgagttgtccttctggcgcctcgtaggtttttttttttgataccatgatgaaataagtatgggccactgagagaaatagttaggtagagatgcttgatccaggctattagagctgtagaataaagattaaaaacaatacctttgtgattatcagatatctaatgcaagaacttgcaaaactgtctggagtcattcgtgtatacatcaaagtttacacttacacttgaaaatgaataggccaagctccgtggcagaggaactgaggaaaaaggcagagtagcctatacaaaactgatgatttttactagcaattacaacgcaccgcgaatcgctcagtaggtttctcgctcgtgctcagatggagctaggtctccgtggccggtggcggggcgccgggctggatggtcttgaaggactcgtgcaagcggcggagcatggcctcgtcgcggctccactcggcgttgggcgcggtgacgaagtgcgcgtacagcttgttccgtgcgcacgtcaccgatatgaggctgtgcgcgctggcgcccgccacctcgtactcgtagtacacctggccggcgccgtcggcgcgctcggcggagcgcacgtcgtcggcggacgagatctggtccagcagcccgacgtcggagagcgccaggttgtcgagcacggcgctgagcggcgccagcgcgcggatcccggacaggaacgtcaggtactccttctccgcccgctttcgcgggttgaagaactccgagtccgtgccgttggtgcccttctccaccttggacaccagccgctccttccacccctccggcacgtcgtacacgtactccgccgtgtccttcttgctcgcgttcccgccgtatccgccgtagttcgccgcgctcgccgccgtgccatagtacactgtgaactccgcctcggcgcgggacggcgccgtcgccggggacagcagcaggagccccgccgcggccgcagccaccagcgtcgtagcgacgggcctgtagttgttccctggctgaggcgggagcctcagcgactgcaggggaggggctgcggcagccgcctgctgcgacgaggcggtcggggtgcatgcggtggtgaggagaggggacgccacgcacgagaggaatgagggaagcatggtcgccgtcgaccgtcggtgacacgcggacggggcggtggcggcgaggtggtccgtggtcgtgtgctttgtgttggaggcgacccgcgagaggatagcagagatcgcgtgggcccgtggcttatccaaagagacgtcgacatggca

SEQ ID NO: 3309 - DNA, 2134 bp, Zea Mays
cacagcgacggtcatcaaatcgtgctcaacttagtggccaaaccaccggtcctacctggtggcacccacgcaaaggcaacagaaacggagaaacccacgacaagcccaaacaaaaactcaaaaaaatctcgcctgccatctcgcggtccagccccgtcgttcacctcaatctccacgcgtcaccgccgccttccggcgagtctattcccctccgccacgccgtcgaagctttccagaccccgcagcggttcggataaggcggccgcccgccacccgccctcgtttcggccccactcgtctcggccccgggaccgcttcggggtggatctagggttgcgtggggaggggttctggaagcctccgccgcgatggacgaggcggacgatgacgcccgcaccttcaaggtcggattcaccgccgccggagagaagcagttccgggagctcgtgagggagaagctgcgcgggttcaggaggggcctggacgacaccctcctggattatgttactatcatgctccagaatggaaaacgtaaggatcaagccagtatggaactccatgtatttctaggggatgatagtgcagtattcgtttcctggttgtgggaacatctttctttaaatatgcacttatatgtgcaagcacaagaacaaactcaggtggttaaggatgatgaggcccccaaagaagtatctggaaaagataaatcatcagatatgttcccaagaagcaaatgtcaaactcattctgagcacccaattgaatcaagtgcagccactactaggaaacgtgataagcgggaatggaagggaattggtcgggcgggtaatgaaaaatttccacttcgaaatgtactaactgatattcttcacggggaagagaaaaaatctcaaaagtccaatgaaatacgatacccttcatcaaaacaacagaatggcagaaagcgtgacagggatgatgaaccacaacaagcaaagagagacacctcatcacgccccatgcttggtggtggtgcttcccgtcgtcttctacagtttgctgttcgagatgcagtaaaagctgtacagccagccagcacctctgctgaaccagcatccaagcgtctgcgctctgtggttgccactacttctgcagagaacatgcgtgataggagatcagaaaaatctcaggactacctgaacgatagaagatcagaaagatctcaagataactcgagtgacagaagatcagaaagaactagaccaatgctacaggtacaaggagctgctttagctcttagagctgcagcggaagctgctgcagattctacaaaggctagatctactggaagtgttttcaagcgattgggtcaagggaatgttgtgaaacaaccatctcgttctcgtgaagagaagagagattatgctgattttgagccagttacgaccgcaaatgaacatggttctgatcgatatgttaataatgaggaatctgaagaggaatatagagagctaaccatggctgatagggtagcaggaatgaatgttgattcgggctctgaagatgatgtggaccgagatgagggggttacaagataccaaacttctatttcacatgaagatactttctcatcatttgcagagaagaaaactgtatcggcacaatgcagtgttgaactagagaccgatgcaataaggccttcaagtgtgaatcacgaggagcaacctgtcccttcattaacaaatacaacaagtaaagctgtgtctatttctgttgatgtaaatatggtggaacctcccagttatgaaacaccaaaagatgttcatgttgtggagaagccttatgttgcacccatgaattcaaatgccacaagtgtggctaccaataccaaagaattaggccatgcagaagttcaaaaggattctcagcggtctgcaccatctgttccggtttcatatagcacatcacatccgacagtggatgcagattcgagaacactttatgttagcaatgttcactttgctgccaccaaggactcattatctcgccatttcaacaagtttggtgcagtactgaaagtagtcattgtcactaatgctgcaacggggtaaagatcaacttgggccaccagatccccaaaggcgcagaaagtctg

SEQ ID NO: 3310 - DNA, 3225 bp, Zea Mays
cacagcgacggtcatcaaatcgtgctcaacttagtggccaaaccaccggtcctacctggtggcacccacgcaaaggcaacagaaacggagaaacccacgacaagcccaaacaaaaactcaaaaaaatctcgcctgccatctcgcggtccagccccgtcgttcacctcaatctccacgcgtcaccgccgccttccggcgagtctattcccctccgccacgccgtcgaagctttccagaccccgcagcggttcggataaggcggccgcccgccacccgccctcgtttcggccccactcgtctcggccccgggaccgcttcggggtggatctagggttgcgtggggaggggttctggaagcctccgccgcgatggacgaggcggacgatgacgcccgcaccttcaaggtcggattcaccgccgccggagagaagcagttccgggagctcgtgagggagaagctgcgcgggttcaggaggggcctggacgacaccctcctgtgcaggattatgttactatcatgctccagaatggaaaacgtaaggatcaagccagtatggaactccatgtatttctaggggatgatagtgcagtattcgtttcctggttgtgggaacatctttctttaaatatgcacttatatgtgcaagcacaagaacaaactcaggtggttaaggatgatgaggcccccaaagaagtatctggaaaagataaatcatcagatatgttcccaagaagcaaatgtcaaactcattctgagcacccaattgaatcaagtgcagccactactaggaaacgtgataagcgggaatggaagggaattggtcgggcgggtaatgaaaaatttccacttcgaaatgtactaactgatattcttcacggggaagagaaaaaatctcaaaagtccaatgaaatacgatacccttcatcaaaacaacagaatggcagaaagcgtgacagggatgatgaaccacaacaagcaaagagagacacctcatcacgccccatgcttggtggtggtgcttcccgtcgtcttctacagtttgctgttcgagatgcagtaaaagctgtacagccagccagcacctctgctgaaccagcatccaagcgtctgcgctctgtggttgccactacttctgcagagaacatgcgtgataggagatcagaaaaatctcaggactacctgaacgatagaagatcagaaagatctcaagataactcgagtgacagaagatcagaaagaactagaccaatgctacaggtacaaggagctgctttagctcttagagctgcagcggaagctgctgcagattctacaaaggctagatctactggaagtgttttcaagcgattgggtcaagggaatgttgtgaaacaaccatctcgttctcgtgaagagaagagagattatgctgattttgagccagttacgaccgcaaatgaacatggttctgatcgatatgttaataatgaggaatctgaagaggaatatagagagctaaccatggctgatagggtagcaggaatgaatgttgattcgggctctgaagatgatgtggaccgagatgagggggttacaagataccaaacttctatttcacatgaagatactttctcatcatttgcagagaagaaaactgtatcggcacaatgcagtgttgaactagagaccgatgcaataaggccttcaagtgtgaatcacgaggagcaacctgtcccttcattaacaaatacaacaagtaaagctgtgtctatttctgttgatgtaaatatggtggaacctcccagttatgaaacaccaaaagatgttcatgttgtggagaagccttatgttgcacccatgaattcaaatgccacaagtgtggctaccaataccaaagaattaggccatgcagaagttcaaaaggattctcagcggtctgcaccatctggttcactttgctgccaccaaggactcattatctcgccatttcaacaagtttggtgcagtactgaaagtagtcattgtcactaatgctgcaacgggtcagccaacagggtctgcctatgtagagttcttacacaaagaatcagctgaacgagcgttgtcgttgaatggcacatcatttatgactcgtattctcaaggttgttcgacgaagttctcatgaagcagctcatttttatggttggcctggtattggacgatcatcattatatggtaggcatggtaggatggcatacccaagagctgttcaccccggtggttcctttagagggcgtgctccgatgaaagctggcgctagaagtttacagtggaaacgggagccttcaggcactgattcaagtgcaggtgcgaaaaatgacatgagtgtgccattttcctgtgaacaggtcctcccgccggcaacataggggagcatactatagctgatataatgagaactgaatggtatgttactcgtcgcccctaatggctgaatatggaaagcaagctgagaagattgttccttcctgatgcagcgtaaaacaaaagtccgaaaaaacatgaaaatacaaaaaaaacaacaactaaaacttaaggaaaaaaagagggggagtttggcattaggatatggcttatcattctggtaaccggattgggtcgtctttgccatatgcgagtaggatgacagcctgagcaattttctgtggactccagctatctgaaaaaaggattcacattcgaaataatcacaacatttgggttgtgttggatggaagatgcttatcagtagaacaagatgggcagattttggacgagctactcatcatgtgggttgacactgctcgtcgttggaggacttgtatatatctttttttgcggggaggacttgtatatatctggccattagtttactgactaatggtgcatgctttgggaaaagtaatttgttggaagcttatattaactctaaaaaggcaaaaaatggcctttttcttctgtcttgtttccttggaatcacaatgctttatgtggtaaacatctttggttctcggatgggtgcgggtatggttgcgtaggagcaaccgttatgcatttatgtactctcaagtattctagtcactttaggtttataaatgtatatatggatatggacacaggatgtacttgatatgtgcgcgatgtataggtaggttgctacgtagtctagctgtagccaagcatctgcagttatcaatttatatctaaaagaaaaccgtacgagag

SEQ ID NO: 3311 - DNA, 3305 bp, Zea Mays
cacagcgacggtcatcaaatcgtgctcaacttagtggccaaaccaccggtcctacctggtggcacccacgcaaaggcaacagaaacggagaaacccacgacaagcccaaacaaaaactcaaaaaaatctcgcctgccatctcgcggtccagccccgtcgttcacctcaatctccacgcgtcaccgccgccttccggcgagtctattcccctccgccacgccgtcgaagctttccagaccccgcagcggttcggataaggcggccgcccgccacccgccctcgtttcggccccactcgtctcggccccgggaccgcttcggggtggatctagggttgcgtggggaggggttctggaagcctccgccgcgatggacgaggcggacgatgacgcccgcaccttcaaggtcggattcaccgccgccggagagaagcagttccgggagctcgtgagggagaagctgcgcgggttcaggaggggcctggacgacaccctcctgtgcaggattatgttactatcatgctccagaatggaaaacgtaaggatcaagccagtatggaactccatgtatttctaggggatgatagtgcagtattcgtttcctggttgtgggaacatctttctttaaatatgcacttatatgtgcaagcacaagaacaaactcaggtggttaaggatgatgaggcccccaaagaagtatctggaaaagataaatcatcagatatgttcccaagaagcaaatgtcaaactcattctgagcacccaattgaatcaagtgcagccactactaggaaacgtgataagcgggaatggaagggaattggtcgggcgggtaatgaaaaatttccacttcgaaatgtactaactgatattcttcacggggaagagaaaaaatctcaaaagtccaatgaaatacgatacccttcatcaaaacaacagaatggcagaaagcgtgacagggatgatgaaccacaacaagcaaagagagacacctcatcacgccccatgcttggtggtggtgcttcccgtcgtcttctacagtttgctgttcgagatgcagtaaaagctgtacagccagccagcacctctgctgaaccagcatccaagcgtctgcgctctgtggttgccactacttctgcagagaacatgcgtgataggagatcagaaaaatctcaggactacctgaacgatagaagatcagaaagatctcaagataactcgagtgacagaagatcagaaagaactagaccaatgctacaggtacaaggagctgctttagctcttagagctgcagcggaagctgctgcagattctacaaaggctagatctactggaagtgttttcaagcgattgggtcaagggaatgttgtgaaacaaccatctcgttctcgtgaagagaagagagattatgctgattttgagccagttacgaccgcaaatgaacatggttctgatcgatatgttaataatgaggaatctgaagaggaatatagagagctaaccatggctgatagggtagcaggaatgaatgttgattcgggctctgaagatgatgtggaccgagatgagggggttacaagataccaaacttctatttcacatgaagatactttctcatcatttgcagagaagaaaactgtatcggcacaatgcagtgttgaactagagaccgatgcaataaggccttcaagtgtgaatcacgaggagcaacctgtcccttcattaacaaatacaacaagtaaagctgtgtctatttctgttgatgtaaatatggtggaacctcccagttatgaaacaccaaaagatgttcatgttgtggagaagccttatgttgcacccatgaattcaaatgccacaagtgtggctaccaataccaaagtaagcagccatgaattaggccatgcagaagttcaaaaggattctcagcggtctgcaccatctgttccggtttcatatagcacatcacatccgacagtggatgcagattcgagaacactttatgttagcaatgttcactttgctgccaccaaggactcattatctcgccatttcaacaagtttggtgcagtactgaaagtagtcattgtcactaatgctgcaacgggtcagccaacagggtctgcctatgtagagttcttacacaaagaatcagctgaacgagcgttgtcgttgaatggcacatcatttatgactcgtattctcaaggttgttcgacgaagttctcatgaagcagctcatttttatggttggcctggtattggacgatcatcattatatggtaggcatggtaggatggcatacccaagagctgttcaccccggtggttcctttagagggcgtgctccgatgaaagctggcgctagaagtttacagtggaaacgggagccttcaggcactgattcaagtgcaggtgcgaaaaatgacatgagtgtgccattttcctgtgaacaggtcctcccgccggcaacataggggagcatactatagctgatataatgagaactgaatggtatgttactcgtcgcccctaatggctgaatatggaaagcaagctgagaagattgttccttcctgatgcagcgtaaaacaaaagtccgaaaaaacatgaaaatacaaaaaaaacaacaactaaaacttaaggaaaaaaagagggggagtttggcattaggatatggcttatcattctggtaaccggattgggtcgtctttgccatatgcgagtaggatgacagcctgagcaattttctgtggactccagctatctgaaaaaaggattcacattcgaaataatcacaacatttgggttgtgttggatggaagatgcttatcagtagaacaagatgggcagattttggacgagctactcatcatgtgggttgacactgctcgtcgttggaggacttgtatatatctttttttgcggggaggacttgtatatatctggccattagtttactgactaatggtgcatgctttgggaaaagtaatttgttggaagcttatattaactctaaaaaggcaaaaaatggcctttttcttctgtcttgtttccttggaatcacaatgctttatgtggtaaacatctttggttctcggatgggtgcgggtatggttgcgtaggagcaaccgttatgcatttatgtactctcaagtattctagtcactttaggtttataaatgtatatatggatatggacacaggatgtacttgatatgtgcgcgatgtataggtaggttgctacgtagtctagctgtagccaagcatctgcagttatcaatttatatctaaaagaaaaccgtacgagag

SEQ ID NO: 3312 - DNA, 3220 bp, Zea Mays
cacagcgacggtcatcaaatcgtgctcaacttagtggccaaaccaccggtcctacctggtggcacccacgcaaaggcaacagaaacggagaaacccacgacaagcccaaacaaaaactcaaaaaaatctcgcctgccatctcgcggtccagccccgtcgttcacctcaatctccacgcgtcaccgccgccttccggcgagtctattcccctccgccacgccgtcgaagctttccagaccccgcagcggttcggataaggcggccgcccgccacccgccctcgtttcggccccactcgtctcggccccgggaccgcttcggggtggatctagggttgcgtggggaggggttctggaagcctccgccgcgatggacgaggcggacgatgacgcccgcaccttcaaggtcggattcaccgccgccggagagaagcagttccgggagctcgtgagggagaagctgcgcgggttcaggaggggcctggacgacaccctcctggattatgttactatcatgctccagaatggaaaacgtaaggatcaagccagtatggaactccatgtatttctaggggatgatagtgcagtattcgtttcctggttgtgggaacatctttctttaaatatgcacttatatgtgcaagcacaagaacaaactcaggtggttaaggatgatgaggcccccaaagaagtatctggaaaagataaatcatcagatatgttcccaagaagcaaatgtcaaactcattctgagcacccaattgaatcaagtgcagccactactaggaaacgtgataagcgggaatggaagggaattggtcgggcgggtaatgaaaaatttccacttcgaaatgtactaactgatattcttcacggggaagagaaaaaatctcaaaagtccaatgaaatacgatacccttcatcaaaacaacagaatggcagaaagcgtgacagggatgatgaaccacaacaagcaaagagagacacctcatcacgccccatgcttggtggtggtgcttcccgtcgtcttctacagtttgctgttcgagatgcagtaaaagctgtacagccagccagcacctctgctgaaccagcatccaagcgtctgcgctctgtggttgccactacttctgcagagaacatgcgtgataggagatcagaaaaatctcaggactacctgaacgatagaagatcagaaagatctcaagataactcgagtgacagaagatcagaaagaactagaccaatgctacaggtacaaggagctgctttagctcttagagctgcagcggaagctgctgcagattctacaaaggctagatctactggaagtgttttcaagcgattgggtcaagggaatgttgtgaaacaaccatctcgttctcgtgaagagaagagagattatgctgattttgagccagttacgaccgcaaatgaacatggttctgatcgatatgttaataatgaggaatctgaagaggaatatagagagctaaccatggctgatagggtagcaggaatgaatgttgattcgggctctgaagatgatgtggaccgagatgagggggttacaagataccaaacttctatttcacatgaagatactttctcatcatttgcagagaagaaaactgtatcggcacaatgcagtgttgaactagagaccgatgcaataaggccttcaagtgtgaatcacgaggagcaacctgtcccttcattaacaaatacaacaagtaaagctgtgtctatttctgttgatgtaaatatggtggaacctcccagttatgaaacaccaaaagatgttcatgttgtggagaagccttatgttgcacccatgaattcaaatgccacaagtgtggctaccaataccaaagaattaggccatgcagaagttcaaaaggattctcagcggtctgcaccatctggttcactttgctgccaccaaggactcattatctcgccatttcaacaagtttggtgcagtactgaaagtagtcattgtcactaatgctgcaacgggtcagccaacagggtctgcctatgtagagttcttacacaaagaatcagctgaacgagcgttgtcgttgaatggcacatcatttatgactcgtattctcaaggttgttcgacgaagttctcatgaagcagctcatttttatggttggcctggtattggacgatcatcattatatggtaggcatggtaggatggcatacccaagagctgttcaccccggtggttcctttagagggcgtgctccgatgaaagctggcgctagaagtttacagtggaaacgggagccttcaggcactgattcaagtgcaggtgcgaaaaatgacatgagtgtgccattttcctgtgaacaggtcctcccgccggcaacataggggagcatactatagctgatataatgagaactgaatggtatgttactcgtcgcccctaatggctgaatatggaaagcaagctgagaagattgttccttcctgatgcagcgtaaaacaaaagtccgaaaaaacatgaaaatacaaaaaaaacaacaactaaaacttaaggaaaaaaagagggggagtttggcattaggatatggcttatcattctggtaaccggattgggtcgtctttgccatatgcgagtaggatgacagcctgagcaattttctgtggactccagctatctgaaaaaaggattcacattcgaaataatcacaacatttgggttgtgttggatggaagatgcttatcagtagaacaagatgggcagattttggacgagctactcatcatgtgggttgacactgctcgtcgttggaggacttgtatatatctttttttgcggggaggacttgtatatatctggccattagtttactgactaatggtgcatgctttgggaaaagtaatttgttggaagcttatattaactctaaaaaggcaaaaaatggcctttttcttctgtcttgtttccttggaatcacaatgctttatgtggtaaacatctttggttctcggatgggtgcgggtatggttgcgtaggagcaaccgttatgcatttatgtactctcaagtattctagtcactttaggtttataaatgtatatatggatatggacacaggatgtacttgatatgtgcgcgatgtataggtaggttgctacgtagtctagctgtagccaagcatctgcagttatcaatttatatctaaaagaaaaccgtacgagag

SEQ ID NO: 3313 - DNA, 3300 bp, Zea Mays
cacagcgacggtcatcaaatcgtgctcaacttagtggccaaaccaccggtcctacctggtggcacccacgcaaaggcaacagaaacggagaaacccacgacaagcccaaacaaaaactcaaaaaaatctcgcctgccatctcgcggtccagccccgtcgttcacctcaatctccacgcgtcaccgccgccttccggcgagtctattcccctccgccacgccgtcgaagctttccagaccccgcagcggttcggataaggcggccgcccgccacccgccctcgtttcggccccactcgtctcggccccgggaccgcttcggggtggatctagggttgcgtggggaggggttctggaagcctccgccgcgatggacgaggcggacgatgacgcccgcaccttcaaggtcggattcaccgccgccggagagaagcagttccgggagctcgtgagggagaagctgcgcgggttcaggaggggcctggacgacaccctcctggattatgttactatcatgctccagaatggaaaacgtaaggatcaagccagtatggaactccatgtatttctaggggatgatagtgcagtattcgtttcctggttgtgggaacatctttctttaaatatgcacttatatgtgcaagcacaagaacaaactcaggtggttaaggatgatgaggcccccaaagaagtatctggaaaagataaatcatcagatatgttcccaagaagcaaatgtcaaactcattctgagcacccaattgaatcaagtgcagccactactaggaaacgtgataagcgggaatggaagggaattggtcgggcgggtaatgaaaaatttccacttcgaaatgtactaactgatattcttcacggggaagagaaaaaatctcaaaagtccaatgaaatacgatacccttcatcaaaacaacagaatggcagaaagcgtgacagggatgatgaaccacaacaagcaaagagagacacctcatcacgccccatgcttggtggtggtgcttcccgtcgtcttctacagtttgctgttcgagatgcagtaaaagctgtacagccagccagcacctctgctgaaccagcatccaagcgtctgcgctctgtggttgccactacttctgcagagaacatgcgtgataggagatcagaaaaatctcaggactacctgaacgatagaagatcagaaagatctcaagataactcgagtgacagaagatcagaaagaactagaccaatgctacaggtacaaggagctgctttagctcttagagctgcagcggaagctgctgcagattctacaaaggctagatctactggaagtgttttcaagcgattgggtcaagggaatgttgtgaaacaaccatctcgttctcgtgaagagaagagagattatgctgattttgagccagttacgaccgcaaatgaacatggttctgatcgatatgttaataatgaggaatctgaagaggaatatagagagctaaccatggctgatagggtagcaggaatgaatgttgattcgggctctgaagatgatgtggaccgagatgagggggttacaagataccaaacttctatttcacatgaagatactttctcatcatttgcagagaagaaaactgtatcggcacaatgcagtgttgaactagagaccgatgcaataaggccttcaagtgtgaatcacgaggagcaacctgtcccttcattaacaaatacaacaagtaaagctgtgtctatttctgttgatgtaaatatggtggaacctcccagttatgaaacaccaaaagatgttcatgttgtggagaagccttatgttgcacccatgaattcaaatgccacaagtgtggctaccaataccaaagtaagcagccatgaattaggccatgcagaagttcaaaaggattctcagcggtctgcaccatctgttccggtttcatatagcacatcacatccgacagtggatgcagattcgagaacactttatgttagcaatgttcactttgctgccaccaaggactcattatctcgccatttcaacaagtttggtgcagtactgaaagtagtcattgtcactaatgctgcaacgggtcagccaacagggtctgcctatgtagagttcttacacaaagaatcagctgaacgagcgttgtcgttgaatggcacatcatttatgactcgtattctcaaggttgttcgacgaagttctcatgaagcagctcatttttatggttggcctggtattggacgatcatcattatatggtaggcatggtaggatggcatacccaagagctgttcaccccggtggttcctttagagggcgtgctccgatgaaagctggcgctagaagtttacagtggaaacgggagccttcaggcactgattcaagtgcaggtgcgaaaaatgacatgagtgtgccattttcctgtgaacaggtcctcccgccggcaacataggggagcatactatagctgatataatgagaactgaatggtatgttactcgtcgcccctaatggctgaatatggaaagcaagctgagaagattgttccttcctgatgcagcgtaaaacaaaagtccgaaaaaacatgaaaatacaaaaaaaacaacaactaaaacttaaggaaaaaaagagggggagtttggcattaggatatggcttatcattctggtaaccggattgggtcgtctttgccatatgcgagtaggatgacagcctgagcaattttctgtggactccagctatctgaaaaaaggattcacattcgaaataatcacaacatttgggttgtgttggatggaagatgcttatcagtagaacaagatgggcagattttggacgagctactcatcatgtgggttgacactgctcgtcgttggaggacttgtatatatctttttttgcggggaggacttgtatatatctggccattagtttactgactaatggtgcatgctttgggaaaagtaatttgttggaagcttatattaactctaaaaaggcaaaaaatggcctttttcttctgtcttgtttccttggaatcacaatgctttatgtggtaaacatctttggttctcggatgggtgcgggtatggttgcgtaggagcaaccgttatgcatttatgtactctcaagtattctagtcactttaggtttataaatgtatatatggatatggacacaggatgtacttgatatgtgcgcgatgtataggtaggttgctacgtagtctagctgtagccaagcatctgcagttatcaatttatatctaaaagaaaaccgtacgagag

SEQ ID NO: 3314 - DNA, 3288 bp, Zea Mays
cacagcgacggtcatcaaatcgtgctcaacttagtggccaaaccaccggtcctacctggtggcacccacgcaaaggcaacagaaacggagaaacccacgacaagcccaaacaaaaactcaaaaaaatctcgcctgccatctcgcggtccagccccgtcgttcacctcaatctccacgcgtcaccgccgccttccggcgagtctattcccctccgccacgccgtcgaagctttccagaccccgcagcggttcggataaggcggccgcccgccacccgccctcgtttcggccccactcgtctcggccccgggaccgcttcggggtggatctagggttgcgtggggaggggttctggaagcctccgccgcgatggacgaggcggacgatgacgcccgcaccttcaaggtcggattcaccgccgccggagagaagcagttccgggagctcgtgagggagaagctgcgcgggttcaggaggggcctggacgacaccctcctggattatgttactatcatgctccagaatggaaaacgtaaggatcaagccagtatggaactccatgtatttctaggggatgatagtgcagtattcgtttcctggttgtgggaacatctttctttaaatatgcacttatatgtgcaagcacaagaacaaactcaggtggttaaggatgatgaggcccccaaagaagtatctggaaaagataaatcatcagatatgttcccaagaagcaaatgtcaaactcattctgagcacccaattgaatcaagtgcagccactactaggaaacgtgataagcgggaatggaagggaattggtcgggcgggtaatgaaaaatttccacttcgaaatgtactaactgatattcttcacggggaagagaaaaaatctcaaaagtccaatgaaatacgatacccttcatcaaaacaacagaatggcagaaagcgtgacagggatgatgaaccacaacaagcaaagagagacacctcatcacgccccatgcttggtggtggtgcttcccgtcgtcttctacagtttgctgttcgagatgcagtaaaagctgtacagccagccagcacctctgctgaaccagcatccaagcgtctgcgctctgtggttgccactacttctgcagagaacatgcgtgataggagatcagaaaaatctcaggactacctgaacgatagaagatcagaaagatctcaagataactcgagtgacagaagatcagaaagaactagaccaatgctacaggtacaaggagctgctttagctcttagagctgcagcggaagctgctgcagattctacaaaggctagatctactggaagtgttttcaagcgattgggtcaagggaatgttgtgaaacaaccatctcgttctcgtgaagagaagagagattatgctgattttgagccagttacgaccgcaaatgaacatggttctgatcgatatgttaataatgaggaatctgaagaggaatatagagagctaaccatggctgatagggtagcaggaatgaatgttgattcgggctctgaagatgatgtggaccgagatgagggggttacaagataccaaacttctatttcacatgaagatactttctcatcatttgcagagaagaaaactgtatcggcacaatgcagtgttgaactagagaccgatgcaataaggccttcaagtgtgaatcacgaggagcaacctgtcccttcattaacaaatacaacaagtaaagctgtgtctatttctgttgatgtaaatatggtggaacctcccagttatgaaacaccaaaagatgttcatgttgtggagaagccttatgttgcacccatgaattcaaatgccacaagtgtggctaccaataccaaagaattaggccatgcagaagttcaaaaggattctcagcggtctgcaccatctgttccggtttcatatagcacatcacatccgacagtggatgcagattcgagaacactttatgttagcaatgttcactttgctgccaccaaggactcattatctcgccatttcaacaagtttggtgcagtactgaaagtagtcattgtcactaatgctgcaacgggtcagccaacagggtctgcctatgtagagttcttacacaaagaatcagctgaacgagcgttgtcgttgaatggcacatcatttatgactcgtattctcaaggttgttcgacgaagttctcatgaagcagctcatttttatggttggcctggtattggacgatcatcattatatggtaggcatggtaggatggcatacccaagagctgttcaccccggtggttcctttagagggcgtgctccgatgaaagctggcgctagaagtttacagtggaaacgggagccttcaggcactgattcaagtgcaggtgcgaaaaatgacatgagtgtgccattttcctgtgaacaggtcctcccgccggcaacataggggagcatactatagctgatataatgagaactgaatggtatgttactcgtcgcccctaatggctgaatatggaaagcaagctgagaagattgttccttcctgatgcagcgtaaaacaaaagtccgaaaaaacatgaaaatacaaaaaaaacaacaactaaaacttaaggaaaaaaagagggggagtttggcattaggatatggcttatcattctggtaaccggattgggtcgtctttgccatatgcgagtaggatgacagcctgagcaattttctgtggactccagctatctgaaaaaaggattcacattcgaaataatcacaacatttgggttgtgttggatggaagatgcttatcagtagaacaagatgggcagattttggacgagctactcatcatgtgggttgacactgctcgtcgttggaggacttgtatatatctttttttgcggggaggacttgtatatatctggccattagtttactgactaatggtgcatgctttgggaaaagtaatttgttggaagcttatattaactctaaaaaggcaaaaaatggcctttttcttctgtcttgtttccttggaatcacaatgctttatgtggtaaacatctttggttctcggatgggtgcgggtatggttgcgtaggagcaaccgttatgcatttatgtactctcaagtattctagtcactttaggtttataaatgtatatatggatatggacacaggatgtacttgatatgtgcgcgatgtataggtaggttgctacgtagtctagctgtagccaagcatctgcagttatcaatttatatctaaaagaaaaccgtacgagag

SEQ ID NO: 3315 - DNA, 3676 bp, Zea Mays
cacagcgacggtcatcaaatcgtgctcaacttagtggccaaaccaccggtcctacctggtggcacccacgcaaaggcaacagaaacggagaaacccacgacaagcccaaacaaaaactcaaaaaaatctcgcctgccatctcgcggtccagccccgtcgttcacctcaatctccacgcgtcaccgccgccttccggcgagtctattcccctccgccacgccgtcgaagctttccagaccccgcagcggttcggataaggcggccgcccgccacccgccctcgtttcggccccactcgtctcggccccgggaccgcttcggggtggatctagggttgcgtggggaggggttctggaagcctccgccgcgatggacgaggcggacgatgacgcccgcaccttcaaggtcggattcaccgccgccggagagaagcagttccgggagctcgtgagggagaagctgcgcgggttcaggaggggcctggacgacaccctcctgtgcaggattatgttactatcatgctccagaatggaaaacgtaaggatcaagccagtatggaactccatgtatttctaggggatgatagtgcagtattcgtttcctggttgtgggaacatctttctttaaatatgcacttatatgtgcaagcacaagaacaaactcaggtggttaaggatgatgaggcccccaaagaagtatctggaaaagataaatcatcagatatgttcccaagaagcaaatgtcaaactcattctgagcacccaattgaatcaagtgcagccactactaggaaacgtgataagcgggaatggaagggaattggtcgggcgggtaatgaaaaatttccacttcgaaatgtactaactgatattcttcacggggaagagaaaaaatctcaaaagtccaatgaaatacgatacccttcatcaaaacaacagaatggcagaaagcgtgacagggatgatgaaccacaacaagcaaagagagacacctcatcacgccccatgcttggtggtggtgcttcccgtcgtcttctacagtttgctgttcgagatgcagtaaaagctgtacagccagccagcacctctgctgaaccagcatccaagcgtctgcgctctgtggttgccactacttctgcagagaacatgcgtgataggagatcagaaaaatctcaggactacctgaacgatagaagatcagaaagatctcaagataactcgagtgacagaagatcagaaagaactagaccaatgctacaggtacaaggagctgctttagctcttagagctgcagcggaagctgctgcagattctacaaaggctagatctactggaagtgttttcaagcgattgggtcaagggaatgttgtgaaacaaccatctcgttctcgtgaagagaagagagattatgctgattttgagccagttacgaccgcaaatgaacatggttctgatcgatatgttaataatgaggaatctgaagaggaatatagagagctaaccatggctgatagggtagcaggaatgaatgttgattcgggctctgaagatgatgtggaccgagatgagggggttacaagataccaaacttctatttcacatgaagatactttctcatcatttgcagagaagaaaactgtatcggcacaatgcagtgttgaactagagaccgatgcaataaggccttcaagtgtgaatcacgaggagcaacctgtcccttcattaacaaatacaacaagtaaagctgtgtctatttctgttgatgtaaatatggtggaacctcccagttatgaaacaccaaaagatgttcatgttgtggagaagccttatgttgcacccatgaattcaaatgccacaagtgtggctaccaataccaaagaattaggccatgcagaagttcaaaaggattctcagcggtctgcaccatctgttccggtttcatatagcacatcacatccgacagtggatgcagattcgagaacactttatgttagcaatgttcactttgctgccaccaaggactcattatctcgccatttcaacaagtttggtgcagtactgaaagtagtcattgtcactaatgctgcaacgggtcagccaacagggtctgcctatgtagagttcttacacaaagaatcagctgaacgagcgttgtcgttgaatggcacatcatttatgactcgtattctcaaggttgttcgacgaagttctcatgaagcagctcatttttatggttggcctggtattggacgatcatcattatatggtaggcatggtaggatggcatacccaagagctgttcaccccggtggttcctttagagggcgtgctccgatgaaagctggcgctagaagtttacagtggaaacgggagccttcaggcactgattcaagtgcaggtgcgaaaaatgacatgagtgtgccattttcctgtgaacaggtcctcccgccggcaacataggggagcatactatagctgatataatgagaactgaatggtatgttactcgtcgcccctaatggctgaatatggaaagcaagctgagaagattgttccttcctgatgcagcgtaaaacaaaagtccgaaaaaacatgaaaatacaaaaaaaacaacaactaaaacttaaggaaaaaaagagggggagtttggcattaggatatggcttatcattctggtaaccggattgggtcgtctttgccatatgcgagtaggatgacagcctgagcaattttctgtggactccagctatctgaaaaaaggattcacattcgaaataatcacaacatttgggttgtgttggatggaagatgcttatcagtagaacaagatgggcagattttggacgaggtaagcctcaactgtatagaagtaacctatcaatctgtacccttatctgaatcaatctctttcccaacctgaaaagaaaaaaaaagccaacacaaatgatgtgtcttcttctgttttttttactccatgaactgttatttattgtactgattgttgatttttagttggacattcaatttgttgtcaaacagtttaacaatgattcttccgtgtggtttataattagattcaccgtgctgcctgacttacaaaatccagtttactgtctgatgagaatgcagtttatactcgcgatgtcttaccaaggttcttgtatatttatgggttggcctgcctgtccgaatctttcttgcacattatatgcttttcattcaatgatgcagctactcatcatgtgggttgacactgctcgtcgttggaggacttgtatatatctttttttgcggggaggacttgtatatatctggccattagtttactgactaatggtgcatgctttgggaaaagtaatttgttggaagcttatattaactctaaaaaggcaaaaaatggcctttttcttctgtcttgtttccttggaatcacaatgctttatgtggtaaacatctttggttctcggatgggtgcgggtatggttgcgtaggagcaaccgttatgcatttatgtactctcaagtattctagtcactttaggtttataaatgtatatatggatatggacacaggatgtacttgatatgtgcgcgatgtataggtaggttgctacgtagtctagctgtagccaagcatctgcagttatcaatttatatctaaaagaaaaccgtacgagag

SEQ ID NO: 3316 - DNA, 2970 bp, Zea Mays
atttgaaatcacattgtggagactgttataagttcttaacagcaaatggaaatgagaacatcggagctacttttacttttgaaactgacatatgcactgagaaatgtgtactcttatcttttcttggcaagcagtccatggttgtgggaacatctttctttaaatatgcacttatatgtgcaagcacaagaacaaactcaggtggttaaggatgatgaggcccccaaagaagtatctggaaaagataaatcatcagatatgttcccaagaagcaaatgtcaaactcattctgagcacccaattgaatcaagtgcagccactactaggaaacgtgataagcgggaatggaagggaattggtcgggcgggtaatgaaaaatttccacttcgaaatgtactaactgatattcttcacggggaagagaaaaaatctcaaaagtccaatgaaatacgatacccttcatcaaaacaacagaatggcagaaagcgtgacagggatgatgaaccacaacaagcaaagatttatattctatggctagatacatagtaacagttatgtatccagaaaagccagaatgacctataatttggaatggagggagtatcaagtttggataaagaatttgcttgtttgaactttgaactgctgaccgctaagggagagacacctcatcacgccccatgcttggtggtggtgcttcccgtcgtcttctacagtttgctgttcgagatgcagtaaaagctgtacagccagccagcacctctgctgaaccagcatccaagcgtctgcgctctgtggttgccactacttctgcagagaacatgcgtgataggagatcagaaaaatctcaggactacctgaacgatagaagatcagaaagatctcaagataactcgagtgacagaagatcagaaagaactagaccaatgctacaggtacaaggagctgctttagctcttagagctgcagcggaagctgctgcagattctacaaaggctagatctactggaagtgttttcaagcgattgggtcaagggaatgttgtgaaacaaccatctcgttctcgtgaagagaagagagattatgctgattttgagccagttacgaccgcaaatgaacatggttctgatcgatatgttaataatgaggaatctgaagaggaatatagagagctaaccatggctgatagggtagcaggaatgaatgttgattcgggctctgaagatgatgtggaccgagatgagggggttacaagataccaaacttctatttcacatgaagatactttctcatcatttgcagagaagaaaactgtatcggcacaatgcagtgttgaactagagaccgatgcaataaggccttcaagtgtgaatcacgaggagcaacctgtcccttcattaacaaatacaacaagtaaagctgtgtctatttctgttgatgtaaatatggtggaacctcccagttatgaaacaccaaaagatgttcatgttgtggagaagccttatgttgcacccatgaattcaaatgccacaagtgtggctaccaataccaaagaattaggccatgcagaagttcaaaaggattctcagcggtctgcaccatctgttccggtttcatatagcacatcacatccgacagtggatgcagattcgagaacactttatgttagcaatgttcactttgctgccaccaaggactcattatctcgccatttcaacaagtttggtgcagtactgaaagtagtcattgtcactaatgctgcaacgggtcagccaacagggtctgcctatgtagagttcttacacaaagaatcagctgaacgagcgttgtcgttgaatggcacatcatttatgactcgtattctcaaggttgttcgacgaagttctcatgaagcagctcatttttatggttggcctggtattggacgatcatcattatatggtaggcatggtaggatggcatacccaagagctgttcaccccggtggttcctttagagggcgtgctccgatgaaagctggcgctagaagtttacagtggaaacgggagccttcaggcactgattcaagtgcaggtgcgaaaaatgacatgagtgtgccattttcctgtgaacaggtcctcccgccggcaacataggggagcatactatagctgatataatgagaactgaatggtatgttactcgtcgcccctaatggctgaatatggaaagcaagctgagaagattgttccttcctgatgcagcgtaaaacaaaagtccgaaaaaacatgaaaatacaaaaaaaacaacaactaaaacttaaggaaaaaaagagggggagtttggcattaggatatggcttatcattctggtaaccggattgggtcgtctttgccatatgcgagtaggatgacagcctgagcaattttctgtggactccagctatctgaaaaaaggattcacattcgaaataatcacaacatttgggttgtgttggatggaagatgcttatcagtagaacaagatgggcagattttggacgagctactcatcatgtgggttgacactgctcgtcgttggaggacttgtatatatctttttttgcggggaggacttgtatatatctggccattagtttactgactaatggtgcatgctttgggaaaagtaatttgttggaagcttatattaactctaaaaaggcaaaaaatggcctttttcttctgtcttgtttccttggaatcacaatgctttatgtggtaaacatctttggttctcggatgggtgcgggtatggttgcgtaggagcaaccgttatgcatttatgtactctcaagtattctagtcactttaggtttataaatgtatatatggatatggacacaggatgtacttgatatgtgcgcgatgtataggtaggttgctacgtagtctagctgtagccaagcatctgcagttatcaatttatatctaaaagaaaaccgtacgagag

SEQ ID NO: 3317 - DNA, 2738 bp, Zea Mays
gttataagttcttaacagcaaatggaaatgagaacatcggagctacttttacttttgaaactgacatatgcactgagaaatgtgtactcttatcttttcttggcaagcagtccatggttgtgggaacatctttctttaaatatgcacttatatgtgcaagcacaagaacaaactcaggtggttaaggatgatgaggcccccaaagaagtatctggaaaagataaatcatcagatatgttcccaagaagcaaatgtcaaactcattctgagcacccaattgaatcaagtgcagccactactaggaaacgtgataagcgggaatggaagggaattggtcgggcgggtaatgaaaaatttccacttcgaaatgtactaactgatattcttcacggggaagagaaaaaatctcaaaagtccaatgaaatacgatacccttcatcaaaacaacagaatggcagaaagcgtgacagggatgatgaaccacaacaagcaaagagagacacctcatcacgccccatgcttggtggtggtgcttcccgtcgtcttctacagtttgctgttcgagatgcagtaaaagctgtacagccagccagcacctctgctgaaccagcatccaagcgtctgcgctctgtggttgccactacttctgcagagaacatgcgtgataggagatcagaaaaatctcaggactacctgaacgatagaagatcagaaagatctcaagataactcgagtgacagaagatcagaaagaactagaccaatgctacaggtacaaggagctgctttagctcttagagctgcagcggaagctgctgcagattctacaaaggctagatctactggaagtgttttcaagcgattgggtcaagggaatgttgtgaaacaaccatctcgttctcgtgaagagaagagagattatgctgattttgagccagttacgaccgcaaatgaacatggttctgatcgatatgttaataatgaggaatctgaagaggaatatagagagctaaccatggctgatagggtagcaggaatgaatgttgattcgggctctgaagatgatgtggaccgagatgagggggttacaagataccaaacttctatttcacatgaagatactttctcatcatttgcagagaagaaaactgtatcggcacaatgcagtgttgaactagagaccgatgcaataaggccttcaagtgtgaatcacgaggagcaacctgtcccttcattaacaaatacaacaagtaaagctgtgtctatttctgttgatgtaaatatggtggaacctcccagttatgaaacaccaaaagatgttcatgttgtggagaagccttatgttgcacccatgaattcaaatgccacaagtgtggctaccaataccaaagaattaggccatgcagaagttcaaaaggattctcagcggtctgcaccatctggttcactttgctgccaccaaggactcattatctcgccatttcaacaagtttggtgcagtactgaaagtagtcattgtcactaatgctgcaacgggtcagccaacagggtctgcctatgtagagttcttacacaaagaatcagctgaacgagcgttgtcgttgaatggcacatcatttatgactcgtattctcaaggttgttcgacgaagttctcatgaagcagctcatttttatggttggcctggtattggacgatcatcattatatggtaggcatggtaggatggcatacccaagagctgttcaccccggtggttcctttagagggcgtgctccgatgaaagctggcgctagaagtttacagtggaaacgggagccttcaggcactgattcaagtgcaggtgcgaaaaatgacatgagtgtgccattttcctgtgaacaggtcctcccgccggcaacataggggagcatactatagctgatataatgagaactgaatggtatgttactcgtcgcccctaatggctgaatatggaaagcaagctgagaagattgttccttcctgatgcagcgtaaaacaaaagtccgaaaaaacatgaaaatacaaaaaaaacaacaactaaaacttaaggaaaaaaagagggggagtttggcattaggatatggcttatcattctggtaaccggattgggtcgtctttgccatatgcgagtaggatgacagcctgagcaattttctgtggactccagctatctgaaaaaaggattcacattcgaaataatcacaacatttgggttgtgttggatggaagatgcttatcagtagaacaagatgggcagattttggacgagctactcatcatgtgggttgacactgctcgtcgttggaggacttgtatatatctttttttgcggggaggacttgtatatatctggccattagtttactgactaatggtgcatgctttgggaaaagtaatttgttggaagcttatattaactctaaaaaggcaaaaaatggcctttttcttctgtcttgtttccttggaatcacaatgctttatgtggtaaacatctttggttctcggatgggtgcgggtatggttgcgtaggagcaaccgttatgcatttatgtactctcaagtattctagtcactttaggtttataaatgtatatatggatatggacacaggatgtacttgatatgtgcgcgatgtataggtaggttgctacgtagtctagctgtagccaagcatctgcagttatcaatttatatctaaaagaaaaccgtacgagag

SEQ ID NO: 3318 - DNA, 3189 bp, Zea Mays
gttataagttcttaacagcaaatggaaatgagaacatcggagctacttttacttttgaaactgacatatgcactgagaaatgtgtactcttatcttttcttggcaagcagtccatggttgtgggaacatctttctttaaatatgcacttatatgtgcaagcacaagaacaaactcaggtggttaaggatgatgaggcccccaaagaagtatctggaaaagataaatcatcagatatgttcccaagaagcaaatgtcaaactcattctgagcacccaattgaatcaagtgcagccactactaggaaacgtgataagcgggaatggaagggaattggtcgggcgggtaatgaaaaatttccacttcgaaatgtactaactgatattcttcacggggaagagaaaaaatctcaaaagtccaatgaaatacgatacccttcatcaaaacaacagaatggcagaaagcgtgacagggatgatgaaccacaacaagcaaagagagacacctcatcacgccccatgcttggtggtggtgcttcccgtcgtcttctacagtttgctgttcgagatgcagtaaaagctgtacagccagccagcacctctgctgaaccagcatccaagcgtctgcgctctgtggttgccactacttctgcagagaacatgcgtgataggagatcagaaaaatctcaggactacctgaacgatagaagatcagaaagatctcaagataactcgagtgacagaagatcagaaagaactagaccaatgctacaggtacaaggagctgctttagctcttagagctgcagcggaagctgctgcagattctacaaaggctagatctactggaagtgttttcaagcgattgggtcaagggaatgttgtgaaacaaccatctcgttctcgtgaagagaagagagattatgctgattttgagccagttacgaccgcaaatgaacatggttctgatcgatatgttaataatgaggaatctgaagaggaatatagagagctaaccatggctgatagggtagcaggaatgaatgttgattcgggctctgaagatgatgtggaccgagatgagggggttacaagataccaaacttctatttcacatgaagatactttctcatcatttgcagagaagaaaactgtatcggcacaatgcagtgttgaactagagaccgatgcaataaggccttcaagtgtgaatcacgaggagcaacctgtcccttcattaacaaatacaacaagtaaagctgtgtctatttctgttgatgtaaatatggtggaacctcccagttatgaaacaccaaaagatgttcatgttgtggagaagccttatgttgcacccatgaattcaaatgccacaagtgtggctaccaataccaaagaattaggccatgcagaagttcaaaaggattctcagcggtctgcaccatctgttccggtttcatatagcacatcacatccgacagtggatgcagattcgagaacactttatgttagcaatgttcactttgctgccaccaaggactcattatctcgccatttcaacaagtttggtgcagtactgaaagtagtcattgtcactaatgctgcaacgggtcagccaacagggtctgcctatgtagagttcttacacaaagaatcagctgaacgagcgttgtcgttgaatggcacatcatttatgactcgtattctcaaggttgttcgacgaagttctcatgaagcagctcatttttatggttggcctggtattggacgatcatcattatatggtaggcatggtaggatggcatacccaagagctgttcaccccggtggttcctttagagggcgtgctccgatgaaagctggcgctagaagtttacagtggaaacgggagccttcaggcactgattcaagtgcaggtgcgaaaaatgacatgagtgtgccattttcctgtgaacaggtcctcccgccggcaacataggggagcatactatagctgatataatgagaactgaatggtatgttactcgtcgcccctaatggctgaatatggaaagcaagctgagaagattgttccttcctgatgcagcgtaaaacaaaagtccgaaaaaacatgaaaatacaaaaaaaacaacaactaaaacttaaggaaaaaaagagggggagtttggcattaggatatggcttatcattctggtaaccggattgggtcgtctttgccatatgcgagtaggatgacagcctgagcaattttctgtggactccagctatctgaaaaaaggattcacattcgaaataatcacaacatttgggttgtgttggatggaagatgcttatcagtagaacaagatgggcagattttggacgaggtaagcctcaactgtatagaagtaacctatcaatctgtacccttatctgaatcaatctctttcccaacctgaaaagaaaaaaaaagccaacacaaatgatgtgtcttcttctgttttttttactccatgaactgttatttattgtactgattgttgatttttagttggacattcaatttgttgtcaaacagtttaacaatgattcttccgtgtggtttataattagattcaccgtgctgcctgacttacaaaatccagtttactgtctgatgagaatgcagtttatactcgcgatgtcttaccaaggttcttgtatatttatgggttggcctgcctgtccgaatctttcttgcacattatatgcttttcattcaatgatgcagctactcatcatgtgggttgacactgctcgtcgttggaggacttgtatatatctttttttgcggggaggacttgtatatatctggccattagtttactgactaatggtgcatgctttgggaaaagtaatttgttggaagcttatattaactctaaaaaggcaaaaaatggcctttttcttctgtcttgtttccttggaatcacaatgctttatgtggtaaacatctttggttctcggatgggtgcgggtatggttgcgtaggagcaaccgttatgcatttatgtactctcaagtattctagtcactttaggtttataaatgtatatatggatatggacacaggatgtacttgatatgtgcgcgatgtataggtaggttgctacgtagtctagctgtagccaagcatctgcagttatcaatttatatctaaaagaaaaccgtacgagag

SEQ ID NO: 3319 - DNA, 958 bp, Zea Mays
gtttcgtatcagcctactacagcccgattcacttcgacagcccacatcttgaagctccaagtgcatcccggcccagtccagtccagcctttcctctcctgccccgtctcccgttcccacagcacagcctccatctcccaatctcgcaggcgacgccgacgcgttccaccggcggcaccgatgcgggcgatctcgacggccgcggggggcatgctgcgcgcgcggctccgctcctcgtcccgcgtgcgcggcggcggcgatggcgcggggcgatggacgacgccggggcacgaggaaaggcccaaggggtacctcttcaaccgcccgccgccgccgccgggggagacgcggaagtgggaggactgggagctgccctgttacatcacctccttcctcaccgtcgtcatcctcggcgtcggcctcaacgccaagcccgacctcacgatcgagacctgggcgcacgagaaggcgctggaacgcctcaagcagcaggagctagccgccgtctccggaggcggtgacgccgatgccgacgccgagtgatccgctgagtgattaaggagcgtcgtcgccgactcacaagtgatatggtggagattttatcatgtataaaggactgggaattagcggactcacatatgcaacacaatgtggagaaggacaccaaagaaatggaacttatacatgaaagtatgatccttgaagatgcaacctctgtttgaaatgtttgtaatgaacacttatttgtattctgtactgtggactgtaatgaacactattactttaatttagagctagctgtactcttttttcctttctaaggttttctcatgaggtgtgagtttttacctagaaaagtttttaacgaggcaacattgcacattagctccaaacctaattaaatatctattttcctgaagtattaatgttatgctttgaaatatggacttgtaattgtg

SEQ ID NO: 3320 - DNA, 2684 bp, Zea Mays
cgcacactcgccttcctgacgtcggttggatttaagcagagcgcagaggagagcaaccactcgcccgctcgcccaccacgatctccctcccctccgcacgccgcacggggcgttgcagacccccagccaaaggcaggccgcgacccggagcacgccggccggtcgcgggcgtcgtcgtcgcctcccgcgccgccgccctgctgctcgctcccgcattggatcgcgctgcggttggcgactcggtgtggtctgctgctggtgactgaagccggcccacgcggagacggcatcaagtttctaacaatttgaagtatcccgaaatgggcgcaagagataacggggaggggagagatgagaagagggggactggatcagattatgtacctgctagagactccttttcatcacaaggtgagtctcgggttccaaagaggctcggtaaaaaggagtcaaaagataatagcccccgaacgaccaaaagcagcgccagccgtcaagctcaaaacaagctgcaacataaaggattaaacaatgtacagaacaagcctcagaaacaaaagaaaacagttagtgctgctaaggctgttgacgttagaaaaccagatattacaagaattccttcccgccctccatcagaattgtctgaggaaacagacgatataatcagtgatgctggaactgttgatgatagaggcactgaggaggccaaggagatcaatgtgttagatgaagctccacgctgtgatcagagtactggtactgatgatgaaattcctgatattgaagacaaggtagttgatcatggaaaatcagttgtagatcaaggcaatgaggaattagtgctgaaaatcgacaagttggaacaagaacttcgtgaagttgctgctcttgaagtttccctgtactctgtagtgcccgagcatggaagttcagcacataagttgcacaccccagctcggcgtctgtctaggttatatatccatgcatccaagtcttggtctgaagataagagagcttcggtagcaaaaagcattgcttctggtcttgttcttgttgcaaagtccagtagcaatgatgcttcgagttgtcctcagggagataattgtacaaacttttggcatctcacatcaatttactccatccatgacgaatatgagcatgaatggtggtgccaaaaaacttggtgggaaatctatgacaatgctgtggagaaacaactacaatggcacgcaagccaactttgctgcgaggctgatgccagatgattggcaggaaacaagtacacttttggctgcattagagaagattgagtcttggatattttctcgcattgttgagacagtatggtggcaggcactaactcctcacatgcaaaaacgggcagaaggatcatcaactccaaaggctggtagagtgctaggtcctgctttgggtgatcagcagcagggcaccttttctgttaacctgtggaaggctgcgtttcaggacgcattcagcagaatgtgccccctcagtgctggcagacatgagtgtggctgtttaccagtattagcaaaactggtgatggagcagtgtgtagcccgtttggatgttgccatgttcaatgccatcctacgtgaatcagcaagtgagataccaacagaccctatatctgacccaattgttgacccaaaagtcctaccaattccagctggtgatctaagctttgggtcaggcgcgcagctgaagaactctattggaaactggtccagatggctgacagataagcttggcatagatcatgatgattctgaggacataggagatgttgaagacgaaagaagagccgcagctgaaacgaaatcgtttcaacttctcaatgagctaagtgatctcctgatgctcccaaaggacatgctccttgaaaaatctatcaggaaagaggtttgtccctcaattggccttcagttagtgactaggatcctgtgcaacttcaccccagatgagttttgccctgatccggttccaagcacggtcttagaagagctgaattccgagagcttgctggagcgtcacgccaacaaagacgtgaccagtgtgtttccgtgcaccgctgcccctatagtgtaccgcacaccttcaacgttggacgcggcagagagagcggcagacataggaggtggcgcgaagctggacaggaaagcctcaatggtgcagaggagagggtacaccagtgacgacgaccttgacgacctggattctcccctcgcatccctaatcgacaggagcgccccaccttctccgtcgaacggtttggcacacttcagtgctgggagaggagtttccatggagaatacaagatacacgctcctaagagaagtatgggggctggagcaacggtgatggatgatgacgagcctgtaaaacctaaaatctcttctactgccacccaaatgagagcacaagaaggcctatttgtgtggggtcttcagcaatctctacagtaaaaatgcaacacttccttgtactgtacattcccacgatcctatgtatcttagctcttttgtagtatatagcagcaaaagagggtgtcggcaaagatacagatacagtattgagttaaaattctataatgatatgacattctcttcacctaccaatctgatgggcacttgagacgcttacctttgagctgtcgccactat

SEQ ID NO: 3321 - DNA, 2451 bp, Zea Mays
ccgcgatccgcatttctgaatcccggcgcctagccgttgtcatgggcaggccaggcatcaagtttctaacaatttgaagtatcccgaaatgggcgcaagagataacggggaggggagagatgagaagagggggactggatcagattatgtacctgctagagactccttttcatcacaaggtgagtctcgggttccaaagaggctcggtaaaaaggagtcaaaagataatagcccccgaacgaccaaaagcagcgccagccgtcaagctcaaaacaagctgcaacataaaggattaaacaatgtacagaacaagcctcagaaacaaaagaaaacagttagtgctgctaaggctgttgacgttagaaaaccagatattacaagaattccttcccgccctccatcagaattgtctgaggaaacagacgatataatcagtgatgctggaactgttgatgatagaggcactgaggaggccaaggagatcaatgtgttagatgaagctccacgctgtgatcagagtactggtactgatgatgaaattcctgatattgaagacaaggtagttgatcatggaaaatcagttgtagatcaaggcaatgaggaattagtgctgaaaatcgacaagttggaacaagaacttcgtgaagttgctgctcttgaagtttccctgtactctgtagtgcccgagcatggaagttcagcacataagttgcacaccccagctcggcgtctgtctaggttatatatccatgcatccaagtcttggtctgaagataagagagcttcggtagcaaaaagcattgcttctggtcttgttcttgttgcaaagtccagtagcaatgatgcttcgagttgtcctcagggagataattgtacaaacttttggcatctcacatcaatttactccatccatgacgaatatgagcatgaatggtggtgccaaaaaacttggtgggaaatctatgacaatgctgtggagaaacaactacaatggcacgcaagccaactttgctgcgaggctgatgccagatgattggcaggaaacaagtacacttttggctgcattagagaagattgagtcttggatattttctcgcattgttgagacagtatggtggcaggcactaactcctcacatgcaaaaacgggcagaaggatcatcaactccaaaggctggtagagtgctaggtcctgctttgggtgatcagcagcagggcaccttttctgttaacctgtggaaggctgcgtttcaggacgcattcagcagaatgtgccccctcagtgctggcagacatgagtgtggctgtttaccagtattagcaaaactggtgatggagcagtgtgtagcccgtttggatgttgccatgttcaatgccatcctacgtgaatcagcaagtgagataccaacagaccctatatctgacccaattgttgacccaaaagtcctaccaattccagctggtgatctaagctttgggtcaggcgcgcagctgaagaactctattggaaactggtccagatggctgacagataagcttggcatagatcatgatgattctgaggacataggagatgttgaagacgaaagaagagccgcagctgaaacgaaatcgtttcaacttctcaatgagctaagtgatctcctgatgctcccaaaggacatgctccttgaaaaatctatcaggaaagaggtttgtccctcaattggccttcagttagtgactaggatcctgtgcaacttcaccccagatgagttttgccctgatccggttccaagcacggtcttagaagagctgaattccgaggcttgctggagcgtcacgccaacaaagacgtgaccagtgtgtttccgtgcaccgctgcccctatagtgtaccgcacaccttcaacgttggacgcggcagagagagcggcagacataggaggtggcgcgaagctggacaggaaagcctcaatggtgcagaggagagggtacaccagtgacgacgaccttgacgacctggattctcccctcgcatccctaatcgacaggagcgccccaccttctccgtcgaacggtttggcacacttcagtgctgggagaggagtttccatggagaatacaagatacacgctcctaagagaagtatgggggctggagcaacggtgatggatgatgacgagcctgtaaaacctaaaatctcttctactgccacccaaatgagagcacaagaaggcctatttgtgtggggtcttcagcaatctctacagtaaaaatgcaacacttccttgtactgtacattcccacgatcctatgtatcttagctcttttgtagtatatagcagcaaaagagggtgtcggcaaagatacagatacagtattgagttaaaattctataatgatatgacattctcttcacctaccaatctgatgggcacttgagacgcttacctttgagctgtcgccactat

SEQ ID NO: 3322 - DNA, 2047 bp, Zea Mays
ctcgttcgttagcttgtcatatcgcgtctgcgacgactgacgaagccatggattcgcgctgtggattcatgccatcgaataacggttcaccctgtaaaagggttcacccgagaatgtgatgttatctgaatgactggatccggcggacacctctttcggcgatccgtggcttcccttgcgccccatgttttctcaagatttgcgttagttgactactctagtctagactgagggcaagtaaagaataaaaccatatgtgttgcgttgtttagtactttagtaggcaaccaccatataagaaggcaggatttgcgttgctcagtgtggcttcctgaatgtgaagcgagtcgtgcagtcgacaacgttgctgtttctgttgtcattgtcttggtgacgccgatatcctgcgctcttgtggataatttcaaggttcaagacacactatataaattgttgttgccggtatgcgtgtgtttaagcttgacattccttcacacgaaaaatcaaggataggctggaactggaaaaacatgcatcaaaagataggaggtgtagctggtggactctgctttggtttctcggttactggagtagcaagtgccgaggttcctatcattagagtcaaagacaatgccgagacttcgtcatcatctaccagttcaactcatggaaaggaagtgtacacagattattctgtcacaggtgagaaatcctcactttttttttgtcttaaagcttcatgaatcatgttcagccttttatgcttcatagttataatagaagaatgagcattgacctcattacttgtgattgagttacatggatccccaggtattcctggagatggaaggtgtttattccgctccgtggtgcatggtgcatgcattagatcagggagaccaatacctaatgaagatcttcagagaaaactagctgatgaattgagagcaacggtcgcagatgaatttgtcaagaggcggaaagagaccgaatggttcgttgagggggattttgatacatatgtatcccatattagggagccacatgtgtggggaggcgagccagaattgttcatggcgtcccatgttcttcagatgccaataacggtttacatgcgcgacgaggatgctggcggtctgatagcaatcgcagagtatggccagcagtatggtaaagaagacccaatccaagtcctgtatcatggttttggccattacgacgctctacagatcccagcaaaggttggatcgaagaggaaactgtagacgctgcgcgccgcgagcttgaggtacgctccttgttccagtgtttatacaaccttgtcgaacactcatgctatatgcatgcgagtgtggaagaagacaagcttaacatgaaatggcgttaactcgccgccatgcataaatgttattacatgattcatgtacttccccaggagcagatgagttggaacacttcacttgttgtgttttctctctcctcccatatcatctatttcccattcataatttgatacttaattccaggtgcattcgttgggcaaccatctaacctcctactactacagagaaaattcggaaacaataagctgcatgcatgcatgcattgagatgtgtacctgtacaaaatgtcaatccaagcttcggatgctgaatctgtacaccatgccctgaaaaccgcacttgtgtagtttgtgtgactggtacagtagaagatagaaggggcgccggggacccatttaccatactctgatgactgcaagtacgttcatttagagtgaagtaagctacacagctcaccagttggtccagacgtccagtgagcgtacatgttttgaatgaggggcatgtggagagcacatagacagttgagtccggcactctcctggatcggaattgaattttatttgcagcataatcatgtgtggttctccaactgaaccatagcctcgttcttctcacccccttcaaaaaaaacgaggggctggctggctggctggtagtagtagtaacctgcttgttagctggactggtgatttcaaaccgtg

SEQ ID NO: 3323 - DNA, 6897 bp, Zea Mays
caaaaagtcgctcgaagcgagtgtgccgggtccagtccagccatcgcggtcctcccctgtattgagcacctgtcctgtcctgcatacccagagatagattgcgctgcctcctctttcttctgaaatggcaacacactcaacctcccataaatggccgatatataaacacgacacgcacacctaggtagctagccactcgccacccacgcaagcgagcgagcgacgccgaggcgcgcagatcggaatccccgcccccggttcctcctcgctcatcacgccgtccaccggctaccggaaatccacgtcccacagccggctcgttgcgctcgcaaatggccacgagggccgcggaggcgccatctcccccgccgccgagagaagaaaggacatgagcaaactctagatagcgaagcggttgggcttcctcctgatctcctcccgcagctcccgctccagcctgcacctgcgaaacacgagggagatgcctgtgcccctctctcccctgacgcccctccttcccgcgcccctccctcccccaccacctcttcctccacctgggttgcaggggctctcacgcaaagcccagaagccggcgagcagaaaatctcattctccctggacaaattcgcaaaagagcaacgcagggggaaatcggcctggttcgtggattcctgaagagcatggatgggccgtgaaagcggatgacccgaggaaggggcagccaaggtgtctcgactcgggctccatctccagggggtggatcgcagcccagaaggctggcaacaagttgaacgaggtagggtttcctcttgatcttattggtgctcgatccccagaacacctgtccgtgcttctagcttcgctgtgggcgctgcctacccacaagcggagagtttctctggagggtggcgatccatccctttccgcccgccagactttggtcctcagccaggagggggagggggtgagctcgctggtgaaacttcagagaagatggacccaaggctgaaaccctcacagtgggatcggtggaactctaaggaggcgaggaatccacccaatgcttggggaagacaccgcaatatgagctggcgactccgaccctcacacgtgaaatctgagggagaggtgattggatcatcatctggtgacatgaataacccaggtaaccctaaatccccgactctccctgggatgctggaggtagaaggaagtcgtcgcacattctgccaaaaatgcggtgatgaaggtcatcatgccagagattgttctagggctttgtggtgtgatatctgcatgaaagagactcatgtaactgcgaaatgtgtgtggccaagacagaacaaacctattatgccattagtgggaatggcagcagatggtttgagtttttactcctctcagtttggaaagaacatttccaaaaaaaacaaagaggagcctgttgggattagtcaaaattgtggaggggattgtgtctgctggtgatctggagagggattttagcttccattttccatggggacgaccctggaaagctgataagtgtcatcttggtttcctgatgcaattcccatcacaggacaggcttgatgaactgaccaactttactgagttgaagatgaagatttcaggggttaagattgtagtaactgtgtggaactctcaggttttggctaaatccagattgcactcagtttggattaaggccgataatgtgcctgaagaattgttgaactatcaagccatatgtgagttgggttcggttttaggagctgtggaagaagtggatctggccgctctgaaatccaatgacatggttagatttaaagtgcatgtgaagagcatcgcgaggattccacctgtcattgagataggagtcaagcatctcttatatgacatttattttaaggtggaaaaggtagaaactgaaggatggaatgaggaagaagctagtatgagaaagagatcttctgttgatttacagccgaacgagttcggtttgggtgacaatggagggaaaaaacccaaaagtgatattcatgaaagtgggaaggtccctctgattcctgtaaatcagaaaacatcttcctctgagtttaaagaagcaatgtttgctacagatccacaaaccaatgaatgtgacaaatgcaatgaagagggggaaaatctgggggatgaaaacaatgagaaggtagactttgaagacagtgatgaagaccttcttagttcccaagagcttaacaactttgtgaaaggaatgggtgttgagatagcggatgagcaggaattggagatggatgagggtgaactcctcaaagttcaagatgagcaacaaactggtaaggataaaaaaggtaaagccaagttggtagatcaagttgaaggcacaaggaaaagtagcagactggaggcaaatgaagataccaggattacggacaaagccatcaacagagctgaagcgaaaggatgccttcttgaacataggtaacaaccccaaccctttctctatcttaaattctgaaaacagcttgctgattgatatagctaacaaacttggggtgaatctgggaaaagatgataatgaaagattagataacttagaaatgatcaagtgcttagaagaagaacgtgccagggctattatgccagacgttggtgctgatgatattgataataaattcgctggtaatttagtggagaatgaggatccttcgattatggatagaattgtccaagagatgatagagagtgaatcagaagggaaaaagaacaaaacaccaaagaagaagaaaaaatacagaaagagaaaaaatattctctgaggaaaaaaaagggttctccaaaaattagatatacatctaataataggagatgcctgaagcgtcatcaatgggacaaccaagtatctgaatgaaaggggtaatatggaactgccaggggcttgccaaacccgggaaatttgagttcattcatgaactcataaacaaggaaaaaattgatttcattagtctgcaagagactaataagaaagaatttgggcagaactggttactgtctttaagcagtaataagttgtttaagtggatttcttctccccctaatggtagatcagggggtttgctggtgggttttaattcagacactttggatgtctcggacattcaaatcaaggacttcatgattgtgtgtcgggtgcatcacaagattaaaaatctttcttggacttttgctaatgtctatggggcagctcaagcggttaataaagataatttcttaagcgagttagctgccacttgctcccactgtagtggtcccattctgctaggtggtgactttaacattttgaggagtagtgatgacaaaaataagccttatgttgccaatagatggacgcttctctttaatgccatcattgatcagcacggtctggttgagctagatctaactgataggaagtttacatggtccaataatagaaatcctcccacttttgaaaaacttgacagatttctagtgagccctgattgggatttattatacagcaatgctagggttagagggctgaacagatttctttcagaccatgttcctttgatgttaagcactgaggattcaaaaaaacctgttgctacttttagatatgagttgctctggcataaaaaacctgattttagagagttggtttgtagaagttgggagcttccaataaggagtaaaggaagtcttaacatttggaaagagaaagttaagagactcaaaaaataccttaagggttggaatttcaatgaagaagggagtaacaagagaaggagagaagatcttttgaagaaaatcaatgggttagacattaaaaatgaagaaggggggctgtcggataatgaaaaaatggcgaaaaaagattgtgagcttttgcttaataaacttctctttgaggaagagatgaaaatgaagcagagagctcgtgagaggttaattacggaaggagatgaaaatacaaattattttcatcaaaaagccaatctcaatagaaggagaatcaggattcatgctctgatggataaggagaacttggttgaagaggaggatgagaagaatcggattgctactaacttctataaaaacttgtttggcccttctcctatctctgccatctatatggaggatagaaacatggataagattagcgatgaggacagatgtatcctcactgccccttttacagagaccgaggttaagcatgtagtagacaactttaaacacaatagtgccccaggccctgatggtctccctgcagaattttttaaggacttctgggacattattaaaaaggacatcatgaagttgtttgaagactttttcaaaggaaaactggacattaaaagattaaactatggtgttgtcactttaattcctaaagtggacaaggctatagatatgaaaaactttagacccatttgtcttttaaatgtttgctataaaatgatcaccaaagtccttaacaataggttgtcaaattgtatcactaaggtgattagtgataaccagtttggctttattaaaggaagatatattttggatggtgttgtggcccttcatgagattattcatgaagtaaaaaagaaaaagcaagatgggatcattttgaaaattgattttgaaaaggcgtatgacaaagttaattggcatttcttatataaaatgcttgagataaaaggatttggcgagaaatggggagactgggtgatgaaaacagttagtgggggcaaggttgccgttaggactaacaatctaactggccccttcttctctacgcataagggggtaagacagggagatcccttatctccgttgctcttcaacattgttgtggatgatctttcttgcatgattaaaagggcccaggaggttggtcttttggtgggccttgttcctcacatcattgaaaatggttgtgcttgtttacaatatgcagatgacactatcttccttcttcaggataacccgatgtatgcaaggaatctgaaatttgttttggtcctttttgagcagatgtcaggcctcaaaattaactttcacaagagtgagattctgtgctttggcaaagccgtagatatgaagaatttgtacgctgaaatcttcacttgtcctatcagaaatttacccatgaactacttgggcatccccgtagattacaagactcttagaatctcccattgggccaaaatggaagaaaaaatggaaaaaaactgggggtctggcaaggaaggtatctcagccttggggggaggctggtgctgattaacagtagtttgtctagcatccctttatacatgctttccattttctgggctcctgttagtgtgctcaaaaaactggacatgtatagaaggaggatgctatggcagggggggaaaaagagcaataaaccccatctggtgaactgggatattgtttgtaggcctaaggatcaaggaggtctgggaattttagaccttagatgcatgaacctttgcttactggccaaatggtggaggagtttggagaataaggagggcttgtggcaaaaaatagtaaggtttaaatatatcagaggaagacctttgagtttgatgcaaaggaaacaaggggactctcatttctggaaaagcattctggaagtaaaagatgtgttttacaaaaactgcaaaagaatcattggagatggtaaatcaaccagtttttggaatgattgttggtgtgggaatactcctctctcggtaagatttaaaagacttcatgacttatctcttaataaagagataagtgtagaaaaggtgataagtacgaattctgaatccttaaccttcagaaggaggctagtgggagctggggctgacaatctcaaggagatgatatcctcatatgaggacatctgtcttaatgattctagagataatgttatttggttactagataaaaaaggattttcggtcaaatccctttaccttaattgtcgaaacaatttgggtcgggtgccttatatgttcatctggaacgctaaaatcccccaaaggataaaagttttcctttggcttcttttgagagacaggattctatccaaggcaaatctgagcaaaaggaattggcaaggaaacatcaattgcacttggtgtgattgcctagaaactacgcagcacatcttctttgactgtcagatagcaaaatttacatggagagtggtgcagatggtgctacatcccatttgtattcccatgaatcccagtgagatgtttagccactggctccatcttttcaataaacgagacaggaatttgttgacagtgggatgtagtgcagttctttggactctttggaaaataagaaacgaagcttgttttgatgataaaagaatagttaatacgttagacatctttatattgtgttgtttttggatgaactcatggattttattacagaaaaaatcggcaagaaggatgctggaggaaagaagcaatcatatcagaaaaatggctagtgagttcttcagtcgagcttggggatggtctccagttgacaggaggctgacacagtgatcggttgagtgggggatcctttttggcgatgatgcttctttctgttcttgaacctagagactcttttggctattatatcaggatgtcggtctgtaataatgtcttggttaaatcccctttcttgtcttagtcgtcttggtttggcaatagattttgggtcaggtctgatcatagatgttgctggattagttgctgagcttttgttgccaatggcttgttttggctaagacatttctggtgtgtgtctgtatgtgtttcctgtttcttaatgaaataggggggaaaccccttttcgtcaaaaaaaaaaaataaacacgacacg

SEQ ID NO: 3324 - DNA, 1235 bp, Zea Mays
caaaaagtcgctcgaagcgagtgtgccgggtccagtccagccatcgcggtcctcccctgtattgagcacctgtcctgtcctgcatacccagagatagattgcgctgcctcctctttcttctgaaatggcaacacactcaacctcccataaatggccgatatataaacacgacacgcacacctaggtagctagccactcgccacccacgcaagcgagcgagcgacgccgaggcgcgcagatcggaatccccgcccccggttcctcctcgctcatcacgccgtccaccggctaccggaaatccacgtcccacagccggctcgttgcgctcgcaaatggccacgagggccgcggaggcgccatctcccccgccgccgagagaagaaaggacatgagcaaactctagatagcgaagcggttgggcttcctcctgatctcctcccgcagctcccgctccagcctgcacctgcgaaacacgagggagatgcctgtgcccctctctcccctgacgcccctccttcccgcgcccctccctcccccaccacctcttcctccacctgggttgcaggggctctcacgcaaagcccagaagccggcgagcagaaaatctcattctccctggacaaattcgcaaaagagcaacgcagggggaaatcggcctggttcgtggattcctgaagagcatggatgggccgtgaaagcggatgacccgaggaaggggcagccaaggtgtctcgactcgggctccatctccagggggtggatcgcagcccagaaggctggcaacaagttgaacgagaaaaaatcggcaagaaggatgctggaggaaagaagcaatcatatcagaaaaatggctagtgagttcttcagtcgagcttggggatggtctccagttgacaggaggctgacacagtgatcggttgagtgggggatcctttttggcgatgatgcttctttctgttcttgaacctagagactcttttggctattatatcaggatgtcggtctgtaataatgtcttggttaaatcccctttcttgtcttagtcgtcttggtttggcaatagattttgggtcaggtctgatcatagatgttgctggattagttgctgagcttttgttgccaatggcttgttttggctaagacatttctggtgtgtgtctgtatgtgtttcctgtttcttaatgaaataggggggaaaccccttttcgtcaaaaaaaaaaaataaacacgacacg

SEQ ID NO: 3325 - DNA, 2643 bp, Zea Mays
accggctaccggaaatccacgtcccacagccggctcgttgcgctcgcaaatggccacgagggccgcggaggcgccatctcccccgccgccgagagaagaaaggacatgagcaaactctagatagcgaagcggttgggcttcctcctgatctcctcccgcagctcccgctccagcctgcacctgcgaaacacgagggagatgcctgtgcccctctctcccctgacgcccctccttcccgcgcccctccctcccccaccacctcttcctccacctgggttgcaggggctctcacgcaaagcccagaagccggcgagcagaaaatctcattctccctggacaaattcgcaaaagagcaacgcagggggaaatcggcctggttcgtggattcctgaagagcatggatgggccgtgaaagcggatgacccgaggaaggggcagccaaggtgtctcgactcgggctccatctccagggggtggatcgcagcccagaaggctggcaacaagttgaacgaggtagggtttcctcttgatcttattggtgctcgatccccagaacacctgtccgtgcttctagcttcgctgtgggcgctgcctacccacaagcggagagtttctctggagggtggcgatccatccctttccgcccgccagactttggtcctcagccaggagggggagggggtgagctcgctggtgaaacttcagagaagatggacccaaggctgaaaccctcacagtgggatcggtggaactctaaggaggcgaggaatccacccaatgcttggggaagacaccgcaatatgagctggcgactccgaccctcacacgtgaaatctgagggagaggtgattggatcatcatctggtgacatgaataacccaggtaaccctaaatccccgactctccctgggatgctggaggtagaaggaagtcgtcgcacattctgccaaaaatgcggtgatgaaggtcatcatgccagagattgttctagggctttgtggtgtgatatctgcatgaaagagactcatgtaactgcgaaatgtgtgtggccaagacagaacaaacctattatgccattagtgggaatggcagcagatggtttgagtttttactcctctcagtttggaaagaacatttccaaaaaaaacaaagaggagcctgttgggattagtcaaaattgtggaggggattgtgtctgctggtgatctggagagggattttagcttccattttccatggggacgaccctggaaagctgataagtgtcatcttggtttcctgatgcaattcccatcacaggacaggcttgatgaactgaccaactttactgagttgaagatgaagatttcaggggttaagattgtagtaactgtgtggaactctcaggttttggctaaatccagattgcactcagtttggattaaggccgataatgtgcctgaagaattgttgaactatcaagccatatgtgagttgggttcggttttaggagctgtggaagaagtggatctggccgctctgaaatccaatgacatggttagatttaaagtgcatgtgaagagcatcgcgaggattccacctgtcattgagataggagtcaagcatctcttatatgacatttattttaaggtggaaaaggtagaaactgaaggatggaatgaggaagaagctagtatgagaaagagatcttctgttgatttacagccgaacgagttcggtttgggtgacaatggagggaaaaaacccaaaagtgatattcatgaaagtgggaaggtccctctgattcctgtaaatcagaaaacatcttcctctgagtttaaagaagcaatgtttgctacagatccacaaaccaatgaatgtgacaaatgcaatgaagagggggaaaatctgggggatgaaaacaatgagaaggtagactttgaagacagtgatgaagaccttcttagttcccaagagcttaacaactttgtgaaaggaatgggtgttgagatagcggatgagcaggaattggagatggatgagggtgaactcctcaaagttcaagatgagcaacaaactggtaaggataaaaaaggtaaagccaagttggtagatcaagttgaaggcacaaggaaaagtagcagactggaggcaaatgaagataccaggattacggacaaagccatcaacagagctgaagcgaaaggatgccttcttgaacatagaaaaaatcggcaagaaggatgctggaggaaagaagcaatcatatcagaaaaatggctagtgagttcttcagtcgagcttggggatggtctccagttgacaggaggctgacacagtgatcggttgagtgggggatcctttttggcgatgatgcttctttctgttcttgaacctagagactcttttggctattatatcaggatgtcggtctgtaataatgtcttggttaaatcccctttcttgtcttagtcgtcttggtttggcaatagattttgggtcaggtctgatcatagatgttgctggattagttgctgagcttttgttgccaatggcttgttttggctaagacatttctggtgtgtgtctgtatgtgtttcctgtttcttaatgaaataggggggaaaccccttttcgtcaaaaaaaaaaaataaacacgacacg

SEQ ID NO: 3326 - DNA, 1539 bp, Zea Mays
ggaagtcttaacatttggaaagagaaagttaagagactcaaaaaataccttaagggttggaatttcaatgaagaagggagtaacaagagaaggagagaagatcttttgaagaaaatcaatgggttagacattaaaaatgaagaaggggggctgtcggataatgaaaaaatggcgaaaaaagattgtgagcttttgcttaataaacttctctttgaggaagagatgaaaatgaagcagagagctcgtgagaggttaattacggaaggagatgaaaatacaaattattttcatcaaaaagccaatctcaatagaaggagaatcaggattcatgctctgatggataaggagaacttggttgaagaggaggatgagaagaatcggattgctactaacttctataaaaacttgtttggcccttctcctatctctgccatctatatggaggatagaaacatggataagattagcgatgaggacagatgtatcctcactgccccttttacagagaccgaggttaagcatgtagtagacaactttaaacacaatagtgccccaggccctgatggtctccctgcagaattttttaaggacttctgggacattattaaaaaggacatcatgaagttgtttgaagactttttcaaaggaaaactggacattaaaagattaaactatggtgttgtcactttaattcctaaagtggacaaggctatagatatgaaaaactttagacccatttgtcttttaaatgtttgctataaaatgatcaccaaagtccttaacaataggttgtcaaattgtatcactaaggtgattagtgataaccagtttggctttattaaaggaagatatattttggatggtgttgtggcccttcatgagattattcatgaagtaaaaaagaaaaagcaagatgggatcattttgaaaattgattttgaaaaggcgtatgacaaagttaattggcatttcttatataaaatgcttgagataaaaggatttggcgagaaatggggagactgggtgatgaaaacagttagtgggggcaaggttgccgttaggactaacaatctaactggccccttcttctctacgcataagggggtaagacagggagatcccttatctccgttgctcttcaacattgttgtggatgatctttcttgcatgattaaaagggcccaggaggttggtcttttggtgggccttgttcctcacatcattgaaaatggttgtgcttgtttacaatatgcagatgacactatcttccttcttcaggataacccgatgtatgcaaggaatctgaaatttgttttggtcctttttgagcagatgtcaggcctcaaaattaactttcacaagagtgagattctgtgctttggcaaagccgtagatatgaagaatttgtacgctgaaatcttcacttgtcctatcagaaatttacccatgaactacttgggcatccccgtagattacaagactcttagaatctcccattgggccaaaatggaagaaaaaatggaaaaaaactgggggtct

SEQ ID NO: 3327 - DNA, 763 bp, Zea Mays
aaaggaattggcaaggaaacatcaattgcacttggtgtgattgcctagaaactacgcagcacatcttctttgactgtcagatagcaaaatttacatggagagtggtgcagatggtgctacatcccatttgtattcccatgaatcccagtgagatgtttagccactggctccatcttttcaataaacgagacaggaatttgttgacagtgggatgtagtgcagttctttggactctttggaaaataagaaacgaagcttgttttgatgataaaagaatagttaatacgttagacatctttatattgtgttgtttttggatgaactcatggattttattacagaaaaaatcggcaagaaggatgctggaggaaagaagcaatcatatcagaaaaatggctagtgagttcttcagtcgagcttggggatggtctccagttgacaggaggctgacacagtgatcggttgagtgggggatcctttttggcgatgatgcttctttctgttcttgaacctagagactcttttggctattatatcaggatgtcggtctgtaataatgtcttggttaaatcccctttcttgtcttagtcgtcttggtttggcaatagattttgggtcaggtctgatcatagatgttgctggattagttgctgagcttttgttgccaatggcttgttttggctaagacatttctggtgtgtgtctgtatgtgtttcctgtttcttaatgaaataggggggaaaccccttttcgtcaaaaaaaa

SEQ ID NO: 3328 - DNA, 2659 bp, Zea Mays
cttctgtgttcgggttgcaaagccatacccgctgggaacaaaaaagatccccgcagtaatttcccttctttcctgcagtaatttccacaggcccaatcatttctccagccaacagcttgacatgtgagttcactccacgcagcggagaccagagcttctctacggcgagggagcgccgaggggcaaatccgtcagcgcgggcacatcgcgtcgcctttccggcccccacacctctctctctctctctctctcttcccggtcgacgagcggagagctagcggcggggcgcgcgctgctatttatcgagcacacgggagccacgccgcccgtccctgtctccatcttgccgtcgctcccacgccgccgttccctccgcctgcctcgaccgcctcgtgccgtgcgcgctaaggagggagggagggagggaaagtgaagcaggagggtggaccactgcgcgcgtgcggcgccttcctcctcgaatcaccgccgacagcttctgcagctagcgttatcacccccaccaccccggggctcggattaggatctgagctgaagctgccaggccaggcgatcgagccgatgtacggctcgccggtgtccaaggacctcaacctcccggcgcagccgccgccgatggcctcgtccgggctgctacgctacagatcggcgcccagcgcggtgctcggcggcctctgcgaggaccagctccagctccctgccgccgctccgagcgccgccgacaacgtcttctcaaggttcctgcccgaccaccacatccgggacgacaagccgtcgcctgcccacttcccgagtgcggccgacatggcctcccaccaccagcaggagcaaatgatgttccactcccagtcccagtcccagcaccagcaggagacgggtaggtccgggggcggcctctaccgcaccgtcagctctggcatggaagcgggcggcactggcgtcggcgccgccagcagcctgattcggcagagcagctcccccgccgggttcctggaccatttcggcatggacaacgggtacggggcgatgctgagggcgagcatgggcatggggttccaggacggtggtgccagtgactccctcgcgggcggcggcggcggtagcggcaggctcgggggccagctgagcttctcgtcgcggcaggggtcgctcatgtcccagatctcggagatggacagccaggaggatgtcgtcggagcgagcagccccgacgctggcggcggcggggacgccgcctacatgccggggtacccgatgagctccggcgggtgggacgactcgtcgtcggcgctcttgccggacagcctgcccgcgacgaataaacgcccgcgggactcgttggagcacggcggcgggctggcgcaccagttcagcctccccaagacgtcgtcgtcggaggtggccgccatcgagaagttcctccagttccaggacgccgtgccctgcaaggtccgcgccaagcgcgggtgcgccacgcacccgcgcagcatcgccgagcgggtgaggaggacgaagatcagcgagcggatcaggaagctgcaggagctcgtgcccgacatggacaagcaaaccaacacctccgacatgctggacttggccgtcgactacatcaaggatctccagaagcaggtcaaggtaacgagctccggcggccgccggtctgctttcctcctccagaacccaaattgcaaggtcagagagccagtgacgtccaaatcacggaggctggcctcatcttgccccgccggctgatcgacggcgagcgagggttacctacagttacaaacaacgatatgtcgttgactcttcctcacctagtactagtagtaggaggaggaggagtatctttatcgtcgtttatcatcccttgtgttcacgcgttgcaggcgttgaacgagagccgcgccagctgcacctgcccggcgagcaagcaccagcagcggttctccggctgaagcaccggccgggccggcagtccccatcggtccccggcggctgcgtagcacgctccagtacacagctagtgcagcaaagatggacccaccacaaggcctggagacagacctgactgagaccgagatagagaggaacaccgccatcgtctgcagtgcatgcgcgcgagcagcatgtacagcgccggagcgatcgaggctcgctggactgctggatcgagcagtgtggcatcatcaagtattcaagcgactgggaggaaggaagaaagaatcgagtcatgggaccgaggaggaagaacgaatgaattgtacagtgctgtttctttttttttttttgctgtaaacacttttgctacatctgtgctgctgctgctctccatatgccgttgcccattgttactacgttaagaatcacagtgagatatagatcgaggaaaacttcactactgttaccaccaccatcaccatgcaagctggcggcacagtgccatgcaaaattcactcgtgtgcactgcagaaacatgcataggaacgcctcgcatgtttacatttccaaacaaatgctacaaagatgctcaaagatcgatatgtattggttaaagaaattgcttttaggaatttgtaacagctacttttccaacagctataaattagaagttgatcctatctatcaggcatctagtgtgctc

SEQ ID NO: 3329 - DNA, 1907 bp, Zea Mays
gcaaagccatacccgctgggaacaaaaaagatccccgcagtaatttcccttctttcctgcagtaatttccacaggcccaatcatttctccagccaacagcttgacatgtgagttcactccacgcagcggagaccagagcttctctacggcgagggagcgccgaggggcaaatccgtcagcgcgggcacatcgcgtcgcctttccggcccccacacctctctctctctctctctctcttcccggtcgacgagcggagagctagcggcggggcgcgcgctgctatttatcgagcacacgggagccacgccgcccgtccctgtctccatcttgccgtcgctcccacgccgccgttccctccgcctgcctcgaccgcctcgtgccgtgcgcgctaaggagggagggagggagggaaagtgaagcaggagggtggaccactgcgcgcgtgcggcgccttcctcctcgaatcaccgccgacagcttctgcagctagcgttatcacccccaccaccccggggctcggattaggatctgagctgaagctgccaggccaggcgatcgagccgatgtacggctcgccggtgtccaaggacctcaacctcccggcgcagccgccgccgatggcctcgtccgggctgctacgctacagatcggcgcccagcgcggtgctcggcggcctctgcgaggaccagctccagctccctgccgccgctccgagcgccgccgacaacgtcttctcaaggttcctgcccgaccaccacatccgggacgacaagccgtcgcctgcccacttcccgagtgcggccgacatggcctcccaccaccagcaggagcaaatgatgttccactcccagtcccagtcccagcaccagcaggagacgggtaggtccgggggcggcctctaccgcaccgtcagctctggcatggaagcgggcggcactggcgtcggcgccgccagcagcctgattcggcagagcagctcccccgccgggttcctggaccatttcggcatggacaacggtgaggaggacgaagatcagcgagcggatcaggaagctgcaggagctcgtgcccgacatggacaagcaaaccaacacctccgacatgctggacttggccgtcgactacatcaaggatctccagaagcaggtcaaggcgttgaacgagagccgcgccagctgcacctgcccggcgagcaagcaccagcagcggttctccggctgaagcaccggccgggccggcagtccccatcggtccccggcggctgcgtagcacgctccagtacacagctagtgcagcaaagatggacccaccacaaggcctggagacagacctgactgagaccgagatagagaggaacaccgccatcgtctgcagtgcatgcgcgcgagcagcatgtacagcgccggagcgatcgaggctcgctggactgctggatcgagcagtgtggcatcatcaagtattcaagcgactgggaggaaggaagaaagaatcgagtcatgggaccgaggaggaagaacgaatgaattgtacagtgctgtttctttttttttttttgctgtaaacacttttgctacatctgtgctgctgctgctctccatatgccgttgcccattgttactacgttaagaatcacagtgagatatagatcgaggaaaacttcactactgttaccaccaccatcaccatgcaagctggcggcacagtgccatgcaaaattcactcgtgtgcactgcagaaacatgcataggaacgcctcgcatgtttacatttccaaacaaatgctacaaagatgctcaaagatcgatatgtattggttaaagaaattgcttttaggaatttgtaacagctacttttccaacagctataaattagaagttgatcctatctatcaggcatctagtgtgctc

SEQ ID NO: 3330 - DNA, 2884 bp, Zea Mays
cgccgaggggcaaatccgtcagcgcgggcacatcgcgtcgcctttccggcccccacacctctctctctctctctctctcttcccggtcgacgagcggagagctagcggcggggcgcgcgctgctatttatcgagcacacgggagccacgccgcccgtccctgtctccatcttgccgtcgctcccacgccgccgttccctccgcctgcctcgaccgcctcgtgccgtgcgcgctaaggagggagggagggagggaaagtgaagcaggagggtggaccactgcgcgcgtgcggcgccttcctcctcgaatcaccgccgacagcttctgcagctagcgttatcacccccaccaccccggggctcggattaggatctgagctgaagctgccaggccaggcgatcgagccgatgtacggctcgccggtgtccaaggacctcaacctcccggcgcagccgccgccgatggcctcgtccgggctgctacgctacagatcggcgcccagcgcggtgctcggcggcctctgcgaggaccagctccagctccctgccgccgctccgagcgccgccgacaacgtcttctcaaggttcctgcccgaccaccacatccgggacgacaagccgtcgcctgcccacttcccgagtgcggccgacatggcctcccaccaccagcaggagcaaatgatgttccactcccagtcccagtcccagcaccagcaggagacgggtaggtccgggggcggcctctaccgcaccgtcagctctggcatggaagcgggcggcactggcgtcggcgccgccagcagcctgattcggcagagcagctcccccgccgggttcctggaccatttcggcatggacaacggttggttgctcgtcactcgctctcgctctctctctctccttaaatccggcctccatttggtactgcctcggttgccattcccggcttgcttccacagcctcccagtccagctccttggacgcggaagccgtcatggatggcagcagcaattattgcagttcttgcctggggagggagtctctcctcccccgaaacatttctatttccggaactgacacggagggagggccacccgcccgcatgctctgttgctgttttgcccgattccttcgtccagggtacggggcgatgctgagggcgagcatgggcatggggttccaggacggtggtgccagtgactccctcgcgggcggcggcggcggtagcggcaggctcgggggccagctgagcttctcgtcgcggcaggggtcgctcatgtcccagatctcggagatggacagccaggaggatgtcgtcggagcgagcagccccgacgctggcggcggcggggacgccgcctacatgccggggtacccgatgagctccggcgggtgggacgactcgtcgtcggcgctcttgccggacagcctgcccgcgacgaataaacgcccgcgggactcgttggagcacggcggcgggctggcgcaccagttcagcctccccaagacgtcgtcgtcggaggtggccgccatcgagaagttcctccagttccaggacgccgtgccctgcaaggtccgcgccaagcgcgggtgcgccacgcacccgcgcagcatcgccgagcgggtgaggaggacgaagatcagcgagcggatcaggaagctgcaggagctcgtgcccgacatggacaaggtgactgcacctgcacccaccggtttcagtgcgcgttgagttgctgccatatgctatgccaggaccactccggccggccagccagagctgatgacctacttgcgttcccgttgccttgcagcaaaccaacacctccgacatgctggacttggccgtcgactacatcaaggatctccagaagcaggtcaaggtaacgagctccggcggccgccggtctgctttcctcctccagaacccaaattgcaaggtcagagagccagtgacgtccaaatcacggaggctggcctcatcttgccccgccggctgatcgacggcgagcgagggttacctacagttacaaacaacgatatgtcgttgactcttcctcacctagtactagtagtaggaggaggaggagtatctttatcgtcgtttatcatcccttgtgttcacgcgttgcaggcgttgaacgagagccgcgccagctgcacctgcccggcgagcaagcaccagcagcggttctccggctgaagcaccggccgggccggcagtccccatcggtccccggcggctgcgtagcacgctccagtacacagctagtgcagcaaagatggacccaccacaaggcctggagacagacctgactgagaccgagatagagaggaacaccgccatcgtctgcagtgcatgcgcgcgagcagcatgtacagcgccggagcgatcgaggctcgctggactgctggatcgagcagtgtggcatcatcaagtattcaagcgactgggaggaaggaagaaagaatcgagtcatgggaccgaggaggaagaacgaatgaattgtacagtgctgtttctttttttttttttgctgtaaacacttttgctacatctgtgctgctgctgctctccatatgccgttgcccattgttactacgttaagaatcacagtgagatatagatcgaggaaaacttcactactgttaccaccaccatcaccatgcaagctggcggcacagtgccatgcaaaattcactcgtgtgcactgcagaaacatgcataggaacgcctcgcatgtttacatttccaaacaaatgctacaaagatgctcaaagatcgatatgtattggttaaagaaattgcttttaggaatttgtaacagctacttttccaacagctataaattagaagttgatcctatctatcaggcatctagtgtgctc

SEQ ID NO: 3331 - DNA, 2512 bp, Zea Mays
cgccgaggggcaaatccgtcagcgcgggcacatcgcgtcgcctttccggcccccacacctctctctctctctctctctcttcccggtcgacgagcggagagctagcggcggggcgcgcgctgctatttatcgagcacacgggagccacgccgcccgtccctgtctccatcttgccgtcgctcccacgccgccgttccctccgcctgcctcgaccgcctcgtgccgtgcgcgctaaggagggagggagggagggaaagtgaagcaggagggtggaccactgcgcgcgtgcggcgccttcctcctcgaatcaccgccgacagcttctgcagctagcgttatcacccccaccaccccggggctcggattaggatctgagctgaagctgccaggccaggcgatcgagccgatgtacggctcgccggtgtccaaggacctcaacctcccggcgcagccgccgccgatggcctcgtccgggctgctacgctacagatcggcgcccagcgcggtgctcggcggcctctgcgaggaccagctccagctccctgccgccgctccgagcgccgccgacaacgtcttctcaaggttcctgcccgaccaccacatccgggacgacaagccgtcgcctgcccacttcccgagtgcggccgacatggcctcccaccaccagcaggagcaaatgatgttccactcccagtcccagtcccagcaccagcaggagacgggtaggtccgggggcggcctctaccgcaccgtcagctctggcatggaagcgggcggcactggcgtcggcgccgccagcagcctgattcggcagagcagctcccccgccgggttcctggaccatttcggcatggacaacggttggttgctcgtcactcgctctcgctctctctctctccttaaatccggcctccatttggtactgcctcggttgccattcccggcttgcttccacagcctcccagtccagctccttggacgcggaagccgtcatggatggcagcagcaattattgcagttcttgcctggggagggagtctctcctcccccgaaacatttctatttccggaactgacacggagggagggccacccgcccgcatgctctgttgctgttttgcccgattccttcgtccagggtacggggcgatgctgagggcgagcatgggcatggggttccaggacggtggtgccagtgactccctcgcgggcggcggcggcggtagcggcaggctcgggggccagctgagcttctcgtcgcggcaggggtcgctcatgtcccagatctcggagatggacagccaggaggatgtcgtcggagcgagcagccccgacgctggcggcggcggggacgccgcctacatgccggggtacccgatgagctccggcgggtgggacgactcgtcgtcggcgctcttgccggacagcctgcccgcgacgaataaacgcccgcgggactcgttggagcacggcggcgggctggcgcaccagttcagcctccccaagacgtcgtcgtcggaggtggccgccatcgagaagttcctccagttccaggacgccgtgccctgcaaggtccgcgccaagcgcgggtgcgccacgcacccgcgcagcatcgccgagcgggtgaggaggacgaagatcagcgagcggatcaggaagctgcaggagctcgtgcccgacatggacaagcaaaccaacacctccgacatgctggacttggccgtcgactacatcaaggatctccagaagcaggtcaaggcgttgaacgagagccgcgccagctgcacctgcccggcgagcaagcaccagcagcggttctccggctgaagcaccggccgggccggcagtccccatcggtccccggcggctgcgtagcacgctccagtacacagctagtgcagcaaagatggacccaccacaaggcctggagacagacctgactgagaccgagatagagaggaacaccgccatcgtctgcagtgcatgcgcgcgagcagcatgtacagcgccggagcgatcgaggctcgctggactgctggatcgagcagtgtggcatcatcaagtattcaagcgactgggaggaaggaagaaagaatcgagtcatgggaccgaggaggaagaacgaatgaattgtacagtgctgtttctttttttttttttgctgtaaacacttttgctacatctgtgctgctgctgctctccatatgccgttgcccattgttactacgttaagaatcacagtgagatatagatcgaggaaaacttcactactgttaccaccaccatcaccatgcaagctggcggcacagtgccatgcaaaattcactcgtgtgcactgcagaaacatgcataggaacgcctcgcatgtttacatttccaaacaaatgctacaaagatgctcaaagatcgatatgtattggttaaagaaattgcttttaggaatttgtaacagctacttttccaacagctataaattagaagttgatcctatctatcaggcatctagtgtgctc

SEQ ID NO: 3332 - DNA, 2201 bp, Zea Mays
cgccgaggggcaaatccgtcagcgcgggcacatcgcgtcgcctttccggcccccacacctctctctctctctctctctcttcccggtcgacgagcggagagctagcggcggggcgcgcgctgctatttatcgagcacacgggagccacgccgcccgtccctgtctccatcttgccgtcgctcccacgccgccgttccctccgcctgcctcgaccgcctcgtgccgtgcgcgctaaggagggagggagggagggaaagtgaagcaggagggtggaccactgcgcgcgtgcggcgccttcctcctcgaatcaccgccgacagcttctgcagctagcgttatcacccccaccaccccggggctcggattaggtacgctgttcatgccgtctccacggccaaggaccggggaggagcttctttctctagctgggggatgagcaacaccaagtgatgttccatcatgtttgcttaaaaagacacgcactgcctctgcctgtgcctgcctgttcatggtcctcatcctcacagagctggttaccgaaaaattggtatactttttcttggcgcaggatctgagctgaagctgccaggccaggcgatcgagccgatgtacggctcgccggtgtccaaggacctcaacctcccggcgcagccgccgccgatggcctcgtccgggctgctacgctacagatcggcgcccagcgcggtgctcggcggcctctgcgaggaccagctccagctccctgccgccgctccgagcgccgccgacaacgtcttctcaaggttcctgcccgaccaccacatccgggacgacaagccgtcgcctgcccacttcccgagtgcggccgacatggcctcccaccaccagcaggagcaaatgatgttccactcccagtcccagtcccagcaccagcaggagacgggtaggtccgggggcggcctctaccgcaccgtcagctctggcatggaagcgggcggcactggcgtcggcgccgccagcagcctgattcggcagagcagctcccccgccgggttcctggaccatttcggcatggacaacggtgaggaggacgaagatcagcgagcggatcaggaagctgcaggagctcgtgcccgacatggacaagcaaaccaacacctccgacatgctggacttggccgtcgactacatcaaggatctccagaagcaggtcaaggtaacgagctccggcggccgccggtctgctttcctcctccagaacccaaattgcaaggtcagagagccagtgacgtccaaatcacggaggctggcctcatcttgccccgccggctgatcgacggcgagcgagggttacctacagttacaaacaacgatatgtcgttgactcttcctcacctagtactagtagtaggaggaggaggagtatctttatcgtcgtttatcatcccttgtgttcacgcgttgcaggcgttgaacgagagccgcgccagctgcacctgcccggcgagcaagcaccagcagcggttctccggctgaagcaccggccgggccggcagtccccatcggtccccggcggctgcgtagcacgctccagtacacagctagtgcagcaaagatggacccaccacaaggcctggagacagacctgactgagaccgagatagagaggaacaccgccatcgtctgcagtgcatgcgcgcgagcagcatgtacagcgccggagcgatcgaggctcgctggactgctggatcgagcagtgtggcatcatcaagtattcaagcgactgggaggaaggaagaaagaatcgagtcatgggaccgaggaggaagaacgaatgaattgtacagtgctgtttctttttttttttttgctgtaaacacttttgctacatctgtgctgctgctgctctccatatgccgttgcccattgttactacgttaagaatcacagtgagatatagatcgaggaaaacttcactactgttaccaccaccatcaccatgcaagctggcggcacagtgccatgcaaaattcactcgtgtgcactgcagaaacatgcataggaacgcctcgcatgtttacatttccaaacaaatgctacaaagatgctcaaagatcgatatgtattggttaaagaaattgcttttaggaatttgtaacagctacttttccaacagctataaattagaagttgatcctatctatcaggcatctagtgtgctc

SEQ ID NO: 3333 - DNA, 2593 bp, Zea Mays
tggctcgcacgctctccctcgcgctcgtcggttcgtgcgtcttgttcccaccgccgccgctctccctcatctccttccaatttttcttccaaataaaaaccagccgcagcgggaggtggcgcgacgcgaacccacccaccctgcgaacccggccgcgaaattctcctctcggattccgccgccgcgaaccgtcccctcgacgaggctgctgccgtagaattttcttatcattcgaatagttgatgagcgagaatacagagcaagaatcttgatggtgcgtgtggtacaacttggttaaggaaagctgactgcttgaagtgaccatgttggaccatcttgctatcattgcgtctgagttaggggacgacgcaacggattttgaggttgatggcatcgacaacctcagcgagaacgatgtcagcgacgaggagatcgatgccgacgagctcgcccgacgaatgtggaaggacaaggtcaagctcaagaggatcagggagaggcagcagaagcttgccctgcagcggctggagctggagaagaccaagacaaagaagatttcagaccaagccctccggaagaagatgacgagggcccaggacgggatcctcaagtacatgctcaagctgatggaggtgtgcaatgcccgagggttcgtgtacgggatcattcctgagaaaggtaagcctgtcagtggtgcgtccgataacatcagggcctggtggaaggacaaggtgaagtttgacaagaatgggccagcagcgatcgtgaaatacgagcttgagaactcgatgctgagcaaccctaagggcggcggagccatggaccagcatagcttgatggacctccaagacggcactctgggctcattgctttcagcgctgatgcaacactgcagcccgcagcagcgaagctatccattggataagggtgtcccgcccccttggtggccaacagggaacgagtcgtggtggcctgcgttgggcctcccaaagggagaagcgcctccgtacaggaaaccgcatgacctgaagaaggtttggaaagttggtgtcctgacgggcgtgatcaagcacatggccccaaacttcgataagatcaggaaccgtgtaaggaagtcgaagtgtctgcaggacaaaatgactgcaaaggagagcctcatctggcttggtgttctacaacgcgaggagaagtctgttcacggctttggcagtgctttactacagaatgctcggcatagtagcacttcagaggacagaaacgagggcatatatagcagcagtgacgagtatgatgtcgaccgcctcgagcagcctcctcgttccacatcatccaaagaggacgagggagacgctcagcctgtcttgcagattagaggggagcagacctcaactagaggaactaataagagaaggcgccatgacacatcctccaaccaactagctattagcaaggaagagatgagtaaatctaaatctcaacagcggaaaggcccctcaacccgccctcctgttgccgaggttgaggttgaagtgacacaaagaaacgacaagacgccagaagtagtgtgcagtgcagctggtggtgatatgaactttatcgacccaattgatgcggtgggcattactaacctgccaatgagccctaaacatgtcccccctacaattggagctttgcagcagcacggagattgtcgagggaattttctatctcctgctgctgccatcaactacaacagcagcaacagcaaccaggcagcaagtgctgctcaatcaaacacttatctgggaggccatcctctggcttgtgaaggcagtgatattgccaactcatggtccggacactcatttcagcaggatgttggtcttgggcctcctattggttttgatccttcaccagttgctcaccagggttcggcagtgcagcagccactgccactgccacttccacttcctatggatcaccaagcgcctatcacgggatcaggagctctcgccacgaacggctcttacagtctcccgacagcaggcggtgtgagttctgggacaatcgtcagcgagacccaccagcagctcatggacaaccctttcttcggcgacgccggagacagctcttttggcggtcttcctttcagcctccttcctttcagtagtccgatgcttaacttcgatgaattggatgagttggtggacgacgacgacttgatgcagtacctcggcacataacacagcctgttaggctttttcggggagagtttggtaacatgctgatggagcggcgggatgttgatgtagctgcagctcgtgacccattcatttgtggcaccgtcctgagaaggccattgcttttgtaatataacaacaacgaataatgtagtttagggtgctctcttgactgtactggatgttaaatggcattgccgtcgtaagcagggaacttgtagcctgtagagcaagttagcaattcgtggcctcgtgggcatcatgatgttggcggagaattaccgcagccgtttaaaggattttattttttttatttattgccgtatacacggatttttagatataggtgatttaacgagtatggtatgagaatt

SEQ ID NO: 3334 - DNA, 2620 bp, Zea Mays
tggctcgcacgctctccctcgcgctcgtcggttcgtgcgtcttgttcccaccgccgccgctctccctcatctccttccaatttttcttccaaataaaaaccagccgcagcgggaggtggcgcgacgcgaacccacccaccctgcgaacccggccgcgaaattctcctctcggattccgccgccgcgaaccgtcccctcgacgaggctgctgccgtagaattttcttatcattcgaatagttgatgagcgagaatacagagcaagaatcttgatggtgcgtgtggtacaacttggttaaggaaagctgactgcttgaagtgaccatgttggaccatcttgctatcattgcgtctgagttaggggacgacgcaacggattttgaggttgatggcatcgacaacctcagcgagaacgatgtcagcgacgaggagatcgatgccgacgagctcgcccgacgaatgtggaaggacaaggtcaagctcaagaggatcagggagaggcagcagaagcttgccctgcagcggctggagctggagaagaccaagacaaagaagatttcagaccaagccctccggaagaagatgacgagggcccaggacgggatcctcaagtacatgctcaagctgatggaggtgtgcaatgcccgagggttcgtgtacgggatcattcctgagaaaggtaagcctgtcagtggtgcgtccgataacatcagggcctggtggaaggacaaggtgaagtttgacaagaatgggccagcagcgatcgtgaaatacgagcttgagaactcgatgctgagcaaccctaagggcggcggagccatggaccagcatagcttgatggacctccaagacggcactctgggctcattgctttcagcgctgatgcaacactgcagcccgcagcagcgaagctatccattggataagggtgtcccgcccccttggtggccaacagggaacgagtcgtggtggcctgcgttgggcctcccaaagggagaagcgcctccgtacaggaaaccgcatgacctgaagaaggtttggaaagttggtgtcctgacgggcgtgatcaagcacatggccccaaacttcgataagatcaggaaccgtgtaaggaagtcgaagtgtctgcaggacaaaatgactgcaaaggagagcctcatctggcttggtgttctacaacgcgaggagaagtctgttcacggctttggcagtgctttactacagaatgctcggcatagtagcacttcagaggacagaaacgagggcatatatagcagcagtgacgagtatgatgtcgaccgcctcgagcagcctcctcgttccacatcatccaaagaggacgagggagacgctcagcctgtcttgcagattagaggggagcagacctcaactagaggaactaataagagaaggcgccatgacacatcctccaaccaactagctattagcaaggaagagatgagtaaatctaaatctcaacagcggaaaggcccctcaacccgccctcctgttgccgaggttgaggttgaagtgacacaaagaaacgacaagacgccagaagtagtgtgcagtgcagctggtggtgatatgaactttatcgacccaattgatgcggtgggcattactaacctgccaatgagccctaaacatgtcccccctacaattggagctttgcagcagcacggagattgtcgagggaattttctatctcctgctgctgccatcaactacaacagcagcaacagcaaccaggcagcaagtgctgctcaatcaaacacttatctgggaggccatcctctggcttgtgaaggcagtgatattgccaactcatggtccggacactcatttcagcaggatgttggtcttgggcctcctattggttttgatccttcaccagttgctcaccagggttcggcagtgcagcagccactgccactgccacttccacttcctatggatcaccaagcgcctatcacgggatcaggagctctcgccacgaacggctcttacagtctcccgacagcaggcggtgtgagttctgggacaatcgtcagcgagacccaccagcagctcatggacaaccctttcttcggcgacgccggagacagctcttttggcggtcttcctttcagcctccttcctttcagtagtccgatgcttaacttcgatgaattggatgagttggtggacgacgacgacttgatgcagtacctcggcacataacacagtgtgtccaatgaatgtgctcggtgcagcctgttaggctttttcggggagagtttggtaacatgctgatggagcggcgggatgttgatgtagctgcagctcgtgacccattcatttgtggcaccgtcctgagaaggccattgcttttgtaatataacaacaacgaataatgtagtttagggtgctctcttgactgtactggatgttaaatggcattgccgtcgtaagcagggaacttgtagcctgtagagcaagttagcaattcgtggcctcgtgggcatcatgatgttggcggagaattaccgcagccgtttaaaggattttattttttttatttattgccgtatacacggatttttagatataggtgatttaacgagtatggtatgagaatt

SEQ ID NO: 3335 - DNA, 1921 bp, Zea Mays
caacaaaccaaagcccagcccatcactctgcgaaaccgaattggccaaagcccgctacgccctcgtcatcgtccaatgagaccgcccccccacagtttcgtcttcctcttctccgaccccgaccatggagccggacgccgatgaggactacatgggagacctctcacgcttcctcccgccgagtccgtcctcctccccaccgaagaacctcgggcgccggaagcagccatccacgcaggcgcaggcgcagccgagggcgaagcgcgggaagggtgtgccgtggcaggagcggcggaggcaggagcgcgagcggaagcagcgggaggaggacgcacgcacgatggccgggctcgcggaagctatccctgagagcaacgtagggttcaggatgttgaggcagatggggtacgatcccgactcccgcgccggcgccggcgccgaaccggtcggcatcgagatccgccgctcgcgggcggggctcggggcggaggagcctgtgttggctccggcgccggcgccggcgccggtggagaagccccgggaggtgtcggagcgggagcgtaggcagcaggaggagatggcggtagagctaagggcgcggaagagcacgcagtggaagggccggagggtggtgtgggactaccgcaaggccgagagggcactcgcgcagctggagaaccgggaggtggagccacaggcaccggagggggaggacaaggagaaaggggcagaggaggaagaggatgtgatcactgaagaggatttgcagcaaatactgtctaagttgcgtgatcagtaccagtattgcctttattgtggatgcaaatatgaatcactagaagtgctgtcaaaggaatgccctggtcctgatgaggatgaccattgatttgttgtgtgaaggtgacaaataattgtctttgatacaaacaggtgcttcgatgcttctagacttcccaagtcactaggatgattagggtgggagtggatggaaagccacaaggagcgtctgcatatgacatgctatgcagcaaaactgaagtggagctacatcttcagaaatgcctcatcgaggcaccaatgcacttcagagccagaagtgaaatgttgccggtggtgaacaagcaaactttgattttgatctgtgataatcagataacaattttgtatctgctttccaactgagcgagagagggggctatacttgtggacatctgctcaattttgttgtcagaagagaagtaagtctattttatgaaacttccactgtacgatgttggaatggaatatctgtacattactgtcagtcctgtgtgtcgtctaaggatccatgattgctgaataaatgcctggaaagggccacgatcactgttgaacatcacagaagacggttctccaacagcaatattttcagcttctacagcacaatcaaaccagtctttggaaataaaaagggaaggaatggcatgaaatagtgattggacataaaaggagatagaagcatcaaactttccaagacattctgtttcgtgcaattccaagtcttgatgctttatgtagaaaataaaacaatcatactaatagctggatttcagtcctcatggatgtttgcagttatttgcttgcttgtgttcttacttgttattctttgttttgcttgtttgatttggctaattgtaaaataatctctatctgagttggttaggtggcttgagtaatacttaagtcttgagtttgactctgatcgggaggtctgccttgtaccaaagcacaagtctaaggtctagctttgaccgttgttatgctgagtgtgtcattaaggaaaaaaattgctgcagccggctgcaaaccagaatgtttgcagctcctcacaaaaaggaggtctaaccccacccgcaacagcattaacacaactaaaacgtta

SEQ ID NO: 3336 - DNA, 2681 bp, Zea Mays
atcactctgcgaaaccgaattggccaaagcccgctacgccctcgtcatcgtccaatgagaccgcccccccacagtttcgtcttcctcttctccgaccccgaccatggagccggacgccgatgaggactacatgggagacctctcacgcttcctcccgccgagtccgtcctcctccccaccgaagaacctcgggcgccggaagcagccatccacgcaggcgcaggcgcagccgagggcgaagcgcgggaagggtgtgccgtggcaggagcggcggaggcaggagcgcgagcggaagcagcgggaggaggacgcacgcacgatggccgggctcgcggaagctatccctgagagcaacgtagggttcaggatgttgaggcagatggggtacgatcccgactcccgcgccggcgccggcgccgaaccggtcggcatcgagatccgccgctcgcgggcggggctcggggcggaggagcctgtgttggctccggcgccggcgccggcgccggtggagaagccccgggaggtgtcggagcgggagcgtaggcagcaggaggagatggcggtagagctaagggcgcggaagagcacgcagtggaagggccggagggtggtgtgggactaccgcaaggccgagagggcactcgcgcagctggagaaccgggaggtggagccacaggcaccggagggggaggacaaggagaaaggggcagaggaggaagaggatgtgatcactgaagaggatttgcagcaaatactgtctaagttgcgtgatcagtaccagtattgcctttattgtggatgcaaatatgaatcactagaagtgctgtcaaaggaatgccctggtcctgatgaggatgaccattgatttgttgtgtgaaggtgacaaataattgtctttgatacaaacaggtgatggttctatactcaccatcatcacaatgatgttcagtcatgattggtgtacttcattggattcccaatacattggagcacaaactttgtggtttgtgctcttgtcgtcatcatacggacacactaagctctagaatagcttgttttgttggctgtattggctacttttatacttctagttaaatagtttctaactattattttatatcagggtgatgagaccttaagttgacacaaaacagaattgttgccctgtaagtgctggaaggtatatcttctagagtgatgccatgcaaccataacaacaacaaagcattttagtctctggtaaattaaagtaggttagagttgaaacttaagagaaaccacaggtcaaaattcagacacgtggtccgtgcacctttattcaaggctaatttttttggtatattcaagtctccattctactgcctcatctcatatcaactcgatgtaactatcctggagtgtttgaagatcattatcctggagtgtttgaagatcgtttattatctactcgatgcaacgatcttgaaattataaatcttcccttattgaaaaaaagaaaccatcatccaccaccagaataccaattaagagtcaggcatgagcgacctaaggaggagttcatggagtgtggaagcaccagccaagcaccacaaactgcaccccttgactaggtttactaggtttatgatctgaataattatgtcgctctctcaaacacgcaggtgcttcgatgcttctagacttcccaagtcactaggatgattagggtgggagtggatggaaagccacaaggagcgtctgcatatgacatgctatgcagcaaaactgaagtggagctacatcttcagaaatgcctcatcgaggcaccaatgcacttcagagccagaagtgaaatgttgccggtggtgaacaagcaaactttgattttgatctgtgataatcagataacaattttgtatctgctttccaactgagcgagagagggggctatacttgtggacatctgctcaattttgttgtcagaagagaagtaagtctattttatgaaacttccactgtacgatgttggaatggaatatctgtacattactgtcagtcctgtgtgtcgtctaaggatccatgattgctgaataaatgcctggaaagggccacgatcactgttgaacatcacagaaggttcctcatctgtatgctctttgaatcagacggttctccaacagcaatattttcagcttctacagcacaatcaaaccagtctttggaaataaaaagggaaggaatggcatgaaatagtgattggacataaaaggagatagaagcatcaaactttccaagacattctgtttcgtgcaattccaagtcttgatgctttatgtagaaaataaaacaatcatactaatagctggatttcagtcctcatggatgtttgcagttatttgcttgcttgtgttcttacttgttattctttgttttgcttgtttgatttggctaattgtaaaataatctctatctgagttggttaggtggcttgagtaatacttaagtcttgagtttgactctgatcgggaggtctgccttgtaccaaagcacaagtctaaggtctagctttgaccgttgttatgctgagtgtgtcattaaggaaaaaaattgctgcagccggctgcaaaccagaatgtttgcagctcctcacaaaaaggaggtctaaccccacccgcaacagcattaacacaactaaaacgtta

SEQ ID NO: 3337 - DNA, 1884 bp, Zea Mays
atcactctgcgaaaccgaattggccaaagcccgctacgccctcgtcatcgtccaatgagaccgcccccccacagtttcgtcttcctcttctccgaccccgaccatggagccggacgccgatgaggactacatgggagacctctcacgcttcctcccgccgagtccgtcctcctccccaccgaagaacctcgggcgccggaagcagccatccacgcaggcgcaggcgcagccgagggcgaagcgcgggaagggtgtgccgtggcaggagcggcggaggcaggagcgcgagcggaagcagcgggaggaggacgcacgcacgatggccgggctcgcggaagctatccctgagagcaacgtagggttcaggatgttgaggcagatggggtacgatcccgactcccgcgccggcgccggcgccgaaccggtcggcatcgagatccgccgctcgcgggcggggctcggggcggaggagcctgtgttggctccggcgccggcgccggcgccggtggagaagccccgggaggtgtcggagcgggagcgtaggcagcaggaggagatggcggtagagctaagggcgcggaagagcacgcagtggaagggccggagggtggtgtgggactaccgcaaggccgagagggcactcgcgcagctggagaaccgggaggtggagccacaggcaccggagggggaggacaaggagaaaggggcagaggaggaagaggatgtgatcactgaagaggatttgcagcaaatactgtctaagttgcgtgatcagtaccagtattgcctttattgtggatgcaaatatgaatcactagaagtgctgtcaaaggaatgccctggtcctgatgaggatgaccattgatttgttgtgtgaaggtgacaaataattgtctttgatacaaacaggtgggagtggatggaaagccacaaggagcgtctgcatatgacatgctatgcagcaaaactgaagtggagctacatcttcagaaatgcctcatcgaggcaccaatgcacttcagagccagaagtgaaatgttgccggtggtgaacaagcaaactttgattttgatctgtgataatcagataacaattttgtatctgctttccaactgagcgagagagggggctatacttgtggacatctgctcaattttgttgtcagaagagaagtaagtctattttatgaaacttccactgtacgatgttggaatggaatatctgtacattactgtcagtcctgtgtgtcgtctaaggatccatgattgctgaataaatgcctggaaagggccacgatcactgttgaacatcacagaaggttcctcatctgtatgctctttgaatcagacggttctccaacagcaatattttcagcttctacagcacaatcaaaccagtctttggaaataaaaagggaaggaatggcatgaaatagtgattggacataaaaggagatagaagcatcaaactttccaagacattctgtttcgtgcaattccaagtcttgatgctttatgtagaaaataaaacaatcatactaatagctggatttcagtcctcatggatgtttgcagttatttgcttgcttgtgttcttacttgttattctttgttttgcttgtttgatttggctaattgtaaaataatctctatctgagttggttaggtggcttgagtaatacttaagtcttgagtttgactctgatcgggaggtctgccttgtaccaaagcacaagtctaaggtctagctttgaccgttgttatgctgagtgtgtcattaaggaaaaaaattgctgcagccggctgcaaaccagaatgtttgcagctcctcacaaaaaggaggtctaaccccacccgcaacagcattaacacaactaaaacgtta

SEQ ID NO: 3338 - DNA, 2748 bp, Zea Mays
atcactctgcgaaaccgaattggccaaagcccgctacgccctcgtcatcgtccaatgagaccgcccccccacagtttcgtcttcctcttctccgaccccgaccatggagccggacgccgatgaggactacatgggagacctctcacgcttcctcccgccgagtccgtcctcctccccaccgaagaacctcgggcgccggaagcagccatccacgcaggcgcaggcgcagccgagggcgaagcgcgggaagggtgtgccgtggcaggagcggcggaggcaggagcgcgagcggaagcagcgggaggaggacgcacgcacgatggccgggctcgcggaagctatccctgagagcaacgtagggttcaggatgttgaggcagatggggtacgatcccgactcccgcgccggcgccggcgccgaaccggtcggcatcgagatccgccgctcgcgggcggggctcggggcggaggagcctgtgttggctccggcgccggcgccggcgccggtggagaagccccgggaggtgtcggagcgggagcgtaggcagcaggaggagatggcggtagagctaagggcgcggaagagcacgcagtggaagggccggagggtggtgtgggactaccgcaaggccgagagggcactcgcgcagctggagaaccgggaggtggagccacaggcaccggagggggaggacaaggagaaaggggcagaggaggaagaggatgtgatcactgaagaggatttgcagcaaatactgtctaagttgcgtgatcagtaccagtattgcctttattgtggatgcaaatatgaatcactagaagtgctgtcaaaggaatgccctggtcctgatgaggatgaccattgatttgttgtgtgaaggtgacaaataattgtctttgatacaaacaggtgatggttctatactcaccatcatcacaatgatgttcagtcatgattggtgtacttcattggattcccaatacattggagcacaaactttgtggtttgtgctcttgtcgtcatcatacggacacactaagctctagaatagcttgttttgttggctgtattggctacttttatacttctagttaaatagtttctaactattattttatatcagggtgatgagaccttaagttgacacaaaacagaattgttgccctgtaagtgctggaaggtatatcttctagagtgatgccatgcaaccataacaacaacaaagcattttagtctctggtaaattaaagtaggttagagttgaaacttaagagaaaccacaggtcaaaattcagacacgtggtccgtgcacctttattcaaggctaatttttttggtatattcaagtctccattctactgcctcatctcatatcaactcgatgtaactatcctggagtgtttgaagatcattatcctggagtgtttgaagatcgtttattatctactcgatgcaacgatcttgaaattataaatcttcccttattgaaaaaaagaaaccatcatccaccaccagaataccaattaagagtcaggcatgagcgacctaaggaggagttcatggagtgtggaagcaccagccaagcaccacaaactgcaccccttgactaggtttactaggtttatgatctgaataattatgtcgctctctcaaacacgcaggtgcttcgatgcttctagacttcccaagtcactaggatgattagggtattggtacccttcacattcttgagaagcttattgcagtgataaatatatcgatatgaaaattgaatagtatttgttcttcgtcggcctggaaaggtgggagtggatggaaagccacaaggagcgtctgcatatgacatgctatgcagcaaaactgaagtggagctacatcttcagaaatgcctcatcgaggcaccaatgcacttcagagccagaagtgaaatgttgccggtggtgaacaagcaaactttgattttgatctgtgataatcagataacaattttgtatctgctttccaactgagcgagagagggggctatacttgtggacatctgctcaattttgttgtcagaagagaagtaagtctattttatgaaacttccactgtacgatgttggaatggaatatctgtacattactgtcagtcctgtgtgtcgtctaaggatccatgattgctgaataaatgcctggaaagggccacgatcactgttgaacatcacagaagacggttctccaacagcaatattttcagcttctacagcacaatcaaaccagtctttggaaataaaaagggaaggaatggcatgaaatagtgattggacataaaaggagatagaagcatcaaactttccaagacattctgtttcgtgcaattccaagtcttgatgctttatgtagaaaataaaacaatcatactaatagctggatttcagtcctcatggatgtttgcagttatttgcttgcttgtgttcttacttgttattctttgttttgcttgtttgatttggctaattgtaaaataatctctatctgagttggttaggtggcttgagtaatacttaagtcttgagtttgactctgatcgggaggtctgccttgtaccaaagcacaagtctaaggtctagctttgaccgttgttatgctgagtgtgtcattaaggaaaaaaattgctgcagccggctgcaaaccagaatgtttgcagctcctcacaaaaaggaggtctaaccccacccgcaacagcattaacacaactaaaacgtta

SEQ ID NO: 3339 - DNA, 1670 bp, Zea Mays
cttctctctgcgcgctgctctttcttccccagccgatccttctttccaggcttccagcgtcgtgtgcccatctcctctcctccctgtgtcgcgcgcagctcccctgctcgcttggcgtcttcctccctgcgtccgctgcttgcttcccctgcttctccttcccgtctcccatggacgcgcgtgccctagctcctgctttcctcgccgacgcgcgccaatcccctgcgcgcggtacttctcctctgctccttcggccgaccgcgcgcttgcttctctgtgcccatgcgcgcgcgaagctccctgcgccgcggctcgatcccttcctcccgcgcgcgctctgcctctccctcagcccgtcgcgccctgccggttctctgctcggccatggaagtcgcggttcccagctccatctgctcgcgacgcacgcccagcctcttcccaagctcgagttcctctgcttcttccccaaccgcgccggtcggatctccctgatacctcgctctctgtctggccgtggaactcacccagctcggaccacgaagctctctggcgctcttccatggctggcgcttggctccagctcggccgcgcgccctggcatttgccatgaccaccgcgccgtggagtcctgcgcgctcggctctgctcgctccctgtgctcgcgcccagccgaagttccctgtgcgcgcgccctggtgtccgttcgttgctgcgcgcgcgtgctcgccggctgtgcagctcgcccatggtgcccatctctctgttcgcctctacgcgcagccatgtgctccttcgtgtcgtgctccctggagctcgcctagttccctctactcgctcgcgtccagtcgtcggacctcgcctccatccctatggtgctcggggccctccctgctccgcgtcgtgacgaggattgggggccggctgtccggtctcatgaattgcctcgttgtggatggacggctggatgggggcaggcaaatccggatccgttgcgctactcgcaaagcgcgtgggggcctcgccggccatcctgcttcctagttccttgtgtgcgctccgcttgccgtcattctccacgtgtcgggtgcgctctctgcgtccagctcttgtccgcggtgtcgcacgtcatgcgtctcccttttgtcaacctggcgtgggctctgaccgtcagctgaatgcttgatgctcgtgctcggtcatctgcagcagttcacttggtgtcagctcgcgtcgccctctccctcactggattcgtgtcctcgccagcttgctccagactcgatctcgtcgtcgttccgtgcgtcgtcaagaaatcccaagcgtcgggtgaagacgaagttagcagcgtgatattcaccaagtgctcgacgcaagggctgaaccagaattcttgccgtattcgcggatagcgcgtcagatttagtatggtacatgaattaaccacgtgatgcggagaatcagagctgagtcaaccacaagatgctggaaagcgtgagcttctccgagagatgatgctgatgaacgaacctgaagatggataatctgacgaatgctggaacaaaggctgatcgtcaagtgatcgacgtctaacaacactaacctagtgttatccaggcaagccccggtgcatgcaaccccttccttatatttttaaataatttttacacact

SEQ ID NO: 3340 - DNA, 1362 bp, Zea Mays
atggcgacgagtgccgagacaacgtcggagctggacgcgtccatctccaccacctctttctcgcccgacgtgacgacgaacgccgacctcacgctagatccgggcgtgctcacctccgcctcctcttctgcgtcggcgtcgcaccaaccatctccagccatagagacaacttgctcgctgcagaatggttggtgctacgccggtcagcaagatcctcccgatcagcaagatcactatagttcgtggagcgttgtcccggtcagcaagatcctccctgcgctctaatgtatgaggtaaaaagtcttggcactactatatttgtttaggtttttccctacagcaacggaggcttctgcatcttgatttgcaacgtggaactgcacgtttatggttcagtcaactttatttggaaataccgcattcgattcctccctgctattcaatctaagatgtgcatattttgtttttgtttttctccagatttttttttgtcaaccatgttgcaataaaaaaatcgctacatttccattgagccaatggattccgcatttgattcctctctgctatctgatctaacatgtgcaaattctgtttttttcctttttctccagtttttctctctctcaacctcgctatattccctttgggcaacagaacagctattgtggtcctaaacctctaaatatctaacctgctagaattgtcttctaattgtttgtaggcacgtccacatcttccactttcgattctttcaattcagccagaggacaaatttgttgtttttccttcttttgtatttcacttacattcggttctgcaaacaaagtagcaaaaaaaaggtgacaaccacctcattaacaaagaaagataagcacaggaagaatcattttctccgcattgtcgaatcttccgtgcgaacatgtcttctagatttagcatgttaatagtacataaacgattaaatttgtgttttgatttcttcgctttagatttatttcggaatgatgcttagtagtacctctgctccttaaggacaacaccaacaatgtaactaatttatgtttgttttcttatgacaagataccttttttgttttcttatgaaccgcaacatagttacttattttctgataactacttaatcttttttctcttacgaatacatgctatacacattttaataaaattatacaacgtatcgcgcgctaggcgcgcgttagtgactagtaaataacaacggaacccagaagaaacacccaagatgaagaagacctacctctggccacctctcgctctcgctgaaggtccatgttagcttcccccaagcgaacattcgccgcccgtagggttgactcggtttctt

SEQ ID NO: 3341 - DNA, 5180 bp, Zea Mays
cgggtccagtcaaccgcaacagagaagggaaaaattccaggcagcgcagtgcgcacgccctgcggcaaatacacgaatccccgagccgggggcgagaaaaccgcaaaaggagattctcctcgccccttccactagactactggagtacccgacggcccgaggcggcgagctcgtcggcgactgaccgccgccggagcagccgccgcctcccgctggttcctgtaccacagcctcgcaggagcgcctccgttcgctacgccacccgccactgtgctgtcggaaggcagctcggactactcgcgccgcctcggcttctccgcgctcgccgcccctccgccggcgtgatcaaggatggagctacatcgtgaacctcctgaagctattctgaatgccataaaatttgatctcatgacgagtacggatatggaaaaattgagcagcatgagcataatcgaagtgagtgatgtcactagtccgaagctaggattaccaaatggttccctgcagtgtgagacttgtggatcacaacgtggacgcgactgtgatgggcattttggtgtgactaaactggcggcaacagtacacaatccatacttcatcgatgacgttgttcactttctaaaccgaatatgtcctggctgtctcagcccaagggaaggcatagatacaaagagattggagagagaaaaggttcaagcaacatgcaagtattgttcgaaggatggctctaaactttaccctagcatagtctttaagacactgtcaagtccaagagtattattattcaagagtaaacttcacagaaacgccagcgtgatggaaagaatttcgattgttgcagaagctgctgacagaatgcctaatagatcaaagggtaaaggttcgcttgaaggcctgcccctggatttttgggattttgtaccttctgagaataaacaagtccagtcaaatatgaccaagataatattgtcgccctaccaagtcttctacatgttgaagaaaagtgaccctgaacttatcaaacaatttgtttcaaggcgggagctattgtttctatcatgtttaccagtaactcctaattgccatcgtgttgtagaaattggatatgggcttccagatggacgcctaacatttgatgacagaacaaaggcttacaagaggatggttgatgtcagtaggagaattgatgactaccgccagcatccacatttcagtgttcttgcaagttcacttgtctcaagccgggtttcagaatgcctaaagtcatccaagttgtactctaaaaaggcagatggagagacatccacagatacatatggaatgaaatggctaaaggatgttgttctcagcaaaagatcagataatgtttttaggagtattatggttggagacccaaaaattaagttatgggaaattggcattcctgaagatttatcctcaagcctggttgtttctgagcacgtcagttcttataattttcaaagtacaaatctgaagtgcaacctgcaccttctagccaagcaagaactatttattcggcgaaatggaaagctaatgtttcttcggaaggcagaccagctagaaataggagattttgatggtgattgtttgcatggatatatcccacaatctatacgctcaagggttgaacttgaagagctggtaagcttacacaaccagctgttgaatatgcaagacggtcgaaatttggtgtcactaacacatgactctctagctgctgcacatttgttaacaagtacagatgtttttctgaagaaatctgaattacagcagcttcaaatgctatgcctttcagtatcaacaccagcacccgcagttattaaatctatgaattttcaaggttctctgtggactggtaaacaacttttcagcatgcttcttccttcagtatggttgcaaggcacttgacttcctttcttcagcacaagaagtactatgtgagttcttaaccatgaggggtttaagtgtctctctttcagatctctacatgttctcagaccattactcaaggagaaaactagctgagggagttaagttggcactgtatgaagctgaagaagcttttcgagtcaagaaaatattgttagatccaattaacataccagttctgaagtgtcacgatgaaactgaagatgtaacttacagacaatctgattgtatccagagcaatccatcagttatcagatcttcaatcatggcatttaaagacgtcttccgtgatctcttaaaaatggtgcaacaacatgttagtaatgataactcaatgatggtgatgataaatgcaggaagcaagggtagcatgttgaaatatgctcaacaaactgcatgtattggtcttcaacttccagctagcaaatttcccttcagaattccttcccaactctcatgtattagctggaatggacagaaatcgttgaactatgaagctgagagtactagtgaacgtgtgggaggtcaaaacctttatgctgtgataaagaattccttcattgagggtttgaatccattggaatgtcttctgcacgctatatctggcagggcaaacttctttagtgaaaatgctgatgtaccagggacattgacaagaaaattaatgtatcacttgagagatatacatgttgcctatgatggaactgttagaagttcttatgggcagcaaatagtgcaattctcttatgatagtgttgatgacctagtagataaactcggcgccccggttggatgtcgggctgcttgttccatttcagaagctgcatatggagctttggaacacccggtcaatggtttagaggactcccctctcatgaatctacaagaagtatttaagtgtcacaaggctacaaattcaggggatcatattggtttgcttttcctgtcaaggcatttgaagaagtacagatacggtctggaatatgcatccctagaagttaaaaaccatcttgagcgagtgaacttctctgatttggttgaaaccatcatgattatatacgatggacatgacaaaataagaaacgaaggaatgtggaccacccattttcatataaacaaggcaatgatgaagaaaaaaagattaggattgagatttgttgtagatgaacttgcaaaagagtatgacaccaccagagatcagctaaacaacgcaatcccatcaattcgtatctcaaggagaaaatgtttagtaggtgacgagggtgttaaaagttcatcatgctgtatcgctgtcgtagcacatgctgaacgcaactccatctctcagttggacactatcaagacaagggtgattccaagcatactggatacactgctgaaaggttttttggaatttaaggatgttgagatccagtgtccacatgatggtgaacttcttgttaaagtttgtatgtctgagcattgtaaaggggggaggttctggcctactctacaaaatgcttgcattccagtaatggagttgattgactgggagctgagtcaaccaagcaatgtatctgatattttctgttcatatggcatagactcagcatggaaatactttgttgaatccttgaaatcagcgactactgatactgggaggaacattcgccgggagcacttgctggttattgcagatagcttgtctgtaactgggcagttccatgcattaagcagtcaaggtttaaagcagcagcgcactcggttatcgatctcgtctccattttctgaagcatgtttttctaggcctgcacaaagttttataaatgctgcaaagcaatgttcagtggacaatctgtgtggaagtctcgatgcagttgcttggggcaaagagcctttcaatgggacgtcagggccttttgaaattatgcactcgggaaagccacatgaaccagaacaaaatgagagcatctatgatttcctatgcagctctaaagttcggaattttgaaaagaatcatttggatacccgtagacaaagtactgaaaatgcttcgatatgtagattagcatgcaagtcttctaaaggcagtacgaccgtcaatggtgttgctataactatcgaccaggactttcttcatgctaaagtcagtatatgggataacattatcgatatgcgtacttccttacaaaacatgctaagagagtacccgttaaatggatatgtggcggagccagataaatcacagttaatcgaggccctgaaatttcattccagaggtgctgaaaagatcggtgtgggagtaagagaaattaagatcgggttgaatcctagtcacccaggtacaaggtgcttcattttgctgagaaacgatgataccactgaagacttttcttaccacaagtgtgttcagggtgctgcagactctatctcaccccagctcggaagttatttgaagaaactatattacagagcataagcttatgcaacactcccactagttcatttttttaactaaaacgtggcaaataaaaaagaacggatggagtaggattttggaaagtgttcctggcaacatcttgttctgatcagaccatattaccaatttctgataaggaaactacgtgtcgcattttaaggatgaggtgaaaactgaaagggtctggcgctcagaactcagaaggtcttctggactggaggtgtatgtcaactcaactcaatgggactatgtaaggtgggcctgagtcatgactgcggtttcatgcctgcaattctctagtcagtagtataaatactagtctgcgtgttttctaatatgaagatccatctattttattacttaaccatagcgtagatgattggtaacagatagatacattttatttactgattaaaatgcagcagcgactccccgaacttaaaacaggtaaacgggtgtggaaacttagtggctcattcaaaactgtctaaaatcgggtttgctcaaacaaagtgtcgacatggcatgtcatgttgaaatcatttgagtctctaaatttggtttacagacttttattagtgtgcttcaatcgtagcacaccaaatcagtattcggtttgagcatccgatttctgatggttttgcacaggccggccaagttatatgatctagttttttaacttaggggatctaattgatacaacatgccaagtttaagaatggctattgtatcttactcttatttattgaacaagtaatgcacattcccagtc

SEQ ID NO: 3342 - DNA, 5302 bp, Zea Mays
cgggtccagtcaaccgcaacagagaagggaaaaattccaggcagcgcagtgcgcacgccctgcggcaaatacacgaatccccgagccgggggcgagaaaaccgcaaaaggagattctcctcgccccttccactagactactggagtacccgacggcccgaggcggcgagctcgtcggcgactgaccgccgccggagcagccgccgcctcccgctggttcctgtaccacagcctcgcaggagcgcctccgttcgctacgccacccgccactgtgctgtcggaaggcagctcggactactcgcgccgcctcggcttctccgcgctcgccgcccctccgccggcgtgatcaaggatggagctacatcgtgaacctcctgaagctattctgaatgccataaaatttgatctcatgacgagtacggatatggaaaaattgagcagcatgagcataatcgaagtgagtgatgtcactagtccgaagctaggattaccaaatggttccctgcagtgtgagacttgtggatcacaacgtggacgcgactgtgatgggcattttggtgtgactaaactggcggcaacagtacacaatccatacttcatcgatgacgttgttcactttctaaaccgaatatgtcctggctgtctcagcccaagggaaggcatagatacaaagagattggagagagaaaaggttcaagcaacatgcaagtattgttcgaaggatggctctaaactttaccctagcatagtctttaagacactgtcaagtccaagagtattattattcaagagtaaacttcacagaaacgccagcgtgatggaaagaatttcgattgttgcagaagctgctgacagaatgcctaatagatcaaagggtaaaggttcgcttgaaggcctgcccctggatttttgggattttgtaccttctgagaataaacaagtccagtcaaatatgaccaagataatattgtcgccctaccaagtcttctacatgttgaagaaaagtgaccctgaacttatcaaacaatttgtttcaaggcgggagctattgtttctatcatgtttaccagtaactcctaattgccatcgtgttgtagaaattggatatgggcttccagatggacgcctaacatttgatgacagaacaaaggcttacaagaggatggttgatgtcagtaggagaattgatgactaccgccagcatccacatttcagtgttcttgcaagttcacttgtctcaagccgggtttcagaatgcctaaagtcatccaagttgtactctaaaaaggcagatggagagacatccacagatacatatggaatgaaatggctaaaggatgttgttctcagcaaaagatcagataatgtttttaggagtattatggttggagacccaaaaattaagttatgggaaattggcattcctgaagatttatcctcaagcctggttgtttctgagcacgtcagttcttataattttcaaagtacaaatctgaagtgcaacctgcaccttctagccaagcaagaactatttattcggcgaaatggaaagctaatgtttcttcggaaggcagaccagctagaaataggagattttgatggtgattgtttgcatggatatatcccacaatctatacgctcaagggttgaacttgaagagctggtaagcttacacaaccagctgttgaatatgcaagacggtcgaaatttggtgtcactaacacatgactctctagctgctgcacatttgttaacaagtacagatgtttttctgaagaaatctgaattacagcagcttcaaatgctatgcctttcagtatcaacaccagcacccgcagttattaaatctatgaattttcaaggttctctgtggactggtaaacaacttttcagcatgcttcttccttcaggcatgaatttcagttgcgatacggagttacatatcatggacagtgaggtgcttacctgctcactgggttcttcttggctacaaaataacacatctggtcttttctctgtcatgttcaaacagtatggttgcaaggcacttgacttcctttcttcagcacaagaagtactatgtgagttcttaaccatgaggggtttaagtgtctctctttcagatctctacatgttctcagaccattactcaaggagaaaactagctgagggagttaagttggcactgtatgaagctgaagaagcttttcgagtcaagaaaatattgttagatccaattaacataccagttctgaagtgtcacgatgaaactgaagatgtaacttacagacaatctgattgtatccagagcaatccatcagttatcagatcttcaatcatggcatttaaagacgtcttccgtgatctcttaaaaatggtgcaacaacatgttagtaatgataactcaatgatggtgatgataaatgcaggaagcaagggtagcatgttgaaatatgctcaacaaactgcatgtattggtcttcaacttccagctagcaaatttcccttcagaattccttcccaactctcatgtattagctggaatggacagaaatcgttgaactatgaagctgagagtactagtgaacgtgtgggaggtcaaaacctttatgctgtgataaagaattccttcattgagggtttgaatccattggaatgtcttctgcacgctatatctggcagggcaaacttctttagtgaaaatgctgatgtaccagggacattgacaagaaaattaatgtatcacttgagagatatacatgttgcctatgatggaactgttagaagttcttatgggcagcaaatagtgcaattctcttatgatagtgttgatgacctagtagataaactcggcgccccggttggatgtcgggctgcttgttccatttcagaagctgcatatggagctttggaacacccggtcaatggtttagaggactcccctctcatgaatctacaagaagtatttaagtgtcacaaggctacaaattcaggggatcatattggtttgcttttcctgtcaaggcatttgaagaagtacagatacggtctggaatatgcatccctagaagttaaaaaccatcttgagcgagtgaacttctctgatttggttgaaaccatcatgattatatacgatggacatgacaaaataagaaacgaaggaatgtggaccacccattttcatataaacaaggcaatgatgaagaaaaaaagattaggattgagatttgttgtagatgaacttgcaaaagagtatgacaccaccagagatcagctaaacaacgcaatcccatcaattcgtatctcaaggagaaaatgtttagtaggtgacgagggtgttaaaagttcatcatgctgtatcgctgtcgtagcacatgctgaacgcaactccatctctcagttggacactatcaagacaagggtgattccaagcatactggatacactgctgaaaggttttttggaatttaaggatgttgagatccagtgtccacatgatggtgaacttcttgttaaagtttgtatgtctgagcattgtaaaggggggaggttctggcctactctacaaaatgcttgcattccagtaatggagttgattgactgggagctgagtcaaccaagcaatgtatctgatattttctgttcatatggcatagactcagcatggaaatactttgttgaatccttgaaatcagcgactactgatactgggaggaacattcgccgggagcacttgctggttattgcagatagcttgtctgtaactgggcagttccatgcattaagcagtcaaggtttaaagcagcagcgcactcggttatcgatctcgtctccattttctgaagcatgtttttctaggcctgcacaaagttttataaatgctgcaaagcaatgttcagtggacaatctgtgtggaagtctcgatgcagttgcttggggcaaagagcctttcaatgggacgtcagggccttttgaaattatgcactcgggaaagccacatgaaccagaacaaaatgagagcatctatgatttcctatgcagctctaaagttcggaattttgaaaagaatcatttggatacccgtagacaaagtactgaaaatgcttcgatatgtagattagcatgcaagtcttctaaaggcagtacgaccgtcaatggtgttgctataactatcgaccaggactttcttcatgctaaagtcagtatatgggataacattatcgatatgcgtacttccttacaaaacatgctaagagagtacccgttaaatggatatgtggcggagccagataaatcacagttaatcgaggccctgaaatttcattccagaggtgctgaaaagatcggtgtgggagtaagagaaattaagatcgggttgaatcctagtcacccaggtacaaggtgcttcattttgctgagaaacgatgataccactgaagacttttcttaccacaagtgtgttcagggtgctgcagactctatctcaccccagctcggaagttatttgaagaaactatattacagagcataagcttatgcaacactcccactagttcatttttttaactaaaacgtggcaaataaaaaagaacggatggagtaggattttggaaagtgttcctggcaacatcttgttctgatcagaccatattaccaatttctgataaggaaactacgtgtcgcattttaaggatgaggtgaaaactgaaagggtctggcgctcagaactcagaaggtcttctggactggaggtgtatgtcaactcaactcaatgggactatgtaaggtgggcctgagtcatgactgcggtttcatgcctgcaattctctagtcagtagtataaatactagtctgcgtgttttctaatatgaagatccatctattttattacttaaccatagcgtagatgattggtaacagatagatacattttatttactgattaaaatgcagcagcgactccccgaacttaaaacaggtaaacgggtgtggaaacttagtggctcattcaaaactgtctaaaatcgggtttgctcaaacaaagtgtcgacatggcatgtcatgttgaaatcatttgagtctctaaatttggtttacagacttttattagtgtgcttcaatcgtagcacaccaaatcagtattcggtttgagcatccgatttctgatggttttgcacaggccggccaagttatatgatctagttttttaacttaggggatctaattgatacaacatgccaagtttaagaatggctattgtatcttactcttatttattgaacaagtaatgcacattcccagtc

SEQ ID NO: 3343 - DNA, 3547 bp, Zea Mays
gagattctcctcgccccttccactagactactggagtacccgacggcccgaggcggcgagctcgtcggcgactgaccgccgccggagcagccgccgcctcccgctggttcctgtaccacagcctcgcaggagcgcctccgttcgctacgccacccgccactgtgctgtcggaaggcagctcggactactcgcgccgcctcggcttctccgcgctcgccgcccctccgccggcgtgatcaaggatggagctacatcgtgaacctcctgaagctattctgaatgccataaaatttgatctcatgacgagtacggatatggaaaaattgagcagcatgagcataatcgaagtgagtgatgtcactagtccgaagctaggattaccaaatggttccctgcagtgtgagacttgtggatcacaacgtggacgcgactgtgatgggcattttggtgtgactaaactggcggcaacagtacacaatccatacttcatcgatgacgttgttcactttctaaaccgaatatgtcctggctgtctcagcccaagggaaggcatagatacaaagagattggagagagaaaaggttcaagcaacatgcaagtattgttcgaaggatggctctaaactttaccctagcatagtctttaagacactgtcaagtccaagagtattattattcaagagtaaacttcacagaaacgccagcgtgatggaaagaatttcgattgttgcagaagctgctgacagaatgcctaatagatcaaagggtaaaggttcgcttgaaggcctgcccctggatttttgggattttgtaccttctgagaataaacaagtccagtcaaatatgaccaagataatattgtcgccctaccaagtcttctacatgttgaagaaaagtgaccctgaacttatcaaacaatttgtttcaaggcgggagctattgtttctatcatgtttaccagtaactcctaattgccatcgtgttgtagaaattggatatgggcttccagatggacgcctaacatttgatgacagaacaaaggcttacaagaggatggttgatgtcagtaggagaattgatgactaccgccagcatccacatttcagtgttcttgcaagttcacttgtctcaagccgggtttcagaatgcctaaagtcatccaagttgtactctaaaaaggcagatggagagacatccacagatacatatggaatgaaatggctaaaggatgttgttctcagcaaaagatcagataatgtttttaggagtattatggttggagacccaaaaattaagttatgggaaattggcattcctgaagatttatcctcaagcctggttgtttctgagcacgtcagttcttataattttcaaagtacaaatctgaagtgcaacctgcaccttctagccaagcaagaactatttattcggcgaaatggaaagctaatgtttcttcggaaggcagaccagctagaaataggtgacattgcctatagaccattgcaggatggtgatattattctcatcaacaggcctccttcagttcatcaacattcattgattgcattatctgcaaaaattctaccaattcactctgtcgtatcaatcaatccactatgctgtacaccttttgcaggagattttgatggtgattgtttgcatggatatatcccacaatctatacgctcaagggttgaacttgaagagctggtaagcttacacaaccagctgttgaatatgcaagacggtcgaaatttggtgtcactaacacatgactctctagctgctgcacatttgttaacaagtacagatgtttttctgaagaaatctgaattacagcagcttcaaatgctatgcctttcagtatcaacaccagcacccgcagttattaaatctatgaattttcaaggttctctgtggactggtaaacaacttttcagcatgcttcttccttcaggcatgaatttcagttgcgatacggagttacatatcatggacagtgaggtgcttacctgctcactgggttcttcttggctacaaaataacacatctggtcttttctctgtcatgttcaaacagtatggttgcaaggcacttgacttcctttcttcagcacaagaagtactatgtgagttcttaaccatgaggggtttaagtgtctctctttcagatctctacatgttctcagaccattactcaaggagaaaactagctgagggagttaagttggcactgtatgaagctgaagaagcttttcgagtcaagaaaatattgttagatccaattaacataccagttctgaagtgtcacgatgaaactgaagatgtaacttacagacaatctgattgtatccagagcaatccatcagttatcagatcttcaatcatggcatttaaagacgtcttccgtgatctcttaaaaatggtgcaacaacatgttagtaatgataactcaatgatggtgatgataaatgcaggaagcaagggtagcatgttgaaatatgctcaacaaactgcatgtattggtcttcaacttccagctagcaaatttcccttcagaattccttcccaactctcatgtattagctggaatggacagaaatcgttgaactatgaagctgagagtactagtgaacgtgtgggaggtcaaaacctttatgctgtgataaagaattccttcattgagggtttgaatccattggaatgtcttctgcacgctatatctggcagggcaaacttctttagtgaaaatgctgatgtaccagggacattgacaagaaaattaatgtatcacttgagagatatacatgttgcctatgatggaactgttagaagttcttatgggcagcaaatagtgcaattctcttatgatagtgttgatgacctagtagataaactcggcgccccggttggatgtcgggctgcttgttccatttcagaagctgcatatggagctttggaacacccggtcaatggtttagaggactcccctctcatgaatctacaagaagtatttaagtgtcacaaggctacaaattcaggggatcatattggtttgcttttcctgtcaaggcatttgaagaagtacagatacggtctggaatatgcatccctagaagttaaaaaccatcttgagcgagtgaacttctctgatttggttgaaaccatcatgattatatacgatggacatgacaaaataagaaacgaaggaatgtggaccacccattttcatataaacaaggcaatgatgaagaaaaaaagattaggattgagatttgttgtagatgaacttgcaaaagagtatgacaccaccagagatcagctaaacaacgcaatcccatcaattcgtatctcaaggagaaaatgtttagtaggtgacgagggtgttaaaagttcatcatgctgtatcgctgtcgtagcacatgctgaacgcaactccatctctcagttggacactatcaagacaagggtgattccaagcatactggatacactgctgaaaggaaaaaagatagttcggttcaagtatttttggacagcatgaatctg

SEQ ID NO: 3344 - DNA, 3578 bp, Zea Mays
gagattctcctcgccccttccactagactactggagtacccgacggcccgaggcggcgagctcgtcggcgactgaccgccgccggagcagccgccgcctcccgctggttcctgtaccacagcctcgcaggagcgcctccgttcgctacgccacccgccactgtgctgtcggaaggcagctcggactactcgcgccgcctcggcttctccgcgctcgccgcccctccgccggcgtgatcaaggatggagctacatcgtgaacctcctgaagctattctgaatgccataaaatttgatctcatgacgagtacggatatggaaaaattgagcagcatgagcataatcgaagtgagtgatgtcactagtccgaagctaggattaccaaatggttccctgcagtgtgagacttgtggatcacaacgtggacgcgactgtgatgggcattttggtgtgactaaactggcggcaacagtacacaatccatacttcatcgatgacgttgttcactttctaaaccgaatatgtcctggctgtctcagcccaagggaaggcatagatacaaagagattggagagagaaaaggttcaagcaacatgcaagtattgttcgaaggatggctctaaactttaccctagcatagtctttaagacactgtcaagtccaagagtattattattcaagagtaaacttcacagaaacgccagcgtgatggaaagaatttcgattgttgcagaagctgctgacagaatgcctaatagatcaaagggtaaaggttcgcttgaaggcctgcccctggatttttgggattttgtaccttctgagaataaacaagtccagtcaaatatgaccaagataatattgtcgccctaccaagtcttctacatgttgaagaaaagtgaccctgaacttatcaaacaatttgtttcaaggcgggagctattgtttctatcatgtttaccagtaactcctaattgccatcgtgttgtagaaattggatatgggcttccagatggacgcctaacatttgatgacagaacaaaggcttacaagaggatggttgatgtcagtaggagaattgatgactaccgccagcatccacatttcagtgttcttgcaagttcacttgtctcaagccgggtttcagaatgcctaaagtcatccaagttgtactctaaaaaggcagatggagagacatccacagatacatatggaatgaaatggctaaaggatgttgttctcagcaaaagatcagataatgtttttaggagtattatggttggagacccaaaaattaagttatgggaaattggcattcctgaagatttatcctcaagcctggttgtttctgagcacgtcagttcttataattttcaaagtacaaatctgaagtgcaacctgcaccttctagccaagcaagaactatttattcggcgaaatggaaagctaatgtttcttcggaaggcagaccagctagaaataggtgacattgcctatagaccattgcaggatggtgatattattctcatcaacaggcctccttcagttcatcaacattcattgattgcattatctgcaaaaattctaccaattcactctgtcgtatcaatcaatccactatgctgtacaccttttgcaggagattttgatggtgattgtttgcatggatatatcccacaatctatacgctcaagggttgaacttgaagagctggtaagcttacacaaccagctgttgaatatgcaagacggtcgaaatttggtgtcactaacacatgactctctagctgctgcacatttgttaacaagtacagatgtttttctgaagaaatctgaattacagcagcttcaaatgctatgcctttcagtatcaacaccagcacccgcagttattaaatctatgaattttcaaggttctctgtggactggtaaacaacttttcagcatgcttcttccttcaggcatgaatttcagttgcgatacggagttacatatcatggacagtgaggtgcttacctgctcactgggttcttcttggctacaaaataacacatctggtcttttctctgtcatgttcaaacagtatggttgcaaggcacttgacttcctttcttcagcacaagaagtactatgtgagttcttaaccatgaggggtttaagtgtctctctttcagatctctacatgttctcagaccattactcaaggagaaaactagctgagggagttaagttggcactgtatgaagctgaagaagcttttcgagtcaagaaaatattgttagatccaattaacataccagttctgaagtgtcacgatgaaactgaagatgtaacttacagacaatctgattgtatccagagcaatccatcagttatcagatcttcaatcatggcatttaaagacgtcttccgtgatctcttaaaaatggtgcaacaacatgttagtaatgataactcaatgatggtgatgataaatgcaggaagcaagggtagcatgttgaaatatgctcaacaaactgcatgtattggtcttcaacttccagctagcaaatttcccttcagaattccttcccaactctcatgtattagctggaatggacagaaatcgttgaactatgaagctgagagtactagtgaacgtgtgggaggtcaaaacctttatgctgtgataaagaattccttcattgagggtttgaatccattggaatgtcttctgcacgctatatctggcagggcaaacttctttagtgaaaatgctgatgtaccagggacattgacaagaaaattaatgtatcacttgagagatatacatgttgcctatgatggaactgttagaagttcttatgggcagcaaatagtgcaattctcttatgatagtgttgatgacctagtagataaactcggcgccccggttggatgtcgggctgcttgttccatttcagaagctgcatatggagctttggaacacccggtcaatggtttagaggactcccctctcatgaatctacaagaagtatttaagtgtcacaaggctacaaattcaggggatcatattggtttgcttttcctgtcaaggcatttgaagaagtacagatacggtctggaatatgcatccctagaagttaaaaaccatcttgagcgagtgaacttctctgatttggttgaaaccatcatgattatatacgatggacatgacaaaataagaaacgaaggaatgtggaccacccattttcatataaacaaggcaatgatgaagaaaaaaagattaggattgagatttgttgtagatgaacttgcaaaagagtatgacaccaccagagatcagctaaacaacgcaatcccatcaattcgtatctcaaggagaaaatgtttagtaggtgacgagggtgttaaaagttcatcatgctgtatcgctgtcgtagcacatgctgaacgcaactccatctctcagttggacactatcaagacaagggtgattccaagcatactggatacactgctgaaaggctgctcaggaatatcaagcctttcatgagattgtcagtaacctccagaattctagagctggtaaagacaaatggac

SEQ ID NO: 3345 - DNA, 5385 bp, Zea Mays
gagattctcctcgccccttccactagactactggagtacccgacggcccgaggcggcgagctcgtcggcgactgaccgccgccggagcagccgccgcctcccgctggttcctgtaccacagcctcgcaggagcgcctccgttcgctacgccacccgccactgtgctgtcggaaggcagctcggactactcgcgccgcctcggcttctccgcgctcgccgcccctccgccggcgtgatcaaggatggagctacatcgtgaacctcctgaagctattctgaatgccataaaatttgatctcatgacgagtacggatatggaaaaattgagcagcatgagcataatcgaagtgagtgatgtcactagtccgaagctaggattaccaaatggttccctgcagtgtgagacttgtggatcacaacgtggacgcgactgtgatgggcattttggtgtgactaaactggcggcaacagtacacaatccatacttcatcgatgacgttgttcactttctaaaccgaatatgtcctggctgtctcagcccaagggaaggcatagatacaaagagattggagagagaaaaggttcaagcaacatgcaagtattgttcgaaggatggctctaaactttaccctagcatagtctttaagacactgtcaagtccaagagtattattattcaagagtaaacttcacagaaacgccagcgtgatggaaagaatttcgattgttgcagaagctgctgacagaatgcctaatagatcaaagggtaaaggttcgcttgaaggcctgcccctggatttttgggattttgtaccttctgagaataaacaagtccagtcaaatatgaccaagataatattgtcgccctaccaagtcttctacatgttgaagaaaagtgaccctgaacttatcaaacaatttgtttcaaggcgggagctattgtttctatcatgtttaccagtaactcctaattgccatcgtgttgtagaaattggatatgggcttccagatggacgcctaacatttgatgacagaacaaaggcttacaagaggatggttgatgtcagtaggagaattgatgactaccgccagcatccacatttcagtgttcttgcaagttcacttgtctcaagccgggtttcagaatgcctaaagtcatccaagttgtactctaaaaaggcagatggagagacatccacagatacatatggaatgaaatggctaaaggatgttgttctcagcaaaagatcagataatgtttttaggagtattatggttggagacccaaaaattaagttatgggaaattggcattcctgaagatttatcctcaagcctggttgtttctgagcacgtcagttcttataattttcaaagtacaaatctgaagtgcaacctgcaccttctagccaagcaagaactatttattcggcgaaatggaaagctaatgtttcttcggaaggcagaccagctagaaataggtgacattgcctatagaccattgcaggatggtgatattattctcatcaacaggcctccttcagttcatcaacattcattgattgcattatctgcaaaaattctaccaattcactctgtcgtatcaatcaatccactatgctgtacaccttttgcaggagattttgatggtgattgtttgcatggatatatcccacaatctatacgctcaagggttgaacttgaagagctggtaagcttacacaaccagctgttgaatatgcaagacggtcgaaatttggtgtcactaacacatgactctctagctgctgcacatttgttaacaagtacagatgtttttctgaagaaatctgaattacagcagcttcaaatgctatgcctttcagtatcaacaccagcacccgcagttattaaatctatgaattttcaaggttctctgtggactggtaaacaacttttcagcatgcttcttccttcaggcatgaatttcagttgcgatacggagttacatatcatggacagtgaggtgcttacctgctcactgggttcttcttggctacaaaataacacatctggtcttttctctgtcatgttcaaacagtatggttgcaaggcacttgacttcctttcttcagcacaagaagtactatgtgagttcttaaccatgaggggtttaagtgtctctctttcagatctctacatgttctcagaccattactcaaggagaaaactagctgagggagttaagttggcactgtatgaagctgaagaagcttttcgagtcaagaaaatattgttagatccaattaacataccagttctgaagtgtcacgatgaaactgaagatgtaacttacagacaatctgattgtatccagagcaatccatcagttatcagatcttcaatcatggcatttaaagacgtcttccgtgatctcttaaaaatggtgcaacaacatgttagtaatgataactcaatgatggtgatgataaatgcaggaagcaagggtagcatgttgaaatatgctcaacaaactgcatgtattggtcttcaacttccagctagcaaatttcccttcagaattccttcccaactctcatgtattagctggaatggacagaaatcgttgaactatgaagctgagagtactagtgaacgtgtgggaggtcaaaacctttatgctgtgataaagaattccttcattgagggtttgaatccattggaatgtcttctgcacgctatatctggcagggcaaacttctttagtgaaaatgctgatgtaccagggacattgacaagaaaattaatgtatcacttgagagatatacatgttgcctatgatggaactgttagaagttcttatgggcagcaaatagtgcaattctcttatgatagtgttgatgacctagtagataaactcggcgccccggttggatgtcgggctgcttgttccatttcagaagctgcatatggagctttggaacacccggtcaatggtttagaggactcccctctcatgaatctacaagaagtatttaagtgtcacaaggctacaaattcaggggatcatattggtttgcttttcctgtcaaggcatttgaagaagtacagatacggtctggaatatgcatccctagaagttaaaaaccatcttgagcgagtgaacttctctgatttggttgaaaccatcatgattatatacgatggacatgacaaaataagaaacgaaggaatgtggaccacccattttcatataaacaaggcaatgatgaagaaaaaaagattaggattgagatttgttgtagatgaacttgcaaaagagtatgacaccaccagagatcagctaaacaacgcaatcccatcaattcgtatctcaaggagaaaatgtttagtaggtgacgagggtgttaaaagttcatcatgctgtatcgctgtcgtagcacatgctgaacgcaactccatctctcagttggacactatcaagacaagggtgattccaagcatactggatacactgctgaaaggttttttggaatttaaggatgttgagatccagtgtccacatgatggtgaacttcttgttaaagtttgtatgtctgagcattgtaaaggggggaggttctggcctactctacaaaatgcttgcattccagtaatggagttgattgactgggagctgagtcaaccaagcaatgtatctgatattttctgttcatatggcatagactcagcatggaaatactttgttgaatccttgaaatcagcgactactgatactgggaggaacattcgccgggagcacttgctggttattgcagatagcttgtctgtaactgggcagttccatgcattaagcagtcaaggtttaaagcagcagcgcactcggttatcgatctcgtctccattttctgaagcatgtttttctaggcctgcacaaagttttataaatgctgcaaagcaatgttcagtggacaatctgtgtggaagtctcgatgcagttgcttggggcaaagagcctttcaatgggacgtcagggccttttgaaattatgcactcgggaaagccacatgaaccagaacaaaatgagagcatctatgatttcctatgcagctctaaagttcggaattttgaaaagaatcatttggatacccgtagacaaagtactgaaaataatcatttggatacccgtagacaaagtactgaaaatgcttcgatatgtagattagcatgcaagtcttctaaaggcagtacgaccgtcaatggtgttgctataactatcgaccaggactttcttcatgctaaagtcagtatatgggataacattatcgatatgcgtacttccttacaaaacatgctaagagagtacccgttaaatggatatgtggcggagccagataaatcacagttaatcgaggccctgaaatttcattccagaggtgctgaaaagatcggtgtgggagtaagagaaattaagatcgggttgaatcctagtcacccaggtacaaggtgcttcattttgctgagaaacgatgataccactgaagacttttcttaccacaagtgtgttcagggtgctgcagactctatctcaccccagctcggaagttatttgaagaaactatattacagagcataagcttatgcaacactcccactagttcatttttttaactaaaacgtggcaaataaaaaagaacggatggagtaggattttggaaagtgttcctggcaacatcttgttctgatcagaccatattaccaatttctgataaggaaactacgtgtcgcattttaaggatgaggtgaaaactgaaagggtctggcgctcagaactcagaaggtcttctggactggaggtgtatgtcaactcaactcaatgggactatgtaaggtgggcctgagtcatgactgcggtttcatgcctgcaattctctagtcagtagtataaatactagtctgcgtgttttctaatatgaagatccatctattttattacttaaccatagcgtagatgattggtaacagatagatacattttatttactgattaaaatgcagcagcgactccccgaacttaaaacaggtaaacgggtgtggaaacttagtggctcattcaaaactgtctaaaatcgggtttgctcaaacaaagtgtcgacatggcatgtcatgttgaaatcatttgagtctctaaatttggtttacagacttttattagtgtgcttcaatcgtagcacaccaaatcagtattcggtttgagcatccgatttctgatggttttgcacaggccggccaagttatatgatctagttttttaacttaggggatctaattgatacaacatgccaagtttaagaatggctattgtatcttactcttatttattgaacaagtaatgcacattcccagtc

SEQ ID NO: 3346 - DNA, 3424 bp, Zea Mays
atggagctacatcgtgaacctcctgaagctattctgaatgccataaaatttgatctcatgacgagtacggatatggaaaaattgagcagcatgagcataatcgaagtgagtgatgtcactagtccgaagctaggattaccaaatggttccctgcagtgtgagacttgtggatcacaacgtggacgcgactgtgatgggcattttggtgtgactaaactggcggcaacagtacacaatccatacttcatcgatgacgttgttcactttctaaaccgaatatgtcctggctgtctcagcccaagggaaggcatagatacaaagagattggagagagaaaaggttcaagcaacatgcaagtattgttcgaaggatggctctaaactttaccctagcatagtctttaagacactgtcaagtccaagagtattattattcaagagtaaacttcacagaaacgccagcgtgatggaaagaatttcgattgttgcagaagctgctgacagaatgcctaatagatcaaagggtaaaggttcgcttgaaggcctgcccctggatttttgggattttgtaccttctgagaataaacaagtccagtcaaatatgaccaagataatattgtcgccctaccaagtcttctacatgttgaagaaaagtgaccctgaacttatcaaacaatttgtttcaaggcgggagctattgtttctatcatgtttaccagtaactcctaattgccatcgtgttgtagaaattggatatgggcttccagatggacgcctaacatttgatgacagaacaaaggcttacaagaggatggttgatgtcagtaggagaattgatgactaccgccagcatccacatttcagtgttcttgcaagttcacttgtctcaagccgggtttcagaatgcctaaagtcatccaagttgtactctaaaaaggcagatggagagacatccacagatacatatggaatgaaatggctaaaggatgttgttctcagcaaaagatcagataatgtttttaggagtattatggttggagacccaaaaattaagttatgggaaattggcattcctgaagatttatcctcaagcctggttgtttctgagcacgtcagttcttataattttcaaagtacaaatctgaagtgcaacctgcaccttctagccaagcaagaactatttattcggcgaaatggaaagctaatgtttcttcggaaggcagaccagctagaaataggtgacattgcctatagaccattgcaggatggtgatattattctcatcaacaggcctccttcagttcatcaacattcattgattgcattatctgcaaaaattctaccaattcactctgtcgtatcaatcaatccactatgctgtacaccttttgcaggagattttgatggtgattgtttgcatggatatatcccacaatctatacgctcaagggttgaacttgaagagctggtaagcttacacaaccagctgttgaatatgcaagacggtcgaaatttggtgtcactaacacatgactctctagctgctgcacatttgttaacaagtacagatgtttttctgaagaaatctgaattacagcagcttcaaatgctatgcctttcagtatcaacaccagcacccgcagttattaaatctatgaattttcaaggttctctgtggactggtaaacaacttttcagcatgcttcttccttcaggcatgaatttcagttgcgatacggagttacatatcatggacagtgaggtgcttacctgctcactgggttcttcttggctacaaaataacacatctggtcttttctctgtcatgttcaaacagtatggttgcaaggcacttgacttcctttcttcagcacaagaagtactatgtgagttcttaaccatgaggggtttaagtgtctctctttcagatctctacatgttctcagaccattactcaaggagaaaactagctgagggagttaagttggcactgtatgaagctgaagaagcttttcgagtcaagaaaatattgttagatccaattaacataccagttctgaagtgtcacgatgaaactgaagatgtaacttacagacaatctgattgtatccagagcaatccatcagttatcagatcttcaatcatggcatttaaagacgtcttccgtgatctcttaaaaatggtgcaacaacatgttagtaatgataactcaatgatggtgatgataaatgcaggaagcaagggtagcatgttgaaatatgctcaacaaactgcatgtattggtcttcaacttccagctagcaaatttcccttcagaattccttcccaactctcatgtattagctggaatggacagaaatcgttgaactatgaagctgagagtactagtgaacgtgtgggaggtcaaaacctttatgctgtgataaagaattccttcattgagggtttgaatccattggaatgtcttctgcacgctatatctggcagggcaaacttctttagtgaaaatgctgatgtaccagggacattgacaagaaaattaatgtatcacttgagagatatacatgttgcctatgatggaactgttagaagttcttatgggcagcaaatagtgcaattctcttatgatagtgttgatgacctagtagataaactcggcgccccggttggatgtcgggctgcttgttccatttcagaagctgcatatggagctttggaacacccggtcaatggtttagaggactcccctctcatgaatctacaagaagtatttaagtgtcacaaggctacaaattcaggggatcatattggtttgcttttcctgtcaaggcatttgaagaagtacagatacggtctggaatatgcatccctagaagttaaaaaccatcttgagcgagtgaacttctctgatttggttgaaaccatcatgattatatacgatggacatgacaaaataagaaacgaaggaatgtggaccacccattttcatataaacaaggcaatgatgaagaaaaaaagattaggattgagatttgttgtagatgaacttgcaaaagagtatgacaccaccagagatcagctaaacaacgcaatcccatcaattcgtatctcaaggagaaaatgtttagtaggtgacgagggtgttaaaagttcatcatgctgtatcgctgtcgtagcacatgctgaacgcaactccatctctcagttggacactatcaagacaagggtgattccaagcatactggatacactgctgaaagaagtaagaaatcatggtctgagctatataggattcctttctaaactgcagtgcggaggggcaaaatctttccaggtgtagcttgtatggctgtttcttctgaaattttgtgaaaccatagctcacttcatttggctttttattattctagcatcacatgattttg

SEQ ID NO: 3347 - DNA, 3136 bp, Zea Mays
atggagctacatcgtgaacctcctgaagctattctgaatgccataaaatttgatctcatgacgagtacggatatggaaaaattgagcagcatgagcataatcgaagtgagtgatgtcactagtccgaagctaggattaccaaatggttccctgcagtgtgagacttgtggatcacaacgtggacgcgactgtgatgggcattttggtgtgactaaactggcggcaacagtacacaatccatacttcatcgatgacgttgttcactttctaaaccgaatatgtcctggctgtctcagcccaagggaaggcatagatacaaagaagctgctgacagaatgcctaatagatcaaagggtaaaggttcgcttgaaggcctgcccctggatttttgggattttgtaccttctgagaataaacaagtccagtcaaatatgaccaagataatattgtcgccctaccaagtcttctacatgttgaagaaaagtgaccctgaacttatcaaacaatttgtttcaaggcgggagctattgtttctatcatgtttaccagtaactcctaattgccatcgtgttgtagaaattggatatgggcttccagatggacgcctaacatttgatgacagaacaaaggcttacaagaggatggttgatgtcagtaggagaattgatgactaccgccagcatccacatttcagtgttcttgcaagttcacttgtctcaagccgggtttcagaatgcctaaagtcatccaagttgtactctaaaaaggcagatggagagacatccacagatacatatggaatgaaatggctaaaggatgttgttctcagcaaaagatcagataatgtttttaggagtattatggttggagacccaaaaattaagttatgggaaattggcattcctgaagatttatcctcaagcctggttgtttctgagcacgtcagttcttataattttcaaagtacaaatctgaagtgcaacctgcaccttctagccaagcaagaactatttattcggcgaaatggaaagctaatgtttcttcggaaggcagaccagctagaaataggtgacattgcctatagaccattgcaggatggtgatattattctcatcaacaggcctccttcagttcatcaacattcattgattgcattatctgcaaaaattctaccaattcactctgtcgtatcaatcaatccactatgctgtacaccttttgcaggagattttgatggtgattgtttgcatggatatatcccacaatctatacgctcaagggttgaacttgaagagctggtaagcttacacaaccagctgttgaatatgcaagacggtcgaaatttggtgtcactaacacatgactctctagctgctgcacatttgttaacaagtacagatgtttttctgaagaaatctgaattacagcagcttcaaatgctatgcctttcagtatcaacaccagcacccgcagttattaaatctatgaattttcaaggttctctgtggactggtaaacaacttttcagcatgcttcttccttcaggcatgaatttcagttgcgatacggagttacatatcatggacagtgaggtgcttacctgctcactgggttcttcttggctacaaaataacacatctggtcttttctctgtcatgttcaaacagtatggttgcaaggcacttgacttcctttcttcagcacaagaagtactatgtgagttcttaaccatgaggggtttaagtgtctctctttcagatctctacatgttctcagaccattactcaaggagaaaactagctgagggagttaagttggcactgtatgaagctgaagaagcttttcgagtcaagaaaatattgttagatccaattaacataccagttctgaagtgtcacgatgaaactgaagatgtaacttacagacaatctgattgtatccagagcaatccatcagttatcagatcttcaatcatggcatttaaagacgtcttccgtgatctcttaaaaatggtgcaacaacatgttagtaatgataactcaatgatggtgatgataaatgcaggaagcaagggtagcatgttgaaatatgctcaacaaactgcatgtattggtcttcaacttccagctagcaaatttcccttcagaattccttcccaactctcatgtattagctggaatggacagaaatcgttgaactatgaagctgagagtactagtgaacgtgtgggaggtcaaaacctttatgctgtgataaagaattccttcattgagggtttgaatccattggaatgtcttctgcacgctatatctggcagggcaaacttctttagtgaaaatgctgatgtaccagggacattgacaagaaaattaatgtatcacttgagagatatacatgttgcctatgatggaactgttagaagttcttatgggcagcaaatagtgcaattctcttatgatagtgttgatgacctagtagataaactcggcgccccggttggatgtcgggctgcttgttccatttcagaagctgcatatggagctttggaacacccggtcaatggtttagaggactcccctctcatgaatctacaagaagtatttaagtgtcacaaggctacaaattcaggggatcatattggtttgcttttcctgtcaaggcatttgaagaagtacagatacggtctggaatatgcatccctagaagttaaaaaccatcttgagcgagtgaacttctctgatttggttgaaaccatcatgattatatacgatggacatgacaaaataagaaacgaaggaatgtggaccacccattttcatataaacaaggcaatgatgaagaaaaaaagattaggattgagatttgttgtagatgaacttgcaaaagagtatgacaccaccagagatcagctaaacaacgcaatcccatcaattcgtatctcaaggagaaaatgtttagtaggtgacgagggtgttaaaagttcatcatgctgtatcgctgtcgtagcacatgctgaacgcaactccatctctcagttggacactatcaagacaagggtgattccaagcatactggatacactgctgaaaggaaaaaagatagttcggttcaagtatttttggacagcatgaatctg

SEQ ID NO: 3348 - DNA, 5106 bp, Zea Mays
atggagctacatcgtgaacctcctgaagctattctgaatgccataaaatttgatctcatgacgagtacggatatggaaaaattgagcagcatgagcataatcgaagtgagtgatgtcactagtccgaagctaggattaccaaatggttccctgcagtgtgagacttgtggatcacaacgtggacgcgactgtgatgggcattttggtgtgactaaactggcggcaacagtacacaatccatacttcatcgatgacgttgttcactttctaaaccgaatatgtcctggctgtctcagcccaagggaaggcatagatacaaaggattggagagagaaaaggttcaagcaacatgcaagtattgttcgaaggatggctctaaactttaccctagcatagtctttaagacactgtcaagtccaagagtattattattcaagagtaaacttcacagaaacgccagcgtgatggaaagaatttcgattgttgcagaagctgctgacagaatgcctaatagatcaaagggtaaaggttcgcttgaaggcctgcccctggatttttgggattttgtaccttctgagaataaacaagtccagtcaaatatgaccaagataatattgtcgccctaccaagtcttctacatgttgaagaaaagtgaccctgaacttatcaaacaatttgtttcaaggcgggagctattgtttctatcatgtttaccagtaactcctaattgccatcgtgttgtagaaattggatatgggcttccagatggacgcctaacatttgatgacagaacaaaggcttacaagaggatggttgatgtcagtaggagaattgatgactaccgccagcatccacatttcagtgttcttgcaagttcacttgtctcaagccgggtttcagaatgcctaaagtcatccaagttgtactctaaaaaggcagatggagagacatccacagatacatatggaatgaaatggctaaaggatgttgttctcagcaaaagatcagataatgtttttaggagtattatggttggagacccaaaaattaagttatgggaaattggcattcctgaagatttatcctcaagcctggttgtttctgagcacgtcagttcttataattttcaaagtacaaatctgaagtgcaacctgcaccttctagccaagcaagaactatttattcggcgaaatggaaagctaatgtttcttcggaaggcagaccagctagaaataggtgacattgcctatagaccattgcaggatggtgatattattctcatcaacaggcctccttcagttcatcaacattcattgattgcattatctgcaaaaattctaccaattcactctgtcgtatcaatcaatccactatgctgtacaccttttgcaggagattttgatggtgattgtttgcatggatatatcccacaatctatacgctcaagggttgaacttgaagagctggtaagcttacacaaccagctgttgaatatgcaagacggtcgaaatttggtgtcactaacacatgactctctagctgctgcacatttgttaacaagtacagatgtttttctgaagaaatctgaattacagcagcttcaaatgctatgcctttcagtatcaacaccagcacccgcagttattaaatctatgaattttcaaggttctctgtggactggtaaacaacttttcagcatgcttcttccttcaggcatgaatttcagttgcgatacggagttacatatcatggacagtgaggtgcttacctgctcactgggttcttcttggctacaaaataacacatctggtcttttctctgtcatgttcaaacagtatggttgcaaggcacttgacttcctttcttcagcacaagaagtactatgtgagttcttaaccatgaggggtttaagtgtctctctttcagatctctacatgttctcagaccattactcaaggagaaaactagctgagggagttaagttggcactgtatgaagctgaagaagcttttcgagtcaagaaaatattgttagatccaattaacataccagttctgaagtgtcacgatgaaactgaagatgtaacttacagacaatctgattgtatccagagcaatccatcagttatcagatcttcaatcatggcatttaaagacgtcttccgtgatctcttaaaaatggtgcaacaacatgttagtaatgataactcaatgatggtgatgataaatgcaggaagcaagggtagcatgttgaaatatgctcaacaaactgcatgtattggtcttcaacttccagctagcaaatttcccttcagaattccttcccaactctcatgtattagctggaatggacagaaatcgttgaactatgaagctgagagtactagtgaacgtgtgggaggtcaaaacctttatgctgtgataaagaattccttcattgagggtttgaatccattggaatgtcttctgcacgctatatctggcagggcaaacttctttagtgaaaatgctgatgtaccagggacattgacaagaaaattaatgtatcacttgagagatatacatgttgcctatgatggaactgttagaagttcttatgggcagcaaatagtgcaattctcttatgatagtgttgatgacctagtagataaactcggcgccccggttggatgtcgggctgcttgttccatttcagaagctgcatatggagctttggaacacccggtcaatggtttagaggactcccctctcatgaatctacaagaagtatttaagtgtcacaaggctacaaattcaggggatcatattggtttgcttttcctgtcaaggcatttgaagaagtacagatacggtctggaatatgcatccctagaagttaaaaaccatcttgagcgagtgaacttctctgatttggttgaaaccatcatgattatatacgatggacatgacaaaataagaaacgaaggaatgtggaccacccattttcatataaacaaggcaatgatgaagaaaaaaagattaggattgagatttgttgtagatgaacttgcaaaagagtatgacaccaccagagatcagctaaacaacgcaatcccatcaattcgtatctcaaggagaaaatgtttagtaggtgacgagggtgttaaaagttcatcatgctgtatcgctgtcgtagcacatgctgaacgcaactccatctctcagttggacactatcaagacaagggtgattccaagcatactggatacactgctgaaaggttttttggaatttaaggatgttgagatccagtgtccacatgatggtgaacttcttgttaaagtttgtatgtctgagcattgtaaaggggggaggttctggcctactctacaaaatgcttgcattccagtaatggagttgattgactgggagctgagtcaaccaagcaatgtatctgatattttctgttcatatggcatagactcagcatggaaatactttgttgaatccttgaaatcagcgactactgatactgggaggaacattcgccgggagcacttgctggttattgcagatagcttgtctgtaactgggcagttccatgcattaagcagtcaaggtttaaagcagcagcgcactcggttatcgatctcgtctccattttctgaagcatgtttttctaggcctgcacaaagttttataaatgctgcaaagcaatgttcagtggacaatctgtgtggaagtctcgatgcagttgcttggggcaaagagcctttcaatgggacgtcagggccttttgaaattatgcactcgggaaagccacatgaaccagaacaaaatgagagcatctatgatttcctatgcagctctaaagttcggaattttgaaaagaatcatttggatacccgtagacaaagtactgaaaatgcttcgatatgtagattagcatgcaagtcttctaaaggcagtacgaccgtcaatggtgttgctataactatcgaccaggactttcttcatgctaaagtcagtatatgggataacattatcgatatgcgtacttccttacaaaacatgctaagagagtacccgttaaatggatatgtggcggagccagataaatcacagttaatcgaggccctgaaatttcattccagaggtgctgaaaagatcggtgtgggagtaagagaaattaagatcgggttgaatcctagtcacccaggtacaaggtgcttcattttgctgagaaacgatgataccactgaagacttttcttaccacaagtgtgttcagggtgctgcagactctatctcaccccagctcggaagttatttgaagaaactatattacagagcataagcttatgcaacactcccactagttcatttttttaactaaaacgtggcaaataaaaaagaacggatggagtaggattttggaaagtgttcctggcaacatcttgttctgatcagaccatattaccaatttctgataaggaaactacgtgtcgcattttaaggatgaggtgaaaactgaaagggtctggcgctcagaactcagaaggtcttctggactggaggtgtatgtcaactcaactcaatgggactatgtaaggtgggcctgagtcatgactgcggtttcatgcctgcaattctctagtcagtagtataaatactagtctgcgtgttttctaatatgaagatccatctattttattacttaaccatagcgtagatgattggtaacagatagatacattttatttactgattaaaatgcagcagcgactccccgaacttaaaacaggtaaacgggtgtggaaacttagtggctcattcaaaactgtctaaaatcgggtttgctcaaacaaagtgtcgacatggcatgtcatgttgaaatcatttgagtctctaaatttggtttacagacttttattagtgtgcttcaatcgtagcacaccaaatcagtattcggtttgagcatccgatttctgatggttttgcacaggccggccaagttatatgatctagttttttaacttaggggatctaattgatacaacatgccaagtttaagaatggctattgtatcttactcttatttattgaacaagtaatgcacattcccagtc

SEQ ID NO: 3349 - DNA, 2564 bp, Zea Mays
gtcgtgatgaagattgtagtggtcgtgagatctccggagtaggatgacagaacaaaggcttacaagaggatggttgatgtcagtaggagaattgatgactaccgccagcatccacatttcagtgttcttgcaagttcacttgtctcaagccgggtttcagaatgcctaaagtcatccaagttgtactctaaaaaggcagatggagagacatccacagatacatatggaatgaaatggctaaaggatgttgttctcagcaaaagatcagataatgtttttaggagtattatggttggagacccaaaaattaagttatgggaaattggcattcctgaagatttatcctcaagcctggttgtttctgagcacgtcagttcttataattttcaaagtacaaatctgaagtgcaacctgcaccttctagccaagcaagaactatttattcggcgaaatggaaagctaatgtttcttcggaaggcagaccagctagaaataggtgacattgcctatagaccattgcaggatggtgatattattctcatcaacaggcctccttcagttcatcaacattcattgattgcattatctgcaaaaattctaccaattcactctgtcgtatcaatcaatccactatgctgtacaccttttgcaggagattttgatggtgattgtttgcatggatatatcccacaatctatacgctcaagggttgaacttgaagagctggtaagcttacacaaccagctgttgaatatgcaagacggtcgaaatttggtgtcactaacacatgactctctagctgctgcacatttgttaacaagtacagatgtttttctgaagaaatctgaattacagcagcttcaaatgctatgcctttcagtatcaacaccagcacccgcagttattaaatctatgaattttcaaggttctctgtggactggtaaacaacttttcagcatgcttcttccttcaggcatgaatttcagttgcgatacggagttacatatcatggacagtgaggtgcttacctgctcactgggttcttcttggctacaaaataacacatctggtcttttctctgtcatgttcaaacagtatggttgcaaggcacttgacttcctttcttcagcacaagaagtactatgtgagttcttaaccatgaggggtttaagtgtctctctttcagatctctacatgttctcagaccattactcaaggagaaaactagctgagggagttaagttggcactgtatgaagctgaagaagcttttcgagtcaagaaaatattgttagatccaattaacataccagttctgaagtgtcacgatgaaactgaagatgtaacttacagacaatctgattgtatccagagcaatccatcagttatcagatcttcaatcatggcatttaaagacgtcttccgtgatctcttaaaaatggtgcaacaacatgttagtaatgataactcaatgatggtgatgataaatgcaggaagcaagggtagcatgttgaaatatgctcaacaaactgcatgtattggtcttcaacttccagctagcaaatttcccttcagaattccttcccaactctcatgtattagctggaatggacagaaatcgttgaactatgaagctgagagtactagtgaacgtgtgggaggtcaaaacctttatgctgtgataaagaattccttcattgagggtttgaatccattggaatgtcttctgcacgctatatctggcagggcaaacttctttagtgaaaatgctgatgtaccagggacattgacaagaaaattaatgtatcacttgagagatatacatgttgcctatgatggaactgttagaagttcttatgggcagcaaatagtgcaattctcttatgatagtgttgatgacctagtagataaactcggcgccccggttggatgtcgggctgcttgttccatttcagaagctgcatatggagctttggaacacccggtcaatggtttagaggactcccctctcatgaatctacaagaagtatttaagtgtcacaaggctacaaattcaggggatcatattggtttgcttttcctgtcaaggcatttgaagaagtacagatacggtctggaatatgcatccctagaagttaaaaaccatcttgagcgagtgaacttctctgatttggttgaaaccatcatgattatatacgatggacatgacaaaataagaaacgaaggaatgtggaccacccattttcatataaacaaggcaatgatgaagaaaaaaagattaggattgagatttgttgtagatgaacttgcaaaagagtatgacaccaccagagatcagctaaacaacgcaatcccatcaattcgtatctcaaggagaaaatgtttagtaggtgacgagggtgttaaaagttcatcatgctgtatcgctgtcgtagcacatgctgaacgcaactccatctctcagttggacactatcaagacaagggtgattccaagcatactggatacactgctgaaaggaaaaaagatagttcggttcaagtatttttggacagcatgaatctg

SEQ ID NO: 3350 - DNA, 661 bp, Zea Mays
gtcaaaggtggtggaaagtatgatgaggaaatttacagcataaagcttcctggcaatccaacagatattggagagggaaaacctgaaaaccaaaatcatggacttatcaagtttgatgtcggcaacgtggtcatggtgaccggcgggaggaacaccgggcgtgtaggagtgatcaagaacagggagaaacacaagggcagctttgagaccatccatgtcgaggactccatgggccaccagttcgccacctgcatgggcaacgtgttcaccatcggcaagggcaacaagccgtgggtgagcctgcccaagggcaggggtatcaagctcagcatcatcgaggagtagaggaggcgcgatttcattgcccaggctgctgccaacgcataagttctctgaacgtgctgcttggagttttttgctatgtctagttttctcctatttgttgtacatgaaaagataggagaagatagaatggaatttaaatttggtggccgcaaaagtgtggaaacttaaattcatataaagttaggcttaacattagtgcaaacagttgtattttagtttagatttagagtacacttatgtatgagttgtttgacaatgcttatttatgagatattgaaaggtacttatttatattatattaattataatgttgttc

SEQ ID NO: 3351 - DNA, 1030 bp, Zea Mays
cgccgtgccgccccgcttgcagacatcatggcaagcaatgcgacatgcgagactggagctcgcttgttcgtcttgccatcgtctcttttctttgggttttctacccgctacgcgtgtattggtcttggtcggaatcggaatacagctgctccagctcttcttcagtcccccaagcagtgatgagctgaggagccaggagtttgtcagtttcgcgcctaccaaccggtccagcctccgcgtccaagatctctccccctctcccatccactagtgtctcccacagcccgttcgatcccccggccgggtcggtggtcgccaaagtcgaggagcaatggcgaccgacgcgatcctggagacgatcaagccgcgggggagcgaggagcagctgccggtgaccacggcagggaccgggatcgagctgcggcggcgcatctcctccttctcggcgcgcgtgaggccgtcgtcctccgtggcggcgttccggcgcgcgcggtcgatgccctccgtcaaggcgctggcggcggcgggcgcgctgcggcggtggtgggagtgggggctcgggtgggtcacggcaccgttcgcgacccgcgcgctggagctcggcggcggcgacgacgacgacgacgacgacgacgaggcgcggccgctaggcctgggcgggtgccggtgcgccggcgggtggcggcacaccctcttcaggctccgcgccggggcgcgccgcctgctggggcgcgacggccgcccgctcaaggcccccgcgccgcaggacttcgggtacgactccgtcagctacaagcagaacttcgacgacggcgaggcgtgacgccgagccggcatcgatcgaggaggtgggggccatggcgctgtcgcttcgcttgccgcccgaagatgatcgatcgatcgttgccgcgagttggagacccggaccatgaatggtcggtccgtgaacgggcatgtaacttgtgttcttctttcgttgtttcgggtcatcgtcattgtcgccgctttgcgtcagtcttgctcctggaat

SEQ ID NO: 3352 - DNA, 382 bp, Zea Mays
atattcccttcttcttcttcttcttgtcctcctccttcgtcttctccatcttcccgtccttcgatccatcaaaagctggccggccgagacgacgtgcatagctataaataatagcccatagcatcctcaacaaccagacaagaagaaccacgccgccggttgtttgttaatttcttccatggagttgacgatgatgactgctgcattcggcggtacgatctcctcggggtgttggtggttggaggggctcagatgttgaattcagaacgaatcccaactagctagctagctagtttctgattggaaacaaaacactgcagacgattgtaataggccatatatcatctagcaaaaaaaaaaaaaaaacaagtgcaagcttttg

SEQ ID NO: 3353 - DNA, 783 bp, Zea Mays
atattcccttcttcttcttcttcttgtcctcctccttcgtcttctccatcttcccgtccttcgatccatcaaaagctggccggccgagacgacgtgcatagctataaataatagcccatagcatcctcaacaaccagacaagaagaaccacgccgccggttgtttgttaatttcttccatggagggatcgagcgggtggaggtggaggcgagcctgcagaaggtggtggtgacggggtgcgtgaaccggagcaagatcctcaaggcgctccgccgggtggggctgcgcgccgagccgtggtcaccgcacaacgagctgctcagcgcctacgccgccaccaccaccctcgtcttcaacaactcctacgccttcttctgatcaagtcatctcatcctttatagctagatagctactgtaatctctctctctgcgtgcttggcttgcttggagtttgttgggaacgtgaacgacggacggcgttccacatgtacacaacatgaatggcattttaatctctctcccttctttctcctggggctgcaacctgatgcaagcgcgctatgctcagatgtattgtatagctgtgcgtgcaccgtgcagtccagtgcagtgcatgcagcagtatccccacaagtggggaggctgcaggcaggtgtagaatgttgtgaaccttgtcaaggacctgatgagccggccggtgcaatgatccatgcatgcatggtcgtcgatcggtcaggttcgattagaaccaccatgcatgcttggaccttggcaataaacttt

SEQ ID NO: 3354 - DNA, 2508 bp, Zea Mays
cagaacagtaaatcctaaatcctaggtcgtcaccaccgatcttatgcttccatctctgaggctgccgccagccaccggccagcgtcgttcgctttgtagcagtccagctctgcgcccggcgccgcagccccgcatcgcgcacaggcacaacttctacggtcctgccgctgatcgccgcacgtggccgcgccgccgcctccctcacccgagctcgaccgcgcttctccagctcgccgcctcgacggtcgctgcctcgacacctcccccgcgtgggcatcagccgggagcagagagccctggtccctggaggcgcgtcgcgttacggcgggggcgcggcctccccagccccccttggtgatcggtcctcccccggcagactcgcctcctcggtcttgcgctcctgcgcggctgcgcgcccagcgccgtgcccggtggcggcggcgaccggcgacggtcagcccccgacagtcaggacttccgactccggacctccccctcagccccctctgtccgttccagtcccagctcgagcttgaaggttgaaacaacaagcaagatattttgaaatagcccccgccacgaaattcttcagccatcgtggaggggttcagttcaggggaggactcgactcaggaaacaggagcacgagcggagcagaaggcagtcatggcggatgaggtggagcttgctgcggaccagcacgtccgctacatcgtcacggtggagaagaagaaggactcctttgagtcgctggtgatggagcacatccgcctcaacggcgcctactggggcctcaccacgctcgacctcctccacaagctccatgccgtagatgccgccgaggtcgtcgactggatcatgtcctgctaccaccccgaatctggtggatttggagggaacgttgggcatgacccgcatgtcctctacacgcttagcgccgtgcaggtcctctgccttttcgatcggctcgatgtccttgacgtcgacaaggttgctgattatgtcgccggactgcaaaacaaggatggatcattttctggcgatatttggggtgaagttgacactaggttctcgtatattgccttatgtaccttatcattactgcaccgtctgcataagattgatgtgcaaaaagctgtggatttcgttgttagctgtaagaacttggatggcggatttggagctatgccaggaggggagtctcatgctggacaaatattttgttgtgtcggcgcgctcgcaatcaccgggtccctgcatcacattgatagagacctcctcggatggtggctctgtgagcgccagtgtaaagacggaggacttaatgggcggcctgagaaactagctgatgtttgctactcgtggtgggtgctatcgagcctagtcatgattgacagagtgcattggattgacaaggaaaagctaacgaaattcatactgaactgtcaggacaaagagaacggcggcatttcagatagaccagataatgcagtcgatatctatcacacgtactttggaattgcagggctttcattaatggagtaccccggggtgaagcctttggatcctgcctatgcactaccattgcacgttgtcaatcggattttcttgaaaaaatagaacattccattcgatctgcggcgcagagatatgctgagatggcgctgtcagatgtggacgctacttcacagaaccacgattcgacggagaaatagctgagggggaatcaattacaggaacatgttgggataccataatcttggacttgtattctcgcattggctgtggccgcttagtcgatgtttttttgtcatttggcacttgccctgttgaatgcttggtgcatgctgtgttttgctagttgatctgattctcttgtttaagtcgtaacattgtgtgtcctgatgacgacgacattagtcaggagctatctataaacagtatgtcttttttgtttgctttttttacaaatgataaacaaacttagccacgccatctgtctgtcacggaaccttcaatggttcggcatgccatcaaggatgccaaatgctttcaacgtattcttgtgcagaacctttggctccacaaccttctctacagcagaaaaaaaggtcaagcgcaaacaacaaattcatagcaagaatcttctggctcagatcgacatgccttggtaaaacatttaactaaacaacacttggtagctctcaaatgatcacatccgttacagctcaatacacctaagtagcacaggaattcaggtttaaacctacagtagagctacaaatttacctccctactcaaagcttctgacttatactactacataagaggatcatttccatggcatgatgctggacaggaacggcggctggtcgttgctactgctagcagccatgccttgatgcagcggcggtggtgggcttccggcgccaccggatgactcgctcaatgtacctcctcttgaaggagggctgctgctgttgggtcccatcctggttgttgtcggag

SEQ ID NO: 3355 - DNA, 2085 bp, Zea Mays
atggcgcagtcgctggagctgatgctaatccagttttttatggggagctggttgatccaggccgtgctttgttccattggttacatgataatgcattatggtcagattatgtcctccttttcacggttcactgtaggatgcagactgcagtcaataggtggctcgcgagccgggtttaagccaagcccatttgcacaactcacaacaatactgagcagagccggctcgtttccacccctcgcagccgtgtcatctccacgccgcggagacccaggggccacgggccacggcccacggcccacggcccacggctccgcacctacgaaagccaactggaaccagcagcagcccagccctcgtttcgtttccccacaaggcctcaagggcgcaaaagcagcacagccggcgctgccgactgtgacgacgacgatcgacgaaccctccctttcgtttcccccaagacaacacaaacccccactcgcgcgactcgcacaaggaacagaacttcagaacccagcgaatccagcctggcccatgccatgtcgcagcccgacgccgacgccatcctcatccccatcgccgcggcgatggatccctccccagccccagccccagccccggctccggctccggtcccggcccctacgggcggcgcactgacgcgggactgggtggcggggctggcgtccacgctggactggtgctcgcggcacctccccgcggaccgcctcccggcggtgctcccgcccgcgctggtccagcgcctggtcctggccgccgccgccatcctgcaccgcgagcccaacctcgtccgcgtcgacccgcgccccggccaggccgtcgtcgtcgtcggggacgtccacgggcagctccacgacgtcatcttcctgctccgcgacgccgggttcccgtccgaggaccgcatcttcgtcttcaacggcgattacgtcgaccgcggcgcctggggcctcgagaccttcctcctgctcctcgcctggaaggtgctactcccaaactgtgtgttccttctccggggaaaccacgaatccaagtactgcacgtcagtatatggtttcgagaaggaggatgtgtgtacactgcacacggcggtatcttccgtggaacaattgtagtgccatcaaagaaatcaaaaaagggaaagaagggtcacaaatacaaggcgaattttactgttgatctgacttccatgaaacttggatccttggatgagttattgaaagcaaggagaactgttctcgaccctccttgggaaggctcaaatttgatccctggggatgtgctgtggtctgacccttccttgcagatgggtctttctccgaataaagaacgaggcataggtttgctttggggtcctgatatcactcagcagtttctgaggacaaatcatttgaagctaatcatcaggtcacatgaaggtccagacgcgagagacaagcgacacgatctcttaggaatggataaaggatatacgattgatcatgaagtagaatgtgggaaactaattactctcttcagtgctccggactacccacagtttcaggcttcagaggagcgatacaacaatcgtggagcatatattgtccttagtccacctgattttgctacccctgttttccatagcttcggagctgtaaagcctcgacctgcgttaatcgccatggacagcggcacgtcgagcctgtcatgacgactcgccatgtttctggatggcctgagtcctgacatgcacacgccaaatctgatctgttggtttggttgaggttgatttgtatctaaaactaagtgagcgtgagatgtcatctaaaggctgaaggaagtcagcggttgcaagaatcttagttcatgattgtttatcatctagactatataatctagcttaaataagttaagaggcaaacaaacaatatatattattagatggtcatgcctaaattatgataatccataagcagatcattaggtgtttatataaaatataagctggattatgtaatcctaaaagtaaacaaacatgcccttaaacgcagatgcggccattaagaggaagatggaggatttggtgtc

SEQ ID NO: 3356 - DNA, 4867 bp, Zea Mays
cgctccggcctgcccgcccccaccagtacagtaccacccgcgccccgtacggcctccccgtccgtccccgtcgtgggggtggggccggcgccggcggcaccaccacccaccgcacccgtccgggcccgcccccgtgcccggtcgctaattacgcgcacctgccatccggccgtccacgcacacggcgcacgccaccaggcccccgtccgtcgccgcgccaggacgcttacccacgcgggaggtcctcttcctcgcccgctttgcgctgctgccttctctccgctcgattccccgctgcctctctctctagtctctctacacacgccttcctcccagcgccgcaccacaccatcagggcgggcagcacattcctctctctctcccactcccacttcttcatcctccgccgattccagcactacgcaggtgggcagggaagggatattttctgctctggccctatttctggacggctggggaggcggcgaggtgacgtggactggcgccgaagacttgcgtgagagatccctgatcggttgccgcggctgagttgggaggcccggagaccttgaggagcgatgcagagggaggtggggccgcaggtggcccctccgctcttccttcaccagatccagccgatgcctccccacgccgccgccgccgcgaagaagcgcggccacccgtggcccgcggccggcgccgcggaggccggcgctgggaactggaaccccaggctgtgggactgggacagccgcgcgctcaccgccaggccgtcctccgatgcgctccgcctcgccggtggccagccccagccggctgctgaggcgcagcgccagggggccggcgcgctgaacctccagctcggcctgcaggaggactccacgaccccgatggacgccagcccgacggctcccgcggcggcggcggcggcgtccccgccagcttcggctgcggcggggcaggagccggtcgttaggccgagcaagcgggtgcggtctggatcgccggggggcgctgggggagggccgggcggcggtgggactgccaacggaggcgcgagctacccgatgtgccaggtggatgactgtcgagcggatctgaccagcgccaaggattaccaccggaggcacaaggtctgcgagacccacagcaagaccaccaaggcggtcgtcggcaaccaggctcagcgcttctgccagcagtgtagtagatttcacccactcgcggagtttgatgagggtaagaggagctgccggcggaggcttgctggccacaaccggcggagaagaaaatcccagccaacagatgttgcttcacagttgctgctacctgtaaaccaagaaaatgcagcaaatagaacacaagatattgtcaatctaattacagtgattgcgcgcttgcaaggctctaacgttggtaaagtgcctagcatccctcccataccagataaacagaatctggtggaaattataagcaaaataaattcattgaacaacgcaacctctccggcaaagtctccttcgccagaagtcgtcgttttgaatacttcacaagagcaacgagagcaaggacatgattctgtagacaagacgaccaacggaatcgacaagcaaactgtaccatcaaccatggatttgctaggagttttttcaactggcttcgcaacttcaacacctgtgacaaatacatctcagtcccaagggagcagcgacagcagtggtaataacaagagcaagagccattcaacggagccagcaactgttgtaaattcacacgatatatcaacccaagattttcctgctgctggtttcatgagaagcaacagcacacaagaaagccgacctcatatatacaagcagacagaacacgagacaagaccatacttgtcactacagctgtttggcagcagtgaggaggatattccacctaagatggactcattgaataagtacttatcttctgagagtagtaatcctctggatgagagatctccttcatcctctccgcccataactcgcaagtttttccccatacattcggttgatgaagaggttcgacaccctcatattacagattttggggaagatgctacaatgggtgaagttagcacaagtcaggcatggtgtgcaccaccacttgatctcttcaaggatttagagcgtcccctcgagaatggatctccaccaaatcctggttaccagtcctgctatgtttcaacatcttgttcagaccattcaccttcaacctcgaactccgatggacaggaccggactggtaggattatcttcaaactatttggcaaggaacctagtacaatacctgggaaccttcgtgacgatatagtaaattggctcaaacacagtcctactgaaatggagggttacatccgccccggttgccttgtactatccatgtacctatcaatgccggctattgcatgggatgagcttgaagaaaatctcctccagagagtcaactcattagttcaaagttctgatttggatttctggagaaaaggaaggtttttagttcgaaccggctccaagttggtatcttataaagcgggaatgacccgtttatcgaaatcgtggagaacatggaatactcctgaattgacctttgtgtcaccaattgctgttgttggtggacagaagatctccctcattcttaaaggccgcaatctatctattcctggcacacagatccattgtacaagtacaggaaagtacatatccaaagaagttctgtgctcagcatatccaggtaccatatatgatgattcaggtgtggagacttttgacttgccaggacaaccagattttattcttgggcgctgctttattgaggtggaaaacaggttcaggggtaacagcttccctgttattgttgcaagttcaagtgtttgccaggagttgagaagtctagaagtggagcttgaggattcacaggttcttgatgtttcttcggatggtcagattcatgactgtaggcagtcaaaaacgagggttcaagttctgcacttccttaatgaactcggctggctctttcagagggcttctgcctgtacattgtccaccagacctgatgtgtctgatttggatttgactcagttttcaatcacacggttcaaatatcttttactgttctctagcgagcgtgactggtgctctcttactaaaacacttctggatattcttgccaagagaagcttggtcagcgaggaattatcaaaggaaactatggagatgctggctgagattcaccttctgaacagagcagtaaaaagaaagagtaggagaatggtgcatttgcttgtacagtttgttgtactatgccttgataattccaaggtttaccccttcctcccaaactttcctggccctggtggtttaactccgttgcatcttgctgcatccattgagaatgcagaggatatagttgacgccttgacagatgatcctcaacaggttggtttgacctgttggcagtcagctttagacgaagatggccaatctcctgaaacatatgccaagttgaggaatcataattcatataatgagcttgtagcacaaaagctggtggacatgaagaacagccaggttactataacggtcaatggcgatgaaattcatatggatcagttagggaatgttgatgaccgtaaaaaatctggggttcaggcattgcaaataagatcttgctcccagtgtgccattttggagtctggtgtgttaaggcagcctatgcggtcaaggggactgcttgctcggccttatattcattcaatgcttgctatagcagcagtctgcgtatgcgtctgtgtattcatgcgagctttgctgcggatcaattctggaaaatccttcaagtgggagaggctggattacggtacaatataattgtggggacacacctgagccttgtggtattattaagttaacaagcagttgttatggagctattttggagccttgaagggtatggagattgtttcatgcttcctcgaaactcgcccatccgtatggctgagtggaataatgtaatatttttgctggacaattcctttacttcctgtgaaatagaagtgttaataggtgagcagccggagatgttaggggggtggcaaaacttggtaccaaatgtggagcttgagcagagttggaacatgtcatggcaagggccgtagcaactgcgctcccacaacatgatatgcatgcaatgcacaaaatgtcgatatggatgcaatccgcaagatggatgtaatcacagttcggggagaatgagcaatacgctagcatgaatgtaccctatatcgactttagatagtagcaggggtaaatgaaaagaggctttgcatatgtctgtgtcgaccattttgacttgtagctacatagaaatgaggcagatctgaagtgtacttggatctttcgttgttgttgttgttgttgacatccaccatatgttctcattctgatgaagcttagttacacctttgtcctatattgttctcttgatacctgccggctgctatcattatcttggttcactcgcactttccttctgacccaagttttcactgatcaaaatcctattgtatgacttgtttggaggctgaaattcatgttcgtttaagaactttgagcgcgttcggctgccctgcacggagcactgttgcagctgcaaatcactgttgcagctgcaatccctagagagaaaatactgtagaagccgcagccgcagtcggattaaagccgcagcgaacaaggcatttgtaactaggccacctactatccatgtattcctttcgttttttttgttcaagtgtctattgttatgtgaaaacagagtgtggcagcgaactttctgc

SEQ ID NO: 3357 - DNA, 1287 bp, Zea Mays
atggccatggcctatgaacgaggcgacggcgtcgtcgaacatctcctcgacgcccttgaattccgccagccccagcgcgcgggccttggacgtgtcgaagccgtacgactgctcgccgtaggcgcggggcaggctcctcgggacggggtacgctgggaaccgccgcgcgagcagggcggcgaggtcgccgcagtccagcaccgccgcgctgcagatgtacctccctcgggcgcccgcggcctcgtacgccagcatgtggcacctcgccacgtcgtcgatgtggacgtaccccatcctcccgccgaggacatcagaagcggtggggccgagctcaggagacagagtaggtccgacaacgaaggtcggaagaacggtgacgaggtcgatcctgtgctctccggcgaactcccaggctgccttctcggcgaggatctttgcgacggcgtaccatatctaagggagcacgggaacagcacattgtcacgcaggtacggtccaaatcactcttctgacgaccgtacgctcacctggagactttcgcagaactcgatggagctccacgacgattcgtccagcagcacgttagggggcaggtcggcttcgtccttgatcctcactgtcgacgacgaggatgtcaggacaaccctcttgagcgatgggttcttcttgcacgagcgtagcacgttcatcgtgccgtttattgctgaatcaagcatctcctcctgccaagtggcaccaacatgtttcaggtcgctatatgtccaggcctttcctgaagctgcaaatatgagaaacagaattggtgtttagcatgccttggaattagatccggtgacgacgggcgatgcggtgtggaagacgccctcgcaagccatcacagcgtcgtcgaagctcccttcctccaagagatcagctctcacgagctgcagcctttcctttgcgccttccaggccccagaggtgccctactttcttgccattccctaccaagacatctttgctttcaggagtgatttatttgacaggtaatgaaaatggacataaaccgtcaacaggtattactagtattttaattcagatcatcatcagaataagatgaaactgacctgggtctctgactgtacccaggacatggtacccagactcaagaagccgcttgacgagccaggaggcgatgaaaccagacgccccagtgacacagaccttacccttagcagtgttagccattctctcagactcgaggtgctcctgtatttgatcccagctagtttatattgtgcacattgaa

SEQ ID NO: 3358 - DNA, 711 bp, Zea Mays
cttttcatttcagagctgtggtagactggtaggttggtagctgttactgaaaaactaagagaaggcaggacggggaaaggagatggagctcaacagcatcccctatattgcgtcgtggtcttcctcctcgagctgcttctactacagctacagtcgctgcgcctgcagaggtacaagagatgggaagctggtaacaaaagcttctgcagctggtcgtaagcgtgctgctgattcagtatgttcacaactctctgagcagggaactgaagattccatttcaggtcctagatcttcctggcgtataaggaggagagaccttgcttctgccattttactcccttttctgattcctcgtgttaacatctctatcgcggctgagatatacgacgcatcaattattcgaagtggtgtgaggagtgttttaaccaagggcaaggctgctggtgtgcttcggttggttttccatgatgcagggacttttgaaattggggacggatcaggtggcatgaatggctctataatttatgaagttgacaggcctgaaaacattggcctaaatagatccataaagatactaagaaaagcaaaagaaggaatcgacaacgttcagaaagttgcgctctgtggcgggcctgagattccagtaaggctaggaagagtagattctagcagtgctgaccctagtggaaaagttcctgaagaaacattgga

SEQ ID NO: 3359 - DNA, 994 bp, Zea Mays
cttgcagccattgttcccatatccatgtctgaaatccatgtttggcgattaacgacagggcgcagggagctggttgttttgtcgggagcgcacacgattggagggaaaagggtttcgggagtcccagttgttttcgacaacacctatttcaaggtgctgctcgataataggccgccgcagacatcttcgactggcaatggcatggcggcgatggttgggctgcgcacggactgggcgctcactgaagacgacgagtgcttgaggatctacgcagaggaccaagctaggttcttcgacgacttcagggacacgtacatcaagctcgtagacagcggagcctcgtggagaacagcttgactagaactgcctgtttctctacagtgttaggccttgttcggttataagggaataaatcccaccatggatttaatccggatctggattgggtgaatccatatgtcacacccaatcctatggtgggattaaatacaccatttaatccatgtatctcttaaaactagttattcttttgattcatggattctaatataaacttgtgcaacatcttcatggatttgctccatacataatgagctatggatagaatccatgcctttcatagtttaaaaaattcctaaactcttgggttataatccatgatgggtttaaccgaatacaaaaatttgagtaggcttggattgttttgggatatggattgtgccatgaatttaattccaatccatgctaatccagagctggattggtgtaaacgaacaaggccttaacggatccgcccctgtagaacataggggttgcgctgaaattttacgaaaaacaaaggatttttattatttgggggaaggttgggtgggaaaaggttgctgtcagtttagattcattggatctgtattctatttctccctagcaatgaacccacaagtttcttgcatgcacaaaacttgtggaacaggagtttacaacacaactcgaaacc

SEQ ID NO: 3360 - DNA, 3231 bp, Zea Mays
ctcaattaatagtgttgggtgtgtttggttgcgggacggccaggacaaggatgtcccctggcgtcctctctcgttcctccaattttgagggataactggggacaacactgggatagtcatgtcccaactcttgaccctgaaccaaacaaccttatttgagggatcgtcccatcccgtcccgtcctgtcctatcattgcaaccaaacgcatcctaaaacttctcatgaagtattgcccaaaaactatcttcccatggttctaatggttatttgaagtttggattgcaagtaggggccttaatatttcctaataagatgtttccactttccactgttagttgcatttttattctttatatgaaaatggtttgttttactatcactgccctcttgacacctaaacaaaattttgactcattttgctctcccaaactatttaatctgggccagttcaccccctaatgaaaatattatatttccttctccatgttcaaatattgatatacttttgtatcataaggtctgttggcatctatcattttgcaaatttgcaccagcaacagaacatgtacatggcgaagacaaatcattaggtggcgacttttttctcaccacggtaacactgaatttcattatggcagcaacaaagttacaatattcaggtttcattaggtggtgttttttactaatatttgaagagtttgagttgggcgacaggggggtattgccagcaactggttaatgaactgttatggctgaagtgaaccattaatatagagtttgagttattctgtgttgtcacagacaaccgtatttacacacacagtatctcgcccgctcctccaagtctccctctctcaatataagcctatttctgaattctatttgtggtcgctttctttgatttgctgattgtcaccactggtttttagggctcaatatgactttgtttcacattgtaacatcctcaacaatgattttacttcttacaacaaacactactacggatgtcctgatgataagacattccagcacatggcatctgtgtatagtcggtctcactataacatgtctttgagcaaagaatttgaaggagggataacaaatggagcattctggtactacgtaggttgtgtatttgttggctttgaatcaaacaacatcattgcttgtggtccagattgcaagaacgggactgctaagcaagctaagatttcaatggcctattccttcatacacaggccattgagcgacgaggaacgccgtgtcacttgcaatgaccagagacgggaggtcttcgttgcccaggacatcgctaacaaggaaattgaccgcaccgttgcattcgacaaggtaagatggattagcaaataatattgtttgacatttaggtttttatattttatataatacactattaggtgagtgcctgtgcgttgcaggcctgggtttctctttgatatcattacggacgactcgtgaatattgtcatccatatcataatcgtataacacatatgtatatataagttatcgagatattatatgtccccgttgcaacgcacgggcactgacctagtattcatatatggactaatagtaatatggtcaagccaattcatggttcctcatatcttattcactttggcttgaccaatcctcgtaatcacttcaacctctattatgatcatatttatgcatagtaatttctcaggtcttgtccatacatttaaaccaatatagagatcatattatatccatttgcattgtctcactggttatttaaccttgtgttgaacctttgttcactgtcattatacactattcaagtatgttcatcatactgaatttcctgttcaacacttaccaaacttgttagtcctttaaatgtgttgtcatccaaatcaccaaaactcacaaaagggatgaatgcactttcagtctccccctttttggtgattgatgacaacacatttaaagcttacataagatttgataaataagattttgaatccaatgatatagtttcctccccctaaatatgtgcatttcagaaaataccaattttgtactcaaatggcaaaagcacatatttgggtcaaagtatggagacaactatatcatactattcatggggtgcactgagccataaaataaacgtcactcatcaatttcctacatcttatgttttacttatgattctcccccttttgtcaattatttccccccttttcaaaagtcttcttacacttagttacataagactaaaggtaagctttaacgcacaatttctccccctttgtcataaatctccaaaaaagatataaagaatataaagggtagaaattatgattaatcaagatttgaacacactatcatgaaaagggtccttatatggcacaaaggtaatggagaagtgtcataagtgatgtacctttgcgttttaccttttaaaaggggtgttccacacttgtgttgtatttagagttcattttgcaatctcttgttggcataattgtgacataggtccaagatatcaaatgaatattgtcatactaattgaaagataaatcttgatacctggagtctagatgtcacctagcattttcttatgataacaagaggcagcatgaaaattgcacaagtacagattatacaactagtgatcatgtacgaaaaatatcaattgaaaaccatcaattgatacaatttgatagataatcagatcactaattgcatattacactaagttctcctcaagttttagtgcacacatattgttggggaccttcggcttccgaaggtcctcaaaaacaggatttaacagtatttctggagtataatgtgtgaacaggtatcttcgaactcaagtcggcatcacagtagaccagaataatacgaaggttggtacagcgccgaaggtgtgagcaggaaagcttcggcgtagcagcaaaaagtgaaaccgacttaaagatgaaaaggctatttagacctcgacagattactatagaattattatcaagtgtaaagggcatgaatgtaattttgtatgggttgtgtcccgcgcctataaataggtgaacagtacccccgtactgttcacgctgacttggcattcgctttttgcgtcacgcttgtactatcatctccttccagttaaaggtacacttgtaattcaacgatatttctgtctatgcctgataataatacataattgtttatgttggctttta

SEQ ID NO: 3361 - DNA, 1728 bp, Zea Mays
aattaatagtgttgggtgtgtttggttgcgggacggccaggacaaggatgtcccctggcgtcctctctcgttcctccaattttgagggataactggggacaacactgggatagtcatgtcccaactcttgaccctgaaccaaacaaccttatttgagggatcgtcccatcccgtcccgtcctgtcctatcattgcaaccaaacgcatcctaaaacttctcatgaagtattgcccaaaaactatcttcccatggttctaatggttatttgaagtttggattgcaagtaggggccttaatatttcctaataagatgtttccactttccactgttagttgcatttttattctttatatgaaaatggtttgttttactatcactgccctcttgacacctaaacaaaattttgactcattttgctctcccaaactatttaatctgggccagttcaccccctaatgaaaatattatatttccttctccatgttcaaatattgatatacttttgtatcataaggtctgttggcatctatcattttgcaaatttgcaccagcaacagaacatgtacatggcgaagacaaatcattaggtggcgacttttttctcaccacggtaacactgaatttcattatggcagcaacaaagttacaatattcaggtttcattaggtggtgttttttactaatatttgaagagtttgagttgggcgacaggggggtattgccagcaactggttaatgaactgttatggctgaagtgaaccattaatatagagtttgagttattctgtgttgtcacagacaaccgtatttacacacacagtatctcgcccgctcctccaagtctccctctctcaatataagcctatttctgaattctatttgtggtcgctttctttgatttgctgattgtcaccactggtttttagggctcaatatgactttgtttcacattgtaacatcctcaacaatgattttacttcttacaacaaacactactacggatgtcctgatgataagacattccagcacatggcatctgtgtatagtcggtctcactataacatgtctttgagcaaagaatttgaaggagggataacaaatggagcattctggtactacgtaggttgtgtatttgttggctttgaatcaaacaacatcattgcttgtggtccagattgcaagaacgggactgctaagcaagctaagatttcaatggcctattccttcatacacaggccattgagcgacgaggaacgccgtgtcacttgcaatgaccagagacgggaggtcttcgttgcccaggacatcgctaacaaggaaattgaccgcaccgttgcattcgacaaggtatcttcgaactcaagtcggcatcacagtagaccagaataatacgaaggttggtacagcgccgaaggtgtgagcaggaaagcttcggcgtagcagcaaaaagtgaaaccgacttaaagatgaaaaggctatttagacctcgacagattactatagaattattatcaagtgtaaagggcatgaatgtaattttgtatgggttgtgtcccgcgcctataaataggtgaacagtacccccgtactgttcacgctgacttggcattcgctttttgcgtcacgcttgtactatcatctccttccagttaaaggtacacttgtaattcaacgatatttctgtctatgcctgataataatacataattgtttatgttggctttta

SEQ ID NO: 3362 - DNA, 1990 bp, Zea Mays
cacaaagtggccaaaagcagatgagcttcctatcatctgggaacacagtaggatgagtatgctcaatcttctagcaagcctaataaaggccattgagcgacgaggaacgccgtgtcacttgcaatgaccagagacgggaggtcttcgttgcccaggacatcgctaacaaggaaattgaccgcaccgttgcattcgacaaggcctgggtttctctttgatatcattacggacgactcgtgaatattgtcatccatatcataatcgtataacacatatgtatatataagttatcgagatattatatgtccccgttgcaacgcacgggcactgacctagtattcatatatggactaatagtaatatggtcaagccaattcatggttcctcatatcttattcactttggcttgaccaatcctcgtaatcacttcaacctctattatgatcatatttatgcatagtaatttctcaggtcttgtccatacatttaaaccaatatagagatcatattatatccatttgcattgtctcactggttatttaaccttgtgttgaacctttgttcactgtcattatacactattcaagtatgttcatcatactgaatttcctgttcaacacttaccaaacttgttagtcctttaaatgtgttgtcatccaaatcaccaaaactcacaaaagggatgaatgcactttcagtctccccctttttggtgattgatgacaacacatttaaagcttacataagatttgataaataagattttgaatccaatgatatagtttcctccccctaaatatgtgcatttcagaaaataccaattttgtactcaaatggcaaaagcacatatttgggtcaaagtatggagacaactatatcatactattcatggggtgcactgagccataaaataaacgtcactcatcaatttcctacatcttatgttttacttatgattctcccccttttgtcaattatttccccccttttcaaaagtcttcttacacttagttacataagactaaaggtaagctttaacgcacaatttctccccctttgtcataaatctccaaaaaagatataaagaatataaagggtagaaattatgattaatcaagatttgaacacactatcatgaaaagggtccttatatggcacaaaggtaatggagaagtgtcataagtgatgtacctttgcgttttaccttttaaaaggggtgttccacacttgtgttgtatttagagttcattttgcaatctcttgttggcataattgtgacataggtccaagatatcaaatgaatattgtcatactaattgaaagataaatcttgatacctggagtctagatgtcacctagcattttcttatgataacaagaggcagcatgaaaattgcacaagtacagattatacaactagtgatcatgtacgaaaaatatcaattgaaaaccatcaattgatacaatttgatagataatcagatcactaattgcatattacactaagttctcctcaagttttagtgcacacatattgttggggaccttcggcttccgaaggtcctcaaaaacaggatttaacagtatttctggagtataatgtgtgaacaggtatcttcgaactcaagtcggcatcacagtagaccagaataatacgaaggttggtacagcgccgaaggtgtgagcaggaaagcttcggcgtagcagcaaaaagtgaaaccgacttaaagatgaaaaggctatttagacctcgacagattactatagaattattatcaagtgtaaagggcatgaatgtaattttgtatgggttgtgtcccgcgcctataaataggtgaacagtacccccgtactgttcacgctgacttggcattcgctttttgcgtcacgcttgtactatcatctccttccagttaaaggtacacttgtaattcaacgatatttctgtctatgcctgataataatacataattgtttatgttggctttta

SEQ ID NO: 3363 - DNA, 278 bp, Zea Mays
cacaaagtggccaaaagcagatgagcttcctatcatctgggaacacagtaggatgagtatgctcaatcttctagcaagcctaataaaggccattgagcgacgaggaacgccgtgtcacttgcaatgaccagagacgggaggtcttcgttgcccaggacatcgctaacaaggaaattgaccgcaccgttgcattcgacaaggtatcttcgaactcaagtcggcatcacagtagaccagaataatacgaaggttggtacagcgccgaaggtgtgagcagg

SEQ ID NO: 3364 - DNA, 913 bp, Zea Mays
tccagagccgctcttgcatttgggagtgagatgtctggcggaatcttagacatccatgttgaccacctctggatccatgactcctccaagggtatttctttcagacctcaccgaccgtgggggttacatagaagacgtggtatcaacagatgcttggaaagtttctgtcgccaaatgggaaacaagatattgtaggcctggagccgtgaaacaacgacaccgcaagactgtacaacagcttcaggtgagcagccatctatgagcagccctcctgccattgaggcctgtgctggcaacgacggaagccatttggtgggatctcagccagatgctacgccatatgcttctaccagcacaacgcagaggatgagttccgaagcattagcaagccagcaatgtggatcactaccacaaatttcgataaatcgagctgaacgtacccttgagatgaagggcagccccaataatcttcactgacacccaggcatgcagcaaactacgaatggtttcaatgatgttccaggaccaatgatgttcccacatgtggctcaactggtggtgaatcagatgcagacacatacggctgattgataatgttgtgtgtgtgccggggggggtcgggtcgcctttgatccgtcgcgcctcaacctggggctgcaactgtgagcctgttgtgtaattgcttaagtagttattaggatgatagcgtgcatagatgtgttgggtggatgctgtaacagcggtgaccggtgagttgcgattctgaatgtgtagcagaaaaaccacaaccgaaatgaaacatctgtatagattatcgaggattttttagcatgaaaccgtgcgaatcagtttgtctattgtctgtatggtttatatatagacatcaaactgacggtgttcccggactgcttaa

SEQ ID NO: 3365 - DNA, 901 bp, Zea Mays
ggcggcctggcgcgctctttctgacgccgtcgatgcataacccgcatcccccttccgcggcatccatcgtcggctcctcgtgcgttgtctctctctctctctgtctctctctctctcgtccccctcgctctcagacgaccggtgggccgccgccgccgacgccgcaataagccaggtgctgaggctcttgttggtctcttcgccagcgaggagcacccagcaggacaaggcaacaggctgttggaatatggaccaacaaggcatgcatgaccatgggtccacgttgttggatttgaagtcccgccttcaccggattccagctacgacaaccctgttcctgggaatgaagacgaaggccgggagcccccactgatgccacctcatctgcagcacacgctgctgagcttcccaccaagccaagacgagtcgagcccgctgccccagccccagaccgtggttctgaaccacctttacatcgagaaagagaacacgaggtccatggttgctctggggatcacgcaccggttcaaggctaagttcgtgaccgtcgtgctttacaagccagtgctgaggcggtagggtgtggtcgtgtgcctgcgctcctgctccctcttctcgcgcaggatcggtaatggtaatgccgtaatggtaatggtaattgaacaccccttgggttgcagcccaccccttccagttgttgttattgttgttgtagtggtgcagaaacgggcgagaacgtcattttcgaatgattattagccttgttgtacctaatttggctgctggtggtggcagtgatggtttggttggagtagtttgcttgtgatttggcaccattcttctgtcgctgctgttatgattgcggatgtgccggctctctgcattttgaccggtcaatcgg

SEQ ID NO: 3366 - DNA, 718 bp, Zea Mays
caggcccttacaaaggataattcatgtactcaactgcaatgacaaggcaacaggctgttggaatatggaccaacaaggcatgcatgaccatgggtccacgttgttggatttgaagtcccgccttcaccggattccagctacgacaaccctgttcctgggaatgaagacgaaggccgggagcccccactgatgccacctcatctgcagcacacgctgctgagcttcccaccaagccaagacgagtcgagcccgctgccccagccccagaccgtggttctgaaccacctttacatcgagaaagagaacacgaggtccatggttgctctggggatcacgcaccggttcaaggctaagttcgtgaccgtcgtgctttacaagccagtgctgaggcggtagggtgtggtcgtgtgcctgcgctcctgctccctcttctcgcgcaggatcggtaatggtaatgccgtaatggtaatggtaattgaacaccccttgggttgcagcccaccccttccagttgttgttattgttgttgtagtggtgcagaaacgggcgagaacgtcattttcgaatgattattagccttgttgtacctaatttggctgctggtggtggcagtgatggtttggttggagtagtttgcttgtgatttggcaccattcttctgtcgctgctgttatgattgcggatgtgccggctctctgcattttgaccggtcaatcgg

SEQ ID NO: 3367 - DNA, 3806 bp, Zea Mays
ctcacttgctcctttctctgccgcccgccgctgccgagtgccgggtcttcgctttctttctcctcttcgggcacttcgctgcttgcctgctctgctcgcgacctgcttctcagacccgccctcctcgccggccgcccggcgatgcctcctggccagaggcggcggtggcggcggcggcgacggagatagttagctcttcagattgagtgactggtggtcgccggcggcggagacgcggagtatggaggcgccggggacgagctcgggcggcgccggaggcgagggggccgggggcaccaaggtcaacgaggagctgtggtacgcgtgcgcgggaccgctcgtggcgctgccgccggcggggagcctcgttgtctacttcccgcagggacacagcgagcaggtagcagcatctatgcgaaaggatgcagatgccaaaattccgagctatccaaatctctcatctaagcttatatgcatactccgtagtgtcactatgcttgctgatcctgacacagatgaggtttacgctcgaatgactctccagcccgttagcaatgtgacgcattgtgacaaggagacgttgctggcaacagagcttgcactgaaacaaaccagaccacagacagagttcttttgtaaaacactgactgcaagtgatacaagcactcatggaggtttctctgtgccacggcgtgctgcagagcgaattttcccccatcttgacttctcagtgcagcctcctgctcaggaactgcaggccagggatttgcacgatgcaatttggacattccgtcatatatatcgagggacggaagacagcaactcctcttggggataaggcgagcaaataggcagcccgttaacctctcatcatctgttttgtctagcgacagtatgcatattggaattcttgctgctgcagcccatgcagcagccaataacagccaattcacagtattctataacccaagggctagtccttcagaatttgttattccttttgccaagtaccagaaggccgtctatagcaaccaactatcacttggcatgcggtttagaatgatgtttgaaactgaagaatctgcaacaagaaggtacatgggaacaataactggtataagtgatatggatcctttaaggtggaaaaactcccaatggcgcaatattcaggttgcatgggatgaagcagcaccaagtgagagacgcaccagggtttccctttgggaggttgaacctgttatcgctccattcttcatttatccctcgccattgttcactgcaaaacgtccgaggcaacctggggtaacagatgatgatagctcagaaatggacaatctttttaagcggaccatgccatggtttggtgaggaggttggcaagagagatctgagtactcaaaacggtttagttcctggattaagtttggttcagtggatgaatatgcaacacaacccctctcttgccaacacggttatgcaaccggaattgctaaattcgttagctggaaaacctgtacaaactctggctgcggctgatctatctaggcaaattagcttccagccccagttcctgcaacaaaataacatccagttcaacacttcgctgctacctccccaaaaccagcagaccgaacagttagcaaatgtaatagctacaccaaaccaattgggaagtgttatagtaccacaaaaggcagttcaaaattccagttctgaacagaaacagaatctggttacacaaccactgcaagtcagccaaccaatggttagtgtggcacagcctcaacttgtccatactcaactccagcaacctcaagtagttctccaggctcagcctcagcaacctcaagtcattgtccaagctcaactacaacaacagcaacctctggttcaaaatcacaccaccatacaaagtggccttcaacaaatccagcttctgcagcaacagcaagttcagcagtcagtgcaggaacaacagcaaataaagatacagccttttcaggtacctaatgatgccaacatggtaacacagttatctgatcagatgaaaatacaactattgaaggctctacagccacagcagcctctggtcatggaacagcagaaaatgatatttgatttgcagcaacaagcagtaaattctcagtcaactgctcagcagtgctcacaggtagctacccaagtggttggtttgcatagcagtagcactaatcagtacccgacgcagcaaaagactcaacctctcaaaacatttcaagattttcctgggaatgctgtttctattgtaaaaccagaaattgtcacctccgtgggtgctcgctctttgcatgtgcctggtggagtgcagtcaatgaagatggatgaagttccctcttcttcaacatcgccatccacaaacaacaatcctgttattttgcgatcaactccaagtagctccaagaaccaatgtttacctactgcagcaaaggctcctcagtcatctgttgtattgggttctacacttgaacagggtatgaagccttgtgacagtacacaacacccaatggtgattcccaagctggctgaagaaaggccagctactggacaagactacatgaacagcactcagctggattatttggatacgtcatcttcagcgacttcagtttgcctttcacaggctgacggatcgctgcaacaaagttttccaccttcatccttcaatcagcatcaaccgttgagggaagcagttccagatagcgagtttgaggttacagatgcaggaaataactttctatttggggcaaatattgatggccatatggagcctcttaacgaagacgatttgcttggaactgccttcgaagctgacaagtacatggaacagatgccaggaaacggcatctctaactacatttcatcaaaggattctcagcaagagttatcatcttcaatgatctcacatccatttggcgttgctgatatcgcgttcaattccatagattcgtcgatcaatgatatccaattcttaaacagaaattcccgggctccaggtcctgttcaacaacgtatgcgaacatacaccaaggtgcacaagcgtggcgctgttggaagatctatcgacatcaacagatattctggttacgatgaactgaagcatgacgttgcccgtatgtttggaattgaggggcagctcagcgaccaaaacagagttggctggaaactggtttacgaagatcacgagaaggatgtcctattagttggtgatgacccatgggaggacttcgtgaactgcgtgcggtgcatcaggattctttcgccgcaggaagagaggcaaatgaggctggccagcgactacggagacagctttcttggcaaccaagcgtgtagcagctcggacgggggtcgtccgtggagggtcaccggcgactagaaatagcaggctatgcctgagcacaaatgtttgatataatccgtcccacgatagcaagaaaatgatacgcgatttctgagcacaaacttttgcactcagatgatcgtgcaaacagttagcattttaagaaaaatgttgcagttcaatgtaactgcaggaatgtctctgatgtagcctcttcgatgtggcagccttaacaatcgatgtgctacagttactctgcctatgtatttactatactaccttggccttgtatatccttttgatgtaggcgcagctggatgctgaaccccccggaggctgttagggacaattacaaccgttcataatttgccacagatacaaatctgagtggacaaatggattcagtttacgtatgcttcattgtttgtgag

SEQ ID NO: 3368 - DNA, 3889 bp, Zea Mays
acttgctcctttctctgccgcccgccgctgccgagtgccgggtcttcgctttctttctcctcttcgggcacttcgctgcttgcctgctctgctcgcgacctgcttctcagacccgccctcctcgccggccgcccggcgatgcctcctggccagaggcggcggtggcggcggcggcgacggagatagttagctcttcagattgagtgactggtggtcgccggcggcggagacgcggagtatggaggcgccggggacgagctcgggcggcgccggaggcgagggggccgggggcaccaaggtcaacgaggagctgtggtacgcgtgcgcgggaccgctcgtggcgctgccgccggcggggagcctcgttgtctacttcccgcagggacacagcgagcaggtagcagcatctatgcgaaaggatgcagatgccaaaattccgagctatccaaatctctcatctaagcttatatgcatactccgtagtgtcactatgcttgctgatcctgacacagatgaggtttacgctcgaatgactctccagcccgttagcaatgtgacgcattgtgacaaggagacgttgctggcaacagagcttgcactgaaacaaaccagaccacagacagagttcttttgtaaaacactgactgcaagtgatacaagcactcatggaggtttctctgtgccacggcgtgctgcagagcgaattttcccccatcttgacttctcagtgcagcctcctgctcaggaactgcaggccagggatttgcacgatgcaatttggacattccgtcatatatatcgagcctaaaaggcatttgctgactactggctggagcctatttgtcagtggaaagagactccttgctggtgattcagtcctgtttattagggacggaagacagcaactcctcttggggataaggcgagcaaataggcagcccgttaacctctcatcatctgttttgtctagcgacagtatgcatattggaattcttgctgctgcagcccatgcagcagccaataacagccaattcacagtattctataacccaagggctagtccttcagaatttgttattccttttgccaagtaccagaaggccgtctatagcaaccaactatcacttggcatgcggtttagaatgatgtttgaaactgaagaatctgcaacaagaaggtacatgggaacaataactggtataagtgatatggatcctttaaggtggaaaaactcccaatggcgcaatattcaggttgcatgggatgaagcagcaccaagtgagagacgcaccagggtttccctttgggaggttgaacctgttatcgctccattcttcatttatccctcgccattgttcactgcaaaacgtccgaggcaacctggggtaacagatgatgatagctcagaaatggacaatctttttaagcggaccatgccatggtttggtgaggaggttggcaagagagatctgagtactcaaaacggtttagttcctggattaagtttggttcagtggatgaatatgcaacacaacccctctcttgccaacacggttatgcaaccggaattgctaaattcgttagctggaaaacctgtacaaactctggctgcggctgatctatctaggcaaattagcttccagccccagttcctgcaacaaaataacatccagttcaacacttcgctgctacctccccaaaaccagcagaccgaacagttagcaaatgtaatagctacaccaaaccaattgggaagtgttatagtaccacaaaaggcagttcaaaattccagttctgaacagaaacagaatctggttacacaaccactgcaagtcagccaaccaatggttagtgtggcacagcctcaacttgtccatactcaactccagcaacctcaagtagttctccaggctcagcctcagcaacctcaagtcattgtccaagctcaactacaacaacagcaacctctggttcaaaatcacaccaccatacaaagtggccttcaacaaatccagcttctgcagcaacagcaagttcagcagtcagtgcaggaacaacagcaaataaagatacagccttttcaggtacctaatgatgccaacatggtaacacagttatctgatcagatgaaaatacaactattgaaggctctacagccacagcagcctctggtcatggaacagcagaaaatgatatttgatttgcagcaacaagcagtaaattctcagtcaactgctcagcagtgctcacaggtagctacccaagtggttggtttgcatagcagtagcactaatcagtacccgacgcagcaaaagactcaacctctcaaaacatttcaagattttcctgggaatgctgtttctattgtaaaaccagaaattgtcacctccgtgggtgctcgctctttgcatgtgcctggtggagtgcagtcaatgaagatggatgaagttccctcttcttcaacatcgccatccacaaacaacaatcctgttattttgcgatcaactccaagtagctccaagaaccaatgtttacctactgcagcaaaggctcctcagtcatctgttgtattgggttctacacttgaacagggtatgaagccttgtgacagtacacaacacccaatggtgattcccaagctggctgaagaaaggccagctactggacaagactacatgaacagcactcagctggattatttggatacgtcatcttcagcgacttcagtttgcctttcacaggctgacggatcgctgcaacaaagttttccaccttcatccttcaatcagcatcaaccgttgagggaagcagttccagatagcgagtttgaggttacagatgcaggaaataactttctatttggggcaaatattgatggccatatggagcctcttaacgaagacgatttgcttggaactgccttcgaagctgacaagtacatggaacagatgccaggaaacggcatctctaactacatttcatcaaaggattctcagcaagagttatcatcttcaatgatctcacatccatttggcgttgctgatatcgcgttcaattccatagattcgtcgatcaatgatatccaattcttaaacagaaattcccgggctccaggtcctgttcaacaacgtatgcgaacatacaccaaggtgcacaagcgtggcgctgttggaagatctatcgacatcaacagatattctggttacgatgaactgaagcatgacgttgcccgtatgtttggaattgaggggcagctcagcgaccaaaacagagttggctggaaactggtttacgaagatcacgagaaggatgtcctattagttggtgatgacccatgggaggacttcgtgaactgcgtgcggtgcatcaggattctttcgccgcaggaagagaggcaaatgaggctggccagcgactacggagacagctttcttggcaaccaagcgtgtagcagctcggacgggggtcgtccgtggagggtcaccggcgactagaaatagcaggctatgcctgagcacaaatgtttgatataatccgtcccacgatagcaagaaaatgatacgcgatttctgagcacaaacttttgcactcagatgatcgtgcaaacagttagcattttaagaaaaatgttgcagttcaatgtaactgcaggaatgtctctgatgtagcctcttcgatgtggcagccttaacaatcgatgtgctacagttactctgcctatgtatttactatactaccttggccttgtatatccttttgatgtaggcgcagctggatgctgaaccccccggaggctgttagggacaattacaaccgttcataatttgccacagatacaaatctgagtggacaaatggattcagtttacgtatgcttcattgtttgtgag

SEQ ID NO: 3369 - DNA, 3608 bp, Zea Mays
acttgctcctttctctgccgcccgccgctgccgagtgccgggtcttcgctttctttctcctcttcgggcacttcgctgcttgcctgctctcctcgttgtctacttcccgcagggacacagcgagcaggtagcagcatctatgcgaaaggatgcagatgccaaaattccgagctatccaaatctctcatctaagcttatatgcatactccgtagtgtcactatgcttatgaggtttacgctcgaatgactctccagcccgttagcaatgtgacgcattgtgacaaggagacgttgctggcaacagagcttgcactgaaacaaaccagaccacagacagagttcttttgtaaaacactgactgcaagtgatacaagcactcatggaggtttctctgtgccacggcgtgctgcagagcgaattttcccccatcttgacttctcagtgcagcctcctgctcaggaactgcaggccagggatttgcacgatgcaatttggacattccgtcatatatatcgaggccagcctaaaaggcatttgctgactactggctggagcctatttgtcagtggaaagagactccttgctggtgattcagtcctgtttattagggacggaagacagcaactcctcttggggataaggcgagcaaataggcagcccgttaacctctcatcatctgttttgtctagcgacagtatgcatattggaattcttgctgctgcagcccatgcagcagccaataacagccaattcacagtattctataacccaagggctagtccttcagaatttgttattccttttgccaagtaccagaaggccgtctatagcaaccaactatcacttggcatgcggtttagaatgatgtttgaaactgaagaatctgcaacaagaaggtacatgggaacaataactggtataagtgatatggatcctttaaggtggaaaaactcccaatggcgcaatattcaggttgcatgggatgaagcagcaccaagtgagagacgcaccagggtttccctttgggaggttgaacctgttatcgctccattcttcatttatccctcgccattgttcactgcaaaacgtccgaggcaacctggggtaacagatgatgatagctcagaaatggacaatctttttaagcggaccatgccatggtttggtgaggaggttggcaagagagatctgagtactcaaaacggtttagttcctggattaagtttggttcagtggatgaatatgcaacacaacccctctcttgccaacacggttatgcaaccggaattgctaaattcgttagctggaaaacctgtacaaactctggctgcggctgatctatctaggcaaattagcttccagccccagttcctgcaacaaaataacatccagttcaacacttcgctgctacctccccaaaaccagcagaccgaacagttagcaaatgtaatagctacaccaaaccaattgggaagtgttatagtaccacaaaaggcagttcaaaattccagttctgaacagaaacagaatctggttacacaaccactgcaagtcagccaaccaatggttagtgtggcacagcctcaacttgtccatactcaactccagcaacctcaagtagttctccaggctcagcctcagcaacctcaagtcattgtccaagctcaactacaacaacagcaacctctggttcaaaatcacaccaccatacaaagtggccttcaacaaatccagcttctgcagcaacagcaagttcagcagtcagtgcaggaacaacagcaaataaagatacagccttttcaggtacctaatgatgccaacatggtaacacagttatctgatcagatgaaaatacaactattgaaggctctacagccacagcagcctctggtcatggaacagcagaaaatgatatttgatttgcagcaacaagcagtaaattctcagtcaactgctcagcagtgctcacaggtagctacccaagtggttggtttgcatagcagtagcactaatcagtacccgacgcagcaaaagactcaacctctcaaaacatttcaagattttcctgggaatgctgtttctattgtaaaaccagaaattgtcacctccgtgggtgctcgctctttgcatgtgcctggtggagtgcagtcaatgaagatggatgaagttccctcttcttcaacatcgccatccacaaacaacaatcctgttattttgcgatcaactccaagtagctccaagaaccaatgtttacctactgcagcaaaggctcctcagtcatctgttgtattgggttctacacttgaacagggtatgaagccttgtgacagtacacaacacccaatggtgattcccaagctggctgaagaaaggccagctactggacaagactacatgaacagcactcagctggattatttggatacgtcatcttcagcgacttcagtttgcctttcacaggctgacggatcgctgcaacaaagttttccaccttcatccttcaatcagcatcaaccgttgagggaagcagttccagatagcgagtttgaggttacagatgcaggaaataactttctatttggggcaaatattgatggccatatggagcctcttaacgaagacgatttgcttggaactgccttcgaagctgacaagtacatggaacagatgccaggaaacggcatctctaactacatttcatcaaaggattctcagcaagagttatcatcttcaatgatctcacatccatttggcgttgctgatatcgcgttcaattccatagattcgtcgatcaatgatatccaattcttaaacagaaattcccgggctccaggtcctgttcaacaacgtatgcgaacatacaccaaggtgcacaagcgtggcgctgttggaagatctatcgacatcaacagatattctggttacgatgaactgaagcatgacgttgcccgtatgtttggaattgaggggcagctcagcgaccaaaacagagttggctggaaactggtttacgaagatcacgagaaggatgtcctattagttggtgatgacccatgggaggacttcgtgaactgcgtgcggtgcatcaggattctttcgccgcaggaagagaggcaaatgaggctggccagcgactacggagacagctttcttggcaaccaagcgtgtagcagctcggacgggggtcgtccgtggagggtcaccggcgactagaaatagcaggctatgcctgagcacaaatgtttgatataatccgtcccacgatagcaagaaaatgatacgcgatttctgagcacaaacttttgcactcagatgatcgtgcaaacagttagcattttaagaaaaatgttgcagttcaatgtaactgcaggaatgtctctgatgtagcctcttcgatgtggcagccttaacaatcgatgtgctacagttactctgcctatgtatttactatactaccttggccttgtatatccttttgatgtaggcgcagctggatgctgaaccccccggaggctgttagggacaattacaaccgttcataatttgccacagatacaaatctgagtggacaaatggattcagtttacgtatgcttcattgtttgtgag

SEQ ID NO: 3370 - DNA, 3863 bp, Zea Mays
acttgctcctttctctgccgcccgccgctgccgagtgccgggtcttcgctttctttctcctcttcgggcacttcgctgcttgcctgctctgctcgcgacctgcttctcagacccgccctcctcgccggccgcccggcgatgcctcctggccagaggcggcggtggcggcggcggcgacggagatagttagctcttcagattgagtgactggtggtcgccggcggcggagacgcggagtatggaggcgagggggccgggggcaccaaggtcaacgaggagctgtggtacgcgtgcgcgggaccgctcgtggcgctgccgccggcggggagcctcgttgtctacttcccgcagggacacagcgagcaggtagcagcatctatgcgaaaggatgcagatgccaaaattccgagctatccaaatctctcatctaagcttatatgcatactccgtagtgtcactatgcttgctgatcctgacacagatgaggtttacgctcgaatgactctccagcccgttagcaatgtgacgcattgtgacaaggagacgttgctggcaacagagcttgcactgaaacaaaccagaccacagacagagttcttttgtaaaacactgactgcaagtgatacaagcactcatggaggtttctctgtgccacggcgtgctgcagagcgaattttcccccatcttgacttctcagtgcagcctcctgctcaggaactgcaggccagggatttgcacgatgcaatttggacattccgtcatatatatcgaggccagcctaaaaggcatttgctgactactggctggagcctatttgtcagtggaaagagactccttgctggtgattcagtcctgtttattagggacggaagacagcaactcctcttggggataaggcgagcaaataggcagcccgttaacctctcatcatctgttttgtctagcgacagtatgcatattggaattcttgctgctgcagcccatgcagcagccaataacagccaattcacagtattctataacccaagggctagtccttcagaatttgttattccttttgccaagtaccagaaggccgtctatagcaaccaactatcacttggcatgcggtttagaatgatgtttgaaactgaagaatctgcaacaagaaggtacatgggaacaataactggtataagtgatatggatcctttaaggtggaaaaactcccaatggcgcaatattcaggttgcatgggatgaagcagcaccaagtgagagacgcaccagggtttccctttgggaggttgaacctgttatcgctccattcttcatttatccctcgccattgttcactgcaaaacgtccgaggcaacctggggtaacagatgatgatagctcagaaatggacaatctttttaagcggaccatgccatggtttggtgaggaggttggcaagagagatctgagtactcaaaacggtttagttcctggattaagtttggttcagtggatgaatatgcaacacaacccctctcttgccaacacggttatgcaaccggaattgctaaattcgttagctggaaaacctgtacaaactctggctgcggctgatctatctaggcaaattagcttccagccccagttcctgcaacaaaataacatccagttcaacacttcgctgctacctccccaaaaccagcagaccgaacagttagcaaatgtaatagctacaccaaaccaattgggaagtgttatagtaccacaaaaggcagttcaaaattccagttctgaacagaaacagaatctggttacacaaccactgcaagtcagccaaccaatggttagtgtggcacagcctcaacttgtccatactcaactccagcaacctcaagtagttctccaggctcagcctcagcaacctcaagtcattgtccaagctcaactacaacaacagcaacctctggttcaaaatcacaccaccatacaaagtggccttcaacaaatccagcttctgcagcaacagcaagttcagcagtcagtgcaggaacaacagcaaataaagatacagccttttcaggtacctaatgatgccaacatggtaacacagttatctgatcagatgaaaatacaactattgaaggctctacagccacagcagcctctggtcatggaacagcagaaaatgatatttgatttgcagcaacaagcagtaaattctcagtcaactgctcagcagtgctcacaggtagctacccaagtggttggtttgcatagcagtagcactaatcagtacccgacgcagcaaaagactcaacctctcaaaacatttcaagattttcctgggaatgctgtttctattgtaaaaccagaaattgtcacctccgtgggtgctcgctctttgcatgtgcctggtggagtgcagtcaatgaagatggatgaagttccctcttcttcaacatcgccatccacaaacaacaatcctgttattttgcgatcaactccaagtagctccaagaaccaatgtttacctactgcagcaaaggctcctcagtcatctgttgtattgggttctacacttgaacagggtatgaagccttgtgacagtacacaacacccaatggtgattcccaagctggctgaagaaaggccagctactggacaagactacatgaacagcactcagctggattatttggatacgtcatcttcagcgacttcagtttgcctttcacaggctgacggatcgctgcaacaaagttttccaccttcatccttcaatcagcatcaaccgttgagggaagcagttccagatagcgagtttgaggttacagatgcaggaaataactttctatttggggcaaatattgatggccatatggagcctcttaacgaagacgatttgcttggaactgccttcgaagctgacaagtacatggaacagatgccaggaaacggcatctctaactacatttcatcaaaggattctcagcaagagttatcatcttcaatgatctcacatccatttggcgttgctgatatcgcgttcaattccatagattcgtcgatcaatgatatccaattcttaaacagaaattcccgggctccaggtcctgttcaacaacgtatgcgaacatacaccaaggtgcacaagcgtggcgctgttggaagatctatcgacatcaacagatattctggttacgatgaactgaagcatgacgttgcccgtatgtttggaattgaggggcagctcagcgaccaaaacagagttggctggaaactggtttacgaagatcacgagaaggatgtcctattagttggtgatgacccatgggaggacttcgtgaactgcgtgcggtgcatcaggattctttcgccgcaggaagagaggcaaatgaggctggccagcgactacggagacagctttcttggcaaccaagcgtgtagcagctcggacgggggtcgtccgtggagggtcaccggcgactagaaatagcaggctatgcctgagcacaaatgtttgatataatccgtcccacgatagcaagaaaatgatacgcgatttctgagcacaaacttttgcactcagatgatcgtgcaaacagttagcattttaagaaaaatgttgcagttcaatgtaactgcaggaatgtctctgatgtagcctcttcgatgtggcagccttaacaatcgatgtgctacagttactctgcctatgtatttactatactaccttggccttgtatatccttttgatgtaggcgcagctggatgctgaaccccccggaggctgttagggacaattacaaccgttcataatttgccacagatacaaatctgagtggacaaatggattcagtttacgtatgcttcattgtttgtgag

SEQ ID NO: 3371 - DNA, 3914 bp, Zea Mays
acttgctcctttctctgccgcccgccgctgccgagtgccgggtcttcgctttctttctcctcttcgggcacttcgctgcttgcctgctctgctcgcgacctgcttctcagacccgccctcctcgccggccgcccggcgatgcctcctggccagaggcggcggtggcggcggcggcgacggagatagttagctcttcagattgagtgactggtggtcgccggcggcggagacgcggagtatggaggcgccggggacgagctcgggcggcgccggaggcgagggggccgggggcaccaaggtcaacgaggagctgtggtacgcgtgcgcgggaccgctcgtggcgctgccgccggcggggagcctcgttgtctacttcccgcagggacacagcgagcaggtagcagcatctatgcgaaaggatgcagatgccaaaattccgagctatccaaatctctcatctaagcttatatgcatactccgtagtgtcactatgcttgctgatcctgacacagatgaggtttacgctcgaatgactctccagcccgttagcaatgtgacgcattgtgacaaggagacgttgctggcaacagagcttgcactgaaacaaaccagaccacagacagagttcttttgtaaaacactgactgcaagtgatacaagcactcatggaggtttctctgtgccacggcgtgctgcagagcgaattttcccccatcttgacttctcagtgcagcctcctgctcaggaactgcaggccagggatttgcacgatgcaatttggacattccgtcatatatatcgaggccagcctaaaaggcatttgctgactactggctggagcctatttgtcagtggaaagagactccttgctggtgattcagtcctgtttattagggacggaagacagcaactcctcttggggataaggcgagcaaataggcagcccgttaacctctcatcatctgttttgtctagcgacagtatgcatattggaattcttgctgctgcagcccatgcagcagccaataacagccaattcacagtattctataacccaagactgtttttatccctttcagggctagtccttcagaatttgttattccttttgccaagtaccagaaggccgtctatagcaaccaactatcacttggcatgcggtttagaatgatgtttgaaactgaagaatctgcaacaagaaggtacatgggaacaataactggtataagtgatatggatcctttaaggtggaaaaactcccaatggcgcaatattcaggttgcatgggatgaagcagcaccaagtgagagacgcaccagggtttccctttgggaggttgaacctgttatcgctccattcttcatttatccctcgccattgttcactgcaaaacgtccgaggcaacctggggtaacagatgatgatagctcagaaatggacaatctttttaagcggaccatgccatggtttggtgaggaggttggcaagagagatctgagtactcaaaacggtttagttcctggattaagtttggttcagtggatgaatatgcaacacaacccctctcttgccaacacggttatgcaaccggaattgctaaattcgttagctggaaaacctgtacaaactctggctgcggctgatctatctaggcaaattagcttccagccccagttcctgcaacaaaataacatccagttcaacacttcgctgctacctccccaaaaccagcagaccgaacagttagcaaatgtaatagctacaccaaaccaattgggaagtgttatagtaccacaaaaggcagttcaaaattccagttctgaacagaaacagaatctggttacacaaccactgcaagtcagccaaccaatggttagtgtggcacagcctcaacttgtccatactcaactccagcaacctcaagtagttctccaggctcagcctcagcaacctcaagtcattgtccaagctcaactacaacaacagcaacctctggttcaaaatcacaccaccatacaaagtggccttcaacaaatccagcttctgcagcaacagcaagttcagcagtcagtgcaggaacaacagcaaataaagatacagccttttcaggtacctaatgatgccaacatggtaacacagttatctgatcagatgaaaatacaactattgaaggctctacagccacagcagcctctggtcatggaacagcagaaaatgatatttgatttgcagcaacaagcagtaaattctcagtcaactgctcagcagtgctcacaggtagctacccaagtggttggtttgcatagcagtagcactaatcagtacccgacgcagcaaaagactcaacctctcaaaacatttcaagattttcctgggaatgctgtttctattgtaaaaccagaaattgtcacctccgtgggtgctcgctctttgcatgtgcctggtggagtgcagtcaatgaagatggatgaagttccctcttcttcaacatcgccatccacaaacaacaatcctgttattttgcgatcaactccaagtagctccaagaaccaatgtttacctactgcagcaaaggctcctcagtcatctgttgtattgggttctacacttgaacagggtatgaagccttgtgacagtacacaacacccaatggtgattcccaagctggctgaagaaaggccagctactggacaagactacatgaacagcactcagctggattatttggatacgtcatcttcagcgacttcagtttgcctttcacaggctgacggatcgctgcaacaaagttttccaccttcatccttcaatcagcatcaaccgttgagggaagcagttccagatagcgagtttgaggttacagatgcaggaaataactttctatttggggcaaatattgatggccatatggagcctcttaacgaagacgatttgcttggaactgccttcgaagctgacaagtacatggaacagatgccaggaaacggcatctctaactacatttcatcaaaggattctcagcaagagttatcatcttcaatgatctcacatccatttggcgttgctgatatcgcgttcaattccatagattcgtcgatcaatgatatccaattcttaaacagaaattcccgggctccaggtcctgttcaacaacgtatgcgaacatacaccaaggtgcacaagcgtggcgctgttggaagatctatcgacatcaacagatattctggttacgatgaactgaagcatgacgttgcccgtatgtttggaattgaggggcagctcagcgaccaaaacagagttggctggaaactggtttacgaagatcacgagaaggatgtcctattagttggtgatgacccatgggaggacttcgtgaactgcgtgcggtgcatcaggattctttcgccgcaggaagagaggcaaatgaggctggccagcgactacggagacagctttcttggcaaccaagcgtgtagcagctcggacgggggtcgtccgtggagggtcaccggcgactagaaatagcaggctatgcctgagcacaaatgtttgatataatccgtcccacgatagcaagaaaatgatacgcgatttctgagcacaaacttttgcactcagatgatcgtgcaaacagttagcattttaagaaaaatgttgcagttcaatgtaactgcaggaatgtctctgatgtagcctcttcgatgtggcagccttaacaatcgatgtgctacagttactctgcctatgtatttactatactaccttggccttgtatatccttttgatgtaggcgcagctggatgctgaaccccccggaggctgttagggacaattacaaccgttcataatttgccacagatacaaatctgagtggacaaatggattcagtttacgtatgcttcattgtttgtgag

SEQ ID NO: 3372 - DNA, 3545 bp, Zea Mays
cttgctttccatttgtctcccgacaaaaaaaaagagcattttttcccggtagcagcatctatgcgaaaggatgcagatgccaaaattccgagctatccaaatctctcatctaagcttatatgcatactccgtagtgtcactatgcttgctgatcctgacacagatgaggtttacgctcgaatgactctccagcccgttagcaatgtgacgcattgtgacaaggagacgttgctggcaacagagcttgcactgaaacaaaccagaccacagacagagttcttttgtaaaacactgactgcaagtgatacaagcactcatggaggtttctctgtgccacggcgtgctgcagagcgaattttcccccatcttgacttctcagtgcagcctcctgctcaggaactgcaggccagggatttgcacgatgcaatttggacattccgtcatatatatcgaggccagcctaaaaggcatttgctgactactggctggagcctatttgtcagtggaaagagactccttgctggtgattcagtcctgtttattagggacggaagacagcaactcctcttggggataaggcgagcaaataggcagcccgttaacctctcatcatctgttttgtctagcgacagtatgcatattggaattcttgctgctgcagcccatgcagcagccaataacagccaattcacagtattctataacccaagggctagtccttcagaatttgttattccttttgccaagtaccagaaggccgtctatagcaaccaactatcacttggcatgcggtttagaatgatgtttgaaactgaagaatctgcaacaagaaggtacatgggaacaataactggtataagtgatatggatcctttaaggtggaaaaactcccaatggcgcaatattcaggttgcatgggatgaagcagcaccaagtgagagacgcaccagggtttccctttgggaggttgaacctgttatcgctccattcttcatttatccctcgccattgttcactgcaaaacgtccgaggcaacctggggtaacagatgatgatagctcagaaatggacaatctttttaagcggaccatgccatggtttggtgaggaggttggcaagagagatctgagtactcaaaacggtttagttcctggattaagtttggttcagtggatgaatatgcaacacaacccctctcttgccaacacggttatgcaaccggaattgctaaattcgttagctggaaaacctgtacaaactctggctgcggctgatctatctaggcaaattagcttccagccccagttcctgcaacaaaataacatccagttcaacacttcgctgctacctccccaaaaccagcagaccgaacagttagcaaatgtaatagctacaccaaaccaattgggaagtgttatagtaccacaaaaggcagttcaaaattccagttctgaacagaaacagaatctggttacacaaccactgcaagtcagccaaccaatggttagtgtggcacagcctcaacttgtccatactcaactccagcaacctcaagtagttctccaggctcagcctcagcaacctcaagtcattgtccaagctcaactacaacaacagcaacctctggttcaaaatcacaccaccatacaaagtggccttcaacaaatccagcttctgcagcaacagcaagttcagcagtcagtgcaggaacaacagcaaataaagatacagccttttcaggtacctaatgatgccaacatggtaacacagttatctgatcagatgaaaatacaactattgaaggctctacagccacagcagcctctggtcatggaacagcagaaaatgatatttgatttgcagcaacaagcagtaaattctcagtcaactgctcagcagtgctcacaggtagctacccaagtggttggtttgcatagcagtagcactaatcagtacccgacgcagcaaaagactcaacctctcaaaacatttcaagattttcctgggaatgctgtttctattgtaaaaccagaaattgtcacctccgtgggtgctcgctctttgcatgtgcctggtggagtgcagtcaatgaagatggatgaagttccctcttcttcaacatcgccatccacaaacaacaatcctgttattttgcgatcaactccaagtagctccaagaaccaatgtttacctactgcagcaaaggctcctcagtcatctgttgtattgggttctacacttgaacagggtatgaagccttgtgacagtacacaacacccaatggtgattcccaagctggctgaagaaaggccagctactggacaagactacatgaacagcactcagctggattatttggatacgtcatcttcagcgacttcagtttgcctttcacaggctgacggatcgctgcaacaaagttttccaccttcatccttcaatcagcatcaaccgttgagggaagcagttccagatagcgagtttgaggttacagatgcaggaaataactttctatttggggcaaatattgatggccatatggagcctcttaacgaagacgatttgcttggaactgccttcgaagctgacaagtacatggaacagatgccaggaaacggcatctctaactacatttcatcaaaggattctcagcaagagttatcatcttcaatgatctcacatccatttggcgttgctgatatcgcgttcaattccatagattcgtcgatcaatgatatccaattcttaaacagaaattcccgggctccaggtcctgttcaacaacgtatgcgaacatacaccaaggtgcacaagcgtggcgctgttggaagatctatcgacatcaacagatattctggttacgatgaactgaagcatgacgttgcccgtatgtttggaattgaggggcagctcagcgaccaaaacagagttggctggaaactggtttacgaagatcacgagaaggatgtcctattagttggtgatgacccatgggaggacttcgtgaactgcgtgcggtgcatcaggattctttcgccgcaggaagagaggcaaatgaggctggccagcgactacggagacagctttcttggcaaccaagcgtgtagcagctcggacgggggtcgtccgtggagggtcaccggcgactagaaatagcaggctatgcctgagcacaaatgtttgatataatccgtcccacgatagcaagaaaatgatacgcgatttctgagcacaaacttttgcactcagatgatcgtgcaaacagttagcattttaagaaaaatgttgcagttcaatgtaactgcaggaatgtctctgatgtagcctcttcgatgtggcagccttaacaatcgatgtgctacagttactctgcctatgtatttactatactaccttggccttgtatatccttttgatgtaggcgcagctggatgctgaaccccccggaggctgttagggacaattacaaccgttcataatttgccacagatacaaatctgagtggacaaatggattcagtttacgtatgcttcattgtttgtgag

SEQ ID NO: 3373 - DNA, 3526 bp, Zea Mays
ctcgtactcacaattgaggcagttttgtggtagcagcatctatgcgaaaggatgcagatgccaaaattccgagctatccaaatctctcatctaagcttatatgcatactccgtagtgtcactatgcttgctgatcctgacacagatgaggtttacgctcgaatgactctccagcccgttagcaatgtgacgcattgtgacaaggagacgttgctggcaacagagcttgcactgaaacaaaccagaccacagacagagttcttttgtaaaacactgactgcaagtgatacaagcactcatggaggtttctctgtgccacggcgtgctgcagagcgaattttcccccatcttgacttctcagtgcagcctcctgctcaggaactgcaggccagggatttgcacgatgcaatttggacattccgtcatatatatcgaggccagcctaaaaggcatttgctgactactggctggagcctatttgtcagtggaaagagactccttgctggtgattcagtcctgtttattagggacggaagacagcaactcctcttggggataaggcgagcaaataggcagcccgttaacctctcatcatctgttttgtctagcgacagtatgcatattggaattcttgctgctgcagcccatgcagcagccaataacagccaattcacagtattctataacccaagggctagtccttcagaatttgttattccttttgccaagtaccagaaggccgtctatagcaaccaactatcacttggcatgcggtttagaatgatgtttgaaactgaagaatctgcaacaagaaggtacatgggaacaataactggtataagtgatatggatcctttaaggtggaaaaactcccaatggcgcaatattcaggttgcatgggatgaagcagcaccaagtgagagacgcaccagggtttccctttgggaggttgaacctgttatcgctccattcttcatttatccctcgccattgttcactgcaaaacgtccgaggcaacctggggtaacagatgatgatagctcagaaatggacaatctttttaagcggaccatgccatggtttggtgaggaggttggcaagagagatctgagtactcaaaacggtttagttcctggattaagtttggttcagtggatgaatatgcaacacaacccctctcttgccaacacggttatgcaaccggaattgctaaattcgttagctggaaaacctgtacaaactctggctgcggctgatctatctaggcaaattagcttccagccccagttcctgcaacaaaataacatccagttcaacacttcgctgctacctccccaaaaccagcagaccgaacagttagcaaatgtaatagctacaccaaaccaattgggaagtgttatagtaccacaaaaggcagttcaaaattccagttctgaacagaaacagaatctggttacacaaccactgcaagtcagccaaccaatggttagtgtggcacagcctcaacttgtccatactcaactccagcaacctcaagtagttctccaggctcagcctcagcaacctcaagtcattgtccaagctcaactacaacaacagcaacctctggttcaaaatcacaccaccatacaaagtggccttcaacaaatccagcttctgcagcaacagcaagttcagcagtcagtgcaggaacaacagcaaataaagatacagccttttcaggtacctaatgatgccaacatggtaacacagttatctgatcagatgaaaatacaactattgaaggctctacagccacagcagcctctggtcatggaacagcagaaaatgatatttgatttgcagcaacaagcagtaaattctcagtcaactgctcagcagtgctcacaggtagctacccaagtggttggtttgcatagcagtagcactaatcagtacccgacgcagcaaaagactcaacctctcaaaacatttcaagattttcctgggaatgctgtttctattgtaaaaccagaaattgtcacctccgtgggtgctcgctctttgcatgtgcctggtggagtgcagtcaatgaagatggatgaagttccctcttcttcaacatcgccatccacaaacaacaatcctgttattttgcgatcaactccaagtagctccaagaaccaatgtttacctactgcagcaaaggctcctcagtcatctgttgtattgggttctacacttgaacagggtatgaagccttgtgacagtacacaacacccaatggtgattcccaagctggctgaagaaaggccagctactggacaagactacatgaacagcactcagctggattatttggatacgtcatcttcagcgacttcagtttgcctttcacaggctgacggatcgctgcaacaaagttttccaccttcatccttcaatcagcatcaaccgttgagggaagcagttccagatagcgagtttgaggttacagatgcaggaaataactttctatttggggcaaatattgatggccatatggagcctcttaacgaagacgatttgcttggaactgccttcgaagctgacaagtacatggaacagatgccaggaaacggcatctctaactacatttcatcaaaggattctcagcaagagttatcatcttcaatgatctcacatccatttggcgttgctgatatcgcgttcaattccatagattcgtcgatcaatgatatccaattcttaaacagaaattcccgggctccaggtcctgttcaacaacgtatgcgaacatacaccaaggtgcacaagcgtggcgctgttggaagatctatcgacatcaacagatattctggttacgatgaactgaagcatgacgttgcccgtatgtttggaattgaggggcagctcagcgaccaaaacagagttggctggaaactggtttacgaagatcacgagaaggatgtcctattagttggtgatgacccatgggaggacttcgtgaactgcgtgcggtgcatcaggattctttcgccgcaggaagagaggcaaatgaggctggccagcgactacggagacagctttcttggcaaccaagcgtgtagcagctcggacgggggtcgtccgtggagggtcaccggcgactagaaatagcaggctatgcctgagcacaaatgtttgatataatccgtcccacgatagcaagaaaatgatacgcgatttctgagcacaaacttttgcactcagatgatcgtgcaaacagttagcattttaagaaaaatgttgcagttcaatgtaactgcaggaatgtctctgatgtagcctcttcgatgtggcagccttaacaatcgatgtgctacagttactctgcctatgtatttactatactaccttggccttgtatatccttttgatgtaggcgcagctggatgctgaaccccccggaggctgttagggacaattacaaccgttcataatttgccacagatacaaatctgagtggacaaatggattcagtttacgtatgcttcattgtttgtgag

SEQ ID NO: 3374 - DNA, 3427 bp, Zea Mays
cacaattgaggcagttttgtggtagcagcatctatgcgaaaggatgcagatgccaaaattccgagctatccaaatctctcatctaagcttatatgcatactccgtagtgtcactatgcttgctgatcctgacacagatgaggtttacgctcgaatgactctccagcccgttagcaatgtgacgcattgtgacaaggagacgttgctggcaacagagcttgcactgaaacaaaccagaccacagacagagttcttttgtaaaacactgactgcaagtgatacaagcactcatggaggtttctctgtgccacggcgtgctgcagagcgaattttcccccatcttgacttctcagtgcagcctcctgctcaggaactgcaggccagggatttgcacgatgcaatttggacattccgtcatatatatcgagggacggaagacagcaactcctcttggggataaggcgagcaaataggcagcccgttaacctctcatcatctgttttgtctagcgacagtatgcatattggaattcttgctgctgcagcccatgcagcagccaataacagccaattcacagtattctataacccaagggctagtccttcagaatttgttattccttttgccaagtaccagaaggccgtctatagcaaccaactatcacttggcatgcggtttagaatgatgtttgaaactgaagaatctgcaacaagaaggtacatgggaacaataactggtataagtgatatggatcctttaaggtggaaaaactcccaatggcgcaatattcaggttgcatgggatgaagcagcaccaagtgagagacgcaccagggtttccctttgggaggttgaacctgttatcgctccattcttcatttatccctcgccattgttcactgcaaaacgtccgaggcaacctggggtaacagatgatgatagctcagaaatggacaatctttttaagcggaccatgccatggtttggtgaggaggttggcaagagagatctgagtactcaaaacggtttagttcctggattaagtttggttcagtggatgaatatgcaacacaacccctctcttgccaacacggttatgcaaccggaattgctaaattcgttagctggaaaacctgtacaaactctggctgcggctgatctatctaggcaaattagcttccagccccagttcctgcaacaaaataacatccagttcaacacttcgctgctacctccccaaaaccagcagaccgaacagttagcaaatgtaatagctacaccaaaccaattgggaagtgttatagtaccacaaaaggcagttcaaaattccagttctgaacagaaacagaatctggttacacaaccactgcaagtcagccaaccaatggttagtgtggcacagcctcaacttgtccatactcaactccagcaacctcaagtagttctccaggctcagcctcagcaacctcaagtcattgtccaagctcaactacaacaacagcaacctctggttcaaaatcacaccaccatacaaagtggccttcaacaaatccagcttctgcagcaacagcaagttcagcagtcagtgcaggaacaacagcaaataaagatacagccttttcaggtacctaatgatgccaacatggtaacacagttatctgatcagatgaaaatacaactattgaaggctctacagccacagcagcctctggtcatggaacagcagaaaatgatatttgatttgcagcaacaagcagtaaattctcagtcaactgctcagcagtgctcacaggtagctacccaagtggttggtttgcatagcagtagcactaatcagtacccgacgcagcaaaagactcaacctctcaaaacatttcaagattttcctgggaatgctgtttctattgtaaaaccagaaattgtcacctccgtgggtgctcgctctttgcatgtgcctggtggagtgcagtcaatgaagatggatgaagttccctcttcttcaacatcgccatccacaaacaacaatcctgttattttgcgatcaactccaagtagctccaagaaccaatgtttacctactgcagcaaaggctcctcagtcatctgttgtattgggttctacacttgaacagggtatgaagccttgtgacagtacacaacacccaatggtgattcccaagctggctgaagaaaggccagctactggacaagactacatgaacagcactcagctggattatttggatacgtcatcttcagcgacttcagtttgcctttcacaggctgacggatcgctgcaacaaagttttccaccttcatccttcaatcagcatcaaccgttgagggaagcagttccagatagcgagtttgaggttacagatgcaggaaataactttctatttggggcaaatattgatggccatatggagcctcttaacgaagacgatttgcttggaactgccttcgaagctgacaagtacatggaacagatgccaggaaacggcatctctaactacatttcatcaaaggattctcagcaagagttatcatcttcaatgatctcacatccatttggcgttgctgatatcgcgttcaattccatagattcgtcgatcaatgatatccaattcttaaacagaaattcccgggctccaggtcctgttcaacaacgtatgcgaacatacaccaaggtgcacaagcgtggcgctgttggaagatctatcgacatcaacagatattctggttacgatgaactgaagcatgacgttgcccgtatgtttggaattgaggggcagctcagcgaccaaaacagagttggctggaaactggtttacgaagatcacgagaaggatgtcctattagttggtgatgacccatgggaggacttcgtgaactgcgtgcggtgcatcaggattctttcgccgcaggaagagaggcaaatgaggctggccagcgactacggagacagctttcttggcaaccaagcgtgtagcagctcggacgggggtcgtccgtggagggtcaccggcgactagaaatagcaggctatgcctgagcacaaatgtttgatataatccgtcccacgatagcaagaaaatgatacgcgatttctgagcacaaacttttgcactcagatgatcgtgcaaacagttagcattttaagaaaaatgttgcagttcaatgtaactgcaggaatgtctctgatgtagcctcttcgatgtggcagccttaacaatcgatgtgctacagttactctgcctatgtatttactatactaccttggccttgtatatccttttgatgtaggcgcagctggatgctgaaccccccggaggctgttagggacaattacaaccgttcataatttgccacagatacaaatctgagtggacaaatggattcagtttacgtatgcttcattgtttgtgag

SEQ ID NO: 3375 - DNA, 3412 bp, Zea Mays
cttccttcaatacagctgatcctgacacagatgaggtttacgctcgaatgactctccagcccgttagcaatgtgacgcattgtgacaaggagacgttgctggcaacagagcttgcactgaaacaaaccagaccacagacagagttcttttgtaaaacactgactgcaagtgatacaagcactcatggaggtttctctgtgccacggcgtgctgcagagcgaattttcccccatcttgacttctcagtgcagcctcctgctcaggaactgcaggccagggatttgcacgatgcaatttggacattccgtcatatatatcgaggccagcctaaaaggcatttgctgactactggctggagcctatttgtcagtggaaagagactccttgctggtgattcagtcctgtttattagggacggaagacagcaactcctcttggggataaggcgagcaaataggcagcccgttaacctctcatcatctgttttgtctagcgacagtatgcatattggaattcttgctgctgcagcccatgcagcagccaataacagccaattcacagtattctataacccaagggctagtccttcagaatttgttattccttttgccaagtaccagaaggccgtctatagcaaccaactatcacttggcatgcggtttagaatgatgtttgaaactgaagaatctgcaacaagaaggtacatgggaacaataactggtataagtgatatggatcctttaaggtggaaaaactcccaatggcgcaatattcaggttgcatgggatgaagcagcaccaagtgagagacgcaccagggtttccctttgggaggttgaacctgttatcgctccattcttcatttatccctcgccattgttcactgcaaaacgtccgaggcaacctggggtaacagatgatgatagctcagaaatggacaatctttttaagcggaccatgccatggtttggtgaggaggttggcaagagagatctgagtactcaaaacggtttagttcctggattaagtttggttcagtggatgaatatgcaacacaacccctctcttgccaacacggttatgcaaccggaattgctaaattcgttagctggaaaacctgtacaaactctggctgcggctgatctatctaggcaaattagcttccagccccagttcctgcaacaaaataacatccagttcaacacttcgctgctacctccccaaaaccagcagaccgaacagttagcaaatgtaatagctacaccaaaccaattgggaagtgttatagtaccacaaaaggcagttcaaaattccagttctgaacagaaacagaatctggttacacaaccactgcaagtcagccaaccaatggttagtgtggcacagcctcaacttgtccatactcaactccagcaacctcaagtagttctccaggctcagcctcagcaacctcaagtcattgtccaagctcaactacaacaacagcaacctctggttcaaaatcacaccaccatacaaagtggccttcaacaaatccagcttctgcagcaacagcaagttcagcagtcagtgcaggaacaacagcaaataaagatacagccttttcaggtacctaatgatgccaacatggtaacacagttatctgatcagatgaaaatacaactattgaaggctctacagccacagcagcctctggtcatggaacagcagaaaatgatatttgatttgcagcaacaagcagtaaattctcagtcaactgctcagcagtgctcacaggtagctacccaagtggttggtttgcatagcagtagcactaatcagtacccgacgcagcaaaagactcaacctctcaaaacatttcaagattttcctgggaatgctgtttctattgtaaaaccagaaattgtcacctccgtgggtgctcgctctttgcatgtgcctggtggagtgcagtcaatgaagatggatgaagttccctcttcttcaacatcgccatccacaaacaacaatcctgttattttgcgatcaactccaagtagctccaagaaccaatgtttacctactgcagcaaaggctcctcagtcatctgttgtattgggttctacacttgaacagggtatgaagccttgtgacagtacacaacacccaatggtgattcccaagctggctgaagaaaggccagctactggacaagactacatgaacagcactcagctggattatttggatacgtcatcttcagcgacttcagtttgcctttcacaggctgacggatcgctgcaacaaagttttccaccttcatccttcaatcagcatcaaccgttgagggaagcagttccagatagcgagtttgaggttacagatgcaggaaataactttctatttggggcaaatattgatggccatatggagcctcttaacgaagacgatttgcttggaactgccttcgaagctgacaagtacatggaacagatgccaggaaacggcatctctaactacatttcatcaaaggattctcagcaagagttatcatcttcaatgatctcacatccatttggcgttgctgatatcgcgttcaattccatagattcgtcgatcaatgatatccaattcttaaacagaaattcccgggctccaggtcctgttcaacaacgtatgcgaacatacaccaaggtgcacaagcgtggcgctgttggaagatctatcgacatcaacagatattctggttacgatgaactgaagcatgacgttgcccgtatgtttggaattgaggggcagctcagcgaccaaaacagagttggctggaaactggtttacgaagatcacgagaaggatgtcctattagttggtgatgacccatgggaggacttcgtgaactgcgtgcggtgcatcaggattctttcgccgcaggaagagaggcaaatgaggctggccagcgactacggagacagctttcttggcaaccaagcgtgtagcagctcggacgggggtcgtccgtggagggtcaccggcgactagaaatagcaggctatgcctgagcacaaatgtttgatataatccgtcccacgatagcaagaaaatgatacgcgatttctgagcacaaacttttgcactcagatgatcgtgcaaacagttagcattttaagaaaaatgttgcagttcaatgtaactgcaggaatgtctctgatgtagcctcttcgatgtggcagccttaacaatcgatgtgctacagttactctgcctatgtatttactatactaccttggccttgtatatccttttgatgtaggcgcagctggatgctgaaccccccggaggctgttagggacaattacaaccgttcataatttgccacagatacaaatctgagtggacaaatggattcagtttacgtatgcttcattgtttgtgag

SEQ ID NO: 3376 - DNA, 2307 bp, Zea Mays
gccttatccaagttccaagcggccccaaacctgagcgagcagttttcaggcaggaatgaccccggtctcacatgtcagtgagtcacaacagccagatggaaaggcccacgtcatctagtcattggttgtgaaatccccgttctacccctcccgtctctgatctcgataggggagccgggggagcgcgacgacggggagaaaaaacagaggaggaaaaaaacacccaaaaaaccaccttcttttcctgcgttcccctgctcgatccccgacgagaattcgctcccgaacccatcgatctgctctccgcagtccgccgatccgtggatcgatccgtgcgcgggctcggtccgccccgggttccgatctggtcgccgcctcgcctgaggagatgaacggcgccgggggcagccaccaccagcagcagcagaggctccggcagcagcagcagcaggcgctcctgatgcagcaggcgctgcagcagcagcagcagcagcagtaccagtccggcgtcctcgccgccgcggcggcggcggccatgacccagatggaacctgtttccaatggcaaccttccacctgggtttgatccttccacttgtcgcagtgtgtatgttggaaatgtgaaccctaatgtcacggagagccttttgattgaagttttccagagtgctggccttgtggaaagatgcaagctcatacggaaagagaagtcttcctttgggtttgtggactactatgatcgaagatctgctgctctagcaatcatgacccttcatggccgtcacgtatatggacaagcaatcaaggtgaactgggcatatgcaagtacgcagagggaggatacgtcagggcatttccatatttttgttggtgatttaagttctgaagtgaatgatgcaactctttatgcctgtttctcagcatatccttcttgttcgtaagtcctttttgtatcatgatggcatctatgacgagcttaacctgcagcctatgctttcacatgctgacttttaattcaaaattcgcaatatgctatttcaattctatctatttcttgtgctattgaatgacagagtttggacactatgacttctcacttagcttctaccattttttgtttgtctgtagctttttatattttcatttgtattatttatatgcagtgatgctcgagtcatgtgggacaacaaaactggacgctccaggggttatggttttgtctccttccgtaatcaacaggaagctgaaactgctataactgaaatgactggaaaatggcttggaagcagacaaataaggtgcaactgggcaacaaagaacaattcggaagagaaaccagaaactgacaatcataacgcagtcgtactaacaaatggtagctccaacaattcagcaacggatgcaagccaggacgcaggaagtaaagagcccccacagaacaatcctgattgtactactgtatatgttggcaacctcggccatgaggttaaccgggatgagcttcaccgccacttctataacttgggggtcggggcgatcgaggaggtccgtgttcagcaggacaaagggtttggattcgtgagatatagcacccacggggaagcagcactcgctattcagatgtccaatgggtcggtagtccgcgggaaaccaatcaagtgctcatggggtgtcaaaccaactccaccggggacaggctccaagcccctaccccctccagccgcaacgtaccagcccgctgtggcaatgccaggcgtcccgcaaggtttcacgacagcagaactccttgcctaccagaggcagcttgccctgagccaggccgcggccgggcagcagcatgctggtcttgcgggccaggtttctgcagcaggccttcttgctgctgccggttcccaggccctctacgacggctacccgaatcaatcgtcagcgcagcagcttatgtactacaactagtagagctcaagaggaaggaaggcgtctgtagtgttcagcttgtttttgcgcaaacttgggtcatcctcgccctgtttttttttctttattattttgtggttcatgtactatttgtgtgagagctcttgttctctcttctcagccgcgggattgtgttacttactgtcttcttactgtaccattttccttgtctaattctgttgagtaagaggtgtattctatgtgactttgcgattgattaatgtaatgctcccctggggatcggctttggtcgctgggctggttcatgatccggtgttcgggtccgattggacattgaaaggaggtttactggttcatgatctggtggtgt

SEQ ID NO: 3377 - DNA, 2200 bp, Zea Mays
atccaagttccaagcggccccaaacctgagcgagcagttttcaggcaggaatgaccccggtctcacatgtcagtgagtcacaacagccagatggaaaggcccacgtcatctagtcattggttgtgaaatccccgttctacccctcccgtctctgatctcgataggggagccgggggagcgcgacgacggggagaaaaaacagaggaggaaaaaaacacccaaaaaaccaccttcttttcctgcgttcccctgctcgatccccgacgagaattcgctcccgaacccatcgatctgctctccgcagtccgccgatccgtggatcgatccgtgcgcgggctcggtccgccccgggttccgatctggtcgccgcctcgcctgaggagatgaacggcgccgggggcagccaccaccagcagcagcagaggctccggcagcagcagcagcaggcgctcctgatgcagcaggcgctgcagcagcagcagcagcagcagtaccagtccggcgtcctcgccgccgcggcggcggcggccatgacccagatggaacctgtttccaatggcaaccttccacctgggtttgatccttccacttgtcgcagtgtgtgagtgctttcggtgttcttctctgttttcactttcttatttgattgatagcttatttttcccttttctcttttcatctgtgcaacaatggttttcttttttaaaaacctggagttttaaaaggtatgttggaaatgtgaaccctaatgtcacggagagccttttgattgaagttttccagagtgctggccttgtggaaagatgcaagctcatacggaaagagaagtcttcctttgggtttgtggactactatgatcgaagatctgctgctctagcaatcatgacccttcatggccgtcacgtatatggacaagcaatcaaggtgaactgggcatatgcaagtacgcagagggaggatacgtcagggcatttccatatttttgttggtgatttaagttctgaagtgaatgatgcaactctttatgcctgtttctcagcatatccttcttgttctgatgctcgagtcatgtgggacaacaaaactggacgctccaggggttatggttttgtctccttccgtaatcaacaggaagctgaaactgctataactgaaatgactggaaaatggcttggaagcagacaaataaggtgcaactgggcaacaaagaacaattcggaagagaaaccagaaactgacaatcataacgcagtcgtactaacaaatggtagctccaacaattcagcaacggatgcaagccaggacgcaggaagtaaagagcccccacagaacaatcctgattgtactactgtatatgttggcaacctcggccatgaggttaaccgggatgagcttcaccgccacttctataacttgggggtcggggcgatcgaggaggtccgtgttcagcaggacaaagggtttggattcgtgagatatagcacccacggggaagcagcactcgctattcagatgtccaatgggtcggtagtccgcgggaaaccaatcaagtgctcatggggtgtcaaaccaactccaccggggacaggctccaagcccctaccccctccagccgcaacgtaccagcccgctgtggcaatgccaggcgtcccgcaaggtttcacgacagcagaactccttgcctaccagaggcagcttgccctgagccaggccgcggccgggcagcagcatgctggtcttgcgggccaggtttctgcagcaggccttcttgctgctgccggttcccaggccctctacgacggctacccgaatcaatcgtcagcgcagcagcttatgtactacaactagtagagctcaagaggaaggaaggcgtctgtagtgttcagcttgtttttgcgcaaacttgggtcatcctcgccctgtttttttttctttattattttgtggttcatgtactatttgtgtgagagctcttgttctctcttctcagccgcgggattgtgttacttactgtcttcttactgtaccattttccttgtctaattctgttgagtaagaggtgtattctatgtgactttgcgattgattaatgtaatgctcccctggggatcggctttggtcgctgggctggttcatgatccggtgttcgggtccgattggacattgaaaggaggtttactggttcatgatctggtggtgt

SEQ ID NO: 3378 - DNA, 2014 bp, Zea Mays
atccaagttccaagcggccccaaacctgagcgagcagttttcaggcaggaatgaccccggtctcacatgtcagtgagtcacaacagccagatggaaaggcccacgtcatctagtcattggttgtgaaatccccgttctacccctcccgtctctgatctcgataggggagccgggggagcgcgacgacggggagaaaaaacagaggaggaaaaaaacacccaaaaaaccaccttcttttcctgcgttcccctgctcgatccccgacgagaattcgctcccgaacccatcgatctgctctccgcagtccgccgatccgtggatcgatccgtgcgcgggctcggtccgccccgggttccgatctggtcgccgcctcgcctgaggagatgaacggcgccgggggcagccaccaccagcagcagcagaggctccggcagcagcagcagcaggcgctcctgatgcagcaggcgctgcagcagcagcagcagcagcagtaccagtccggcgtcctcgccgccgcggcggcggcggccatgacccaggtatgttggaaatgtgaaccctaatgtcacggagagccttttgattgaagttttccagagtgctggccttgtggaaagatgcaagctcatacggaaagagaagtcttcctttgggtttgtggactactatgatcgaagatctgctgctctagcaatcatgacccttcatggccgtcacgtatatggacaagcaatcaaggtgaactgggcatatgcaagtacgcagagggaggatacgtcagggcatttccatatttttgttggtgatttaagttctgaagtgaatgatgcaactctttatgcctgtttctcagcatatccttcttgttctgatgctcgagtcatgtgggacaacaaaactggacgctccaggggttatggttttgtctccttccgtaatcaacaggaagctgaaactgctataactgaaatgactggaaaatggcttggaagcagacaaataaggtgcaactgggcaacaaagaacaattcggaagagaaaccagaaactgacaatcataacgcagtcgtactaacaaatggtagctccaacaattcagcaacggatgcaagccaggacgcaggaagtaaagagcccccacagaacaatcctgattgtactactgtatatgttggcaacctcggccatgaggttaaccgggatgagcttcaccgccacttctataacttgggggtcggggcgatcgaggaggtccgtgttcagcaggacaaagggtttggattcgtgagatatagcacccacggggaagcagcactcgctattcagatgtccaatgggtcggtagtccgcgggaaaccaatcaagtgctcatggggtgtcaaaccaactccaccggggacaggctccaagcccctaccccctccagccgcaacgtaccagcccgctgtggcaatgccaggcgtcccgcaaggtttcacgacagcagaactccttgcctaccagaggcagcttgccctgagccaggccgcggccgggcagcagcatgctggtcttgcgggccaggtttctgcagcaggccttcttgctgctgccggttcccaggccctctacgacggctacccgaatcaatcgtcagcgcagcagcttatgtactacaactagtagagctcaagaggaaggaaggcgtctgtagtgttcagcttgtttttgcgcaaacttgggtcatcctcgccctgtttttttttctttattattttgtggttcatgtactatttgtgtgagagctcttgttctctcttctcagccgcgggattgtgttacttactgtcttcttactgtaccattttccttgtctaattctgttgagtaagaggtgtattctatgtgactttgcgattgattaatgtaatgctcccctggggatcggctttggtcgctgggctggttcatgatccggtgttcgggtccgattggacattgaaaggaggtttactggttcatgatctggtggtgt

SEQ ID NO: 3379 - DNA, 2013 bp, Zea Mays
atccaagttccaagcggccccaaacctgagcgagcagttttcaggcaggaatgaccccggtctcacatgtcagtgagtcacaacagccagatggaaaggcccacgtcatctagtcattggttgtgaaatccccgttctacccctcccgtctctgatctcgataggggagccgggggagcgcgacgacggggagaaaaaacagaggaggaaaaaaacacccaaaaaaccaccttcttttcctgcgttcccctgctcgatccccgacgagaattcgctcccgaacccatcgatctgctctccgcagtccgccgatccgtggatcgatccgtgcgcgggctcggtccgccccgggttccgatctggtcgccgcctcgcctgaggagatgaacggcgccgggggcagccaccaccagcagcagcagaggctccggcagcagcagcagcaggcgctcctgatgcagcaggcgctgcagcagcagcagcagcagcagtaccagtccggcgtcctcgccgccgcggcggcggcggccatgacccaggtatgttggaaatgtgaaccctaatgtcacggagagccttttgattgaagttttccagagtgctggccttgtggaaagatgcaagctcatacggaaagagaagtcttcctttgggtttgtggactactatgatcgaagatctgctgctctagcaatcatgacccttcatggccgtcacgtatatggacaagcaatcaaggtgaactgggcatatgcaagtacgcagagggaggatacgtcagggcatttccatatttttgttggtgatttaagttctgaagtgaatgatgcaactctttatgcctgtttctcagcatatccttcttgttcgatgctcgagtcatgtgggacaacaaaactggacgctccaggggttatggttttgtctccttccgtaatcaacaggaagctgaaactgctataactgaaatgactggaaaatggcttggaagcagacaaataaggtgcaactgggcaacaaagaacaattcggaagagaaaccagaaactgacaatcataacgcagtcgtactaacaaatggtagctccaacaattcagcaacggatgcaagccaggacgcaggaagtaaagagcccccacagaacaatcctgattgtactactgtatatgttggcaacctcggccatgaggttaaccgggatgagcttcaccgccacttctataacttgggggtcggggcgatcgaggaggtccgtgttcagcaggacaaagggtttggattcgtgagatatagcacccacggggaagcagcactcgctattcagatgtccaatgggtcggtagtccgcgggaaaccaatcaagtgctcatggggtgtcaaaccaactccaccggggacaggctccaagcccctaccccctccagccgcaacgtaccagcccgctgtggcaatgccaggcgtcccgcaaggtttcacgacagcagaactccttgcctaccagaggcagcttgccctgagccaggccgcggccgggcagcagcatgctggtcttgcgggccaggtttctgcagcaggccttcttgctgctgccggttcccaggccctctacgacggctacccgaatcaatcgtcagcgcagcagcttatgtactacaactagtagagctcaagaggaaggaaggcgtctgtagtgttcagcttgtttttgcgcaaacttgggtcatcctcgccctgtttttttttctttattattttgtggttcatgtactatttgtgtgagagctcttgttctctcttctcagccgcgggattgtgttacttactgtcttcttactgtaccattttccttgtctaattctgttgagtaagaggtgtattctatgtgactttgcgattgattaatgtaatgctcccctggggatcggctttggtcgctgggctggttcatgatccggtgttcgggtccgattggacattgaaaggaggtttactggttcatgatctggtggtgt

SEQ ID NO: 3380 - DNA, 2240 bp, Zea Mays
atccaagttccaagcggccccaaacctgagcgagcagttttcaggcaggaatgaccccggtctcacatgtcagtgagtcacaacagccagatggaaaggcccacgtcatctagtcattggttgtgaaatccccgttctacccctcccgtctctgatctcgataggggagccgggggagcgcgacgacggggagaaaaaacagaggaggaaaaaaacacccaaaaaaccaccttcttttcctgcgttcccctgctcgatccccgacgagaattcgctcccgaacccatcgatctgctctccgcagtccgccgatccgtggatcgatccgtgcgcgggctcggtccgccccgggttccgatctggtcgccgcctcgcctgaggagatgaacggcgccgggggcagccaccaccagcagcagcagaggctccggcagcagcagcagcaggcgctcctgatgcagcaggcgctgcagcagcagcagcagcagcagtaccagtccggcgtcctcgccgccgcggcggcggcggccatgacccaggtatgttggaaatgtgaaccctaatgtcacggagagccttttgattgaagttttccagagtgctggccttgtggaaagatgcaagctcatacggaaagagaagtcttcctttgggtttgtggactactatgatcgaagatctgctgctctagcaatcatgacccttcatggccgtcacgtatatggacaagcaatcaaggtgaactgggcatatgcaagtacgcagagggaggatacgtcagggcatttccatatttttgttggtgatttaagttctgaagtgaatgatgcaactctttatgcctgtttctcagcatatccttcttgttcgtaagtcctttttgtatcatgatggcatctatgacgagcttaacctgcagcctatgctttcacatgctgacttttaattcaaaattcgcaatatgctatttcaattctatctatttcttgtgctattgaatgacagagtttggacactatgacttctcacttagcttctaccattttttgtttgtctgtagctttttatattttcatttgtattatttatatgcagtgatgctcgagtcatgtgggacaacaaaactggacgctccaggggttatggttttgtctccttccgtaatcaacaggaagctgaaactgctataactgaaatgactggaaaatggcttggaagcagacaaataaggtgcaactgggcaacaaagaacaattcggaagagaaaccagaaactgacaatcataacgcagtcgtactaacaaatggtagctccaacaattcagcaacggatgcaagccaggacgcaggaagtaaagagcccccacagaacaatcctgattgtactactgtatatgttggcaacctcggccatgaggttaaccgggatgagcttcaccgccacttctataacttgggggtcggggcgatcgaggaggtccgtgttcagcaggacaaagggtttggattcgtgagatatagcacccacggggaagcagcactcgctattcagatgtccaatgggtcggtagtccgcgggaaaccaatcaagtgctcatggggtgtcaaaccaactccaccggggacaggctccaagcccctaccccctccagccgcaacgtaccagcccgctgtggcaatgccaggcgtcccgcaaggtttcacgacagcagaactccttgcctaccagaggcagcttgccctgagccaggccgcggccgggcagcagcatgctggtcttgcgggccaggtttctgcagcaggccttcttgctgctgccggttcccaggccctctacgacggctacccgaatcaatcgtcagcgcagcagcttatgtactacaactagtagagctcaagaggaaggaaggcgtctgtagtgttcagcttgtttttgcgcaaacttgggtcatcctcgccctgtttttttttctttattattttgtggttcatgtactatttgtgtgagagctcttgttctctcttctcagccgcgggattgtgttacttactgtcttcttactgtaccattttccttgtctaattctgttgagtaagaggtgtattctatgtgactttgcgattgattaatgtaatgctcccctggggatcggctttggtcgctgggctggttcatgatccggtgttcgggtccgattggacattgaaaggaggtttactggttcatgatctggtggtgt

SEQ ID NO: 3381 - DNA, 2446 bp, Zea Mays
atccaagttccaagcggccccaaacctgagcgagcagttttcaggcaggaatgaccccggtctcacatgtcagtgagtcacaacagccagatggaaaggcccacgtcatctagtcattggttgtgaaatccccgttctacccctcccgtctctgatctcgataggggagccgggggagcgcgacgacggggagaaaaaacagaggaggaaaaaaacacccaaaaaaccaccttcttttcctgcgttcccctgctcgatccccgacgagaattcgctcccgaacccatcgatctgctctccgcagtccgccgatccgtggatcgatccgtgcgcgggctcggtccgccccgggttccgatctggtcgccgcctcgcctgaggagatgaacggcgccgggggcagccaccaccagcagcagcagaggctccggcagcagcagcagcaggcgctcctgatgcagcaggcgctgcagcagcagcagcagcagcagtaccagtccggcgtcctcgccgccgcggcggcggcggccatgacccagatggaacctgtttccaatggcaaccttccacctgggtttgatccttccacttgtcgcagtgtgtgagtgctttcggtgttcttctctgttttcactttcttatttgattgatagcttatttttcccttttctcttttcatctgtgcaacaatggttttcttttttaaaaacctggagttttaaaaggtaacaaaaaccaaatttaggtatgttggaaatgtgaaccctaatgtcacggagagccttttgattgaagttttccagagtgctggccttgtggaaagatgcaagctcatacggaaagagaagtcttcctttgggtttgtggactactatgatcgaagatctgctgctctagcaatcatgacccttcatggccgtcacgtatatggacaagcaatcaaggtgaactgggcatatgcaagtacgcagagggaggatacgtcagggcatttccatatttttgttggtgatttaagttctgaagtgaatgatgcaactctttatgcctgtttctcagcatatccttcttgttcgtaagtcctttttgtatcatgatggcatctatgacgagcttaacctgcagcctatgctttcacatgctgacttttaattcaaaattcgcaatatgctatttcaattctatctatttcttgtgctattgaatgacagagtttggacactatgacttctcacttagcttctaccattttttgtttgtctgtagctttttatattttcatttgtattatttatatgcagtgatgctcgagtcatgtgggacaacaaaactggacgctccaggggttatggttttgtctccttccgtaatcaacaggaagctgaaactgctataactgaaatgactggaaaatggcttggaagcagacaaataaggtgcaactgggcaacaaagaacaattcggaagagaaaccagaaactgacaatcataacgcagtcgtactaacaaatggtagctccaacaattcagcaacggatgcaagccaggacgcaggaagtaaagagcccccacagaacaatcctgattgtactactgtatatgttggcaacctcggccatgaggttaaccgggatgagcttcaccgccacttctataacttgggggtcggggcgatcgaggaggtccgtgttcagcaggacaaagggtttggattcgtgagatatagcacccacggggaagcagcactcgctattcagatgtccaatgggtcggtagtccgcgggaaaccaatcaagtgctcatggggtgtcaaaccaactccaccggggacaggctccaagcccctaccccctccagccgcaacgtaccagcccgctgtggcaatgccaggcgtcccgcaaggtttcacgacagcagaactccttgcctaccagaggcagcttgccctgagccaggccgcggccgggcagcagcatgctggtcttgcgggccaggtttctgcagcaggccttcttgctgctgccggttcccaggccctctacgacggctacccgaatcaatcgtcagcgcagcagcttatgtactacaactagtagagctcaagaggaaggaaggcgtctgtagtgttcagcttgtttttgcgcaaacttgggtcatcctcgccctgtttttttttctttattattttgtggttcatgtactatttgtgtgagagctcttgttctctcttctcagccgcgggattgtgttacttactgtcttcttactgtaccattttccttgtctaattctgttgagtaagaggtgtattctatgtgactttgcgattgattaatgtaatgctcccctggggatcggctttggtcgctgggctggttcatgatccggtgttcgggtccgattggacattgaaaggaggtttactggttcatgatctggtggtgt

SEQ ID NO: 3382 - DNA, 1585 bp, Zea Mays
ttttcttttgtgccccctttcgtgtctttgcttgcttggcaccgctagatggaacctgtttccaatggcaaccttccacctgggtttgatccttccacttgtcgcagtgtgtatgttggaaatgtgaaccctaatgtcacggagagccttttgattgaagttttccagagtgctggccttgtggaaagatgcaagctcatacggaaagagaagtcttcctttgggtttgtggactactatgatcgaagatctgctgctctagcaatcatgacccttcatggccgtcacgtatatggacaagcaatcaaggtgaactgggcatatgcaagtacgcagagggaggatacgtcagggcatttccatatttttgttggtgatttaagttctgaagtgaatgatgcaactctttatgcctgtttctcagcatatccttcttgttctgatgctcgagtcatgtgggacaacaaaactggacgctccaggggttatggttttgtctccttccgtaatcaacaggaagctgaaactgctataactgaaatgactggaaaatggcttggaagcagacaaataaggtgcaactgggcaacaaagaacaattcggaagagaaaccagaaactgacaatcataacgcagtcgtactaacaaatggtagctccaacaattcagcaacggatgcaagccaggacgcaggaagtaaagagcccccacagaacaatcctgattgtactactgtatatgttggcaacctcggccatgaggttaaccgggatgagcttcaccgccacttctataacttgggggtcggggcgatcgaggaggtccgtgttcagcaggacaaagggtttggattcgtgagatatagcacccacggggaagcagcactcgctattcagatgtccaatgggtcggtagtccgcgggaaaccaatcaagtgctcatggggtgtcaaaccaactccaccggggacaggctccaagcccctaccccctccagccgcaacgtaccagcccgctgtggcaatgccaggcgtcccgcaaggtttcacgacagcagaactccttgcctaccagaggcagcttgccctgagccaggccgcggccgggcagcagcatgctggtcttgcgggccaggtttctgcagcaggccttcttgctgctgccggttcccaggccctctacgacggctacccgaatcaatcgtcagcgcagcagcttatgtactacaactagtagagctcaagaggaaggaaggcgtctgtagtgttcagcttgtttttgcgcaaacttgggtcatcctcgccctgtttttttttctttattattttgtggttcatgtactatttgtgtgagagctcttgttctctcttctcagccgcgggattgtgttacttactgtcttcttactgtaccattttccttgtctaattctgttgagtaagaggtgtattctatgtgactttgcgattgattaatgtaatgctcccctggggatcggctttggtcgctgggctggttcatgatccggtgttcgggtccgattggacattgaaaggaggtttactggttcatgatctggtggtgt

SEQ ID NO: 3383 - DNA, 421 bp, Zea Mays
ttctttatttattttttctgttgtgtttgtatttgttctaattttagacccttcttaattcaatgatacgcagctctcctgcgtgttcgaaaaaaaacatactacacaaagcacaaatgttgcaacactccagatctctttcaaaagttaaacactaataatctgtagcaattgcttttggaaagcaattttgttgtacagtttttacttttcacataggtttactaattataatagctgttatagtagaatgtaaaactagacaatttgatacaacaaattcagtggcttcataataaggtaaccatcacacaagtatattgaaaaatgaaaagttaggccctgtttggaacctctagagctaattgttagctgggttaagccagctaatctgctaatgaactaattgttggctgtgagt

SEQ ID NO: 3384 - DNA, 552 bp, Zea Mays
cgacacaggtcaaccggggaagtgacgcaacagggagaaagagagaagggaaaggcgcgaccttgcggcctccgagcaagccggccggcagcccaaaaccctaggcgggcgagcaagtccaccagcaggcctcgtcctcctccgccggagctaggcccgcgacaaagccccccactttctcgggagccggagcctccaaccgcgtcgggcgtcggccttatccacacctttgggaaacacttcttcactcgggaagcttttccttcgctcccacctctcttccacctctcccccgcggacgtttttccctttttcttttggcgaatggcgactcggtggagaagacgatggcgacggacggttgaatgggtgcgtgcggccgtaccgatcgggtggtggtttctaaaaccctcggcctcggaccgccctgctgcctgctgctgggctgtgggcgaccgccgcggcgtgctttggggttcgtgccgggtggcgatgtgcggcggggatggaggcgaggcggcgtcgctctgccgttctgcgtgcggggaccta

SEQ ID NO: 3385 - DNA, 1987 bp, Zea Mays
gcgcgagtctccgaacgacaaacacgagcgcgggcgcgcacaagttcgccaacccccacgccccaccccccaccccccgcgtgctgcgcgtcgttggaaccaaggattggattagcctcgccgaggaggaggtggtggtcggcgaggggctcgcggggatggggatctcgaggccccttgtgatggcgatggcggtggcgctgctgatcgccgtcgccggtgcgaccgccgaggagcaggagcccctgctggcggcggacgcggtggccggcgcggtggaggcggcgctcggggaggtggagaccgcggcgctcagggccgagctggggcaactccgggcgaagatctcggcgctagagtcagacatagaagagcgatctcaagaactgaagaataaggatgatgccatcatgaacctggagaaagccattgaagagaagtcaaaggctattacctctatgctggacgagattgcttccctccagggtctgtagctgccgaggagcaggctaacaaggccaatgccaaggttgttgagcttgagaagcaggttgacaagatcaaaaaggatattgaagcacaaagcagccagaaagcagcactagagtatagggccaacgatgcagagaagaaggtggaagtactgaatgaaaagcttaatacaatccaaaaggaaagtgatgagaaaaaacgcaaaatcaagaagacagaacgtgctcttaaagtcgctgaggaggaattaatgaggttgcagttagaagtaactgctaaatcaaaacagctgtcagaggttcatggagcatggttaccaccttggctaatggcacaatatgcttgttatgcggaggttgtctcaggtcactgggatcaacatgggaaacctgctgtgcagaattttttgcataaggcatcagaaaaatcagcacaggcaaagaaatgggctgaacctcatatcgagactgctaagatgaaatggattcctgttaagcagaaattggttgccctcaagaaaaatgcagaaccttatgtacaaaaggtatcaacaagatcagtagagttttacgagtcatcaagggatgctgtgacacctcatgctgtcaaagttaaagtgtttgttcattcctactaccagaaagccaagaagttttctaagccttacattgatcaaattgctgagattactaaaccacatgttgagaaaattagaactactctgaagccatacactaagagagcagttcatgcatatgggtcatttctcaagtcggcaaccacataccatcgacaggctcaagcaagcatcatggactaccttcaccagcatgatataacaaaatcattggcaactaaggagttagtttggttcctggcttctgctttgctggctctgcctgtcttcattatatacaggcttctagtagggaccttctgctccaaaaagaataaaaggcctcgtagtagtaatggtaaccatggccacaagagatacaagcggcgacatgctgacaagtagatcagtttactgaacactttagggttcagtatgctgtgtaccgtggcagatctttgagcaggattgggtcatgggcacccttaccttgaaagcattgtacaccaccaacatactcttctcttttgcattttcgtcccaggtgtaatatggacttcagtgcagcagaccttttatctgcactttgctgggttcatgtggttatgcctcggcctttgtttgattggtcatttgtttattgtaacttgtgaatgcgtttgaatttgtatgcttgttcttgtcggcgacctacattcgaacttaatacttatgtatacagtggttggtttagctaataactggatgtctcctgttcacttcgttcatgtatggcttggtcgacaccatgatctggtagaatggtggctgactcagctgctgaagtgttacgaacaggattacaggaaaaagagagtgtctataaattgctagccatcc

SEQ ID NO: 3386 - DNA, 3638 bp, Zea Mays
tgtgctagtgtgcagcgatggagatggcctaggctggcgtggtgggccggtggcccagttcttgccatcaacgccgccgcaatctcatactgctccttctctaactccggcggcggagcccatcgcggttgcctccaccaccagtccacggctgtcaccgccgcactcctccacacagacaccttctagagtctaggttccccaggccccacttgccagggtctatcttatgatcttatcccctcctgttatctctgctttccccctttctctcttccgaaccgtcccattcccgcgctctcggcttctcgcccgcctgcccctccgcctgtcagcgcgccggtcgtctcgcctgcaggagagttcgaactctgctccttccagccaccgtaaccatggcgacgcctccgctctactccgtttccactcaccaccgcgccccaccaccatggccgcctcccaaggctgccactagtccgcgaataacctttcggtgtagcgtgctggcggcaccggctggccgagtcctggaggcgcccaccgctgctccaagctcatggagcaccaagaatccgccaagtcgggccctgagttccgacgtgaacctgcgaatccagcgcctctgtcaggcgggtgacctcgcgggcgctctgaggctgctgggctctgacggcggcgtcgacgtgcggagctactgcatggtcgttcagctctgcggggaggagcggtcgttggaggctgccaagagagcgcatgccttaattcgcgcgtccagtgccgctgcaacgggtggaaaagggagcgtccttgggaagaggttagtgctggcgtacctgaaatgcggcgacctgggcgaggcaaggacggtgttcgatggaatgcctcctcaagctgctgatgtccgtgtctggacttcgctgatgagcgcgtacgccaaggcgggtgatttccaggaagctgtctccctgtttaggcagatgcagtgctgcggggtcagtccggatgcacatgctgtttcctgtgtcctcaagtgcgtttccagtttgggcagccttacggaaggcgaggtgattcatggattacttgagaagttgggtctcggtcaagcatgcgcggttgcaaatgctctgattgccgtgtactcgaggtgtggacggatggaggatgcggcacgggtatttgacagtatgcatccccgggatgccatctcttggaattctatgattggtggatgcttttcaaacggatggcatggtacagctgttgatcttttcagcaaaatgtggtctcaaggtacggagatcagttcagtgacagtgctcagtgttctgcctgcttgtgcgggattaggttatggccttattggaaaagcggtgcatggatactccgtgaaatccggattgctttggggccttgattctgtacaaagtgggatagatgatgctgctcttggatccaaactggtattcatgtatgtgaaatgtggggacatggcctctgcaagaagggtgtttgatgcgatgtcatcgaaagggatggcttggtggctcatggatatatagtaaaattgggtttcggggcacagtgtgcagtttgcaatgcactgatatcattctatgcaaagtccaacatgattggcgatgcagtcttggtgttcaatagaatgcctcgtcaagataccatttcttggaattctgtgattagtggatgctcttccaatggactaaacagtgaagctattgagttgttcataagaatgtggacacaaggacaggagctggactcagttacgttgctaagtgttttgccagcttgtgcacagtcacgctattggtttgcaggaagggtggttcatggttactcggttaaaactggattgattggggaaacatctcttgcaaatgctcttcttgatatgtactcaaattgctcagattggcagagcactaatcagatattcagaagcatgggtcaaaaaaatgtggtgtcctggacagcaatgatcacgagttatatgagggcaggactgtttgacaaagtggctgggttacttcaagagatggtactagatggtatcagacctgatgtctttgcagtcacaagtgcccttcacgcttttgctggtgacgaatctctgaaacaaggcaaatctgtccatggttacacctccagaaataattttcccaatgaatccttcagtttgttcagtgacatgttgctccaattcagacccaatgcagtgaccatgacttgcatccttcctgctgctgcaagcatttcatccttggagcgaggaagggagatacatgcttatgcacttcgaagaggatttctggaagatagttatgcatccaatgcgcttgtggacatgtatgttaaatgtggtgcgttactggtagctcgagttttgtttgaccggttgactaagaagaacctcatatcatggaccattatgattgctggatatggcatgcatggttttgggaaacatgccatcgccctctttgagcaaatgagaggcagtggtattgagccagatgcggcctctttcagtgccatattgtatgcttgctgccattctggtcttgctgctgagggacggagattcttcaaggctatgcaaaaggaatacaaaatagagcccaagttgaagcactacacctgcattgttgacctgcttagccgtaccggcgacctgaaggaggctcttgagttcatcgagtcaatgccgattgaacctgattcaagcatttgggtatcattgcttcacggatgtagaattcacaagaacgtcaagcttgcggagaaggtagcagacaaggtctttaagctggaacctgagaacacagggtactatgttcttcttgccaacatctatgctgaggctgagagatgggaggctgtcaagaagctcaagaacaagattggtggtcgagggctccgtgagaacactggctacagttggatcgaggtcagaagcaaggttcatgtctttattgcagataaccggaatcacccagactggaacaggattgcagagtttctggatgatgttgccagaaggatgcggcaagaaggccatgatcctaagaaaaagtatgctctgatgggtgccgatgatgcagtgcatgacgaggcactatgtgggcacagctcaaagctcgccgtcgcattcggtgtgctgaatttaccggagggacggccaattcgtgtgacaaaaaactcaaaagtctgcagccactgccatgaggctgccaagttcatatcgaagatgtgcaacagagagatcattctgagagattcaagcagattccatcgttttgaaggaggcaggtgttcttgcagagggtacctctgaaagaaacaccagtcatgtgcctgtggttttgtttgttcattagcagagagcacatttattgctactagcagttctagcaccaccatatagcctgcatctgtagtgatttttctttataacattaggagggaagagacctttagaaggtaacaggtgtgtgtgttcaggaaacagaagctactgtccatagaaatgtgaagattttatatatgtatgaaggcattttggcatcttttactaaaaatattgttacaaacattttagttgcaattaggggcgg

SEQ ID NO: 3387 - DNA, 1259 bp, Zea Mays
acatcccgtcgcgtcgcgtcgcggattacggaggaaccctctaggctccggttccggaaacagcgggcgccattcccgggcgaggaggccggcccagatccgagtacggcggcggcggctgcggcggcgagatgactggtggcggcccggccgcggcgtcgcaggcgtacggcgaggcatggtactgggacgagcgctaccgcaaggaggccgggcccttcgactggtaccagaagtacccggccctggcgccgctgctccgcctctacctcgcgccgcaccaacgcctcctcctcgttggctgcggcaactccgtctttggtgagaacatgattgacgatggttatcaagatgttgtcaacattgatatatcttctgtggtaattgagcaaatgaagaagaaataccacgataagcctcaacttaaatatggatgtaaagaacatgtcagattttgagtctggttcttttgatgctgttattgacaaaggaacactggattctcttatgtgtggtcaaaattcccaagagaatgcaacgaaaatgctagaggaggtcaacagaatcctcaaggaaaatggtgtctacatgctgatcacttatggggatccaagttaccgcttgcgtctcttgaaggacatggaaaaatggacagtaaagctccatgtcatagaaagatgggagaaaagttcgaatcagaacaaatgggaactgacaaagccattgcctctagaggaccatagcacatcactagctgcacttcttggccccaaacctgatgtccactacatctatgtctgtgtaaagggcaacggtggcgcaagtgtggattctaaagctggagaagctgccaattgatttctcctataaccctctgaactgacgtgcgtaaccggtgtagcaaataatgtagagaaatagaacagatgttgtacctcgaattgatcgttgttgttttattggataataaccagcgtgtgaattgtagaacagatatcgcacctcaatttgcagttgtttcattgaataaccagtgtgtgaataatgtagaacagatgttgtaccgcttgtttcagtgtttcatgaattcgattgaccctgtcagtgatcctgtgcttgtaccggatgttctagatcaactgagttagatgtttgcatgattgcatcattgcatggtacttgggattaggctatcagctgtgtaggttacttatatccttatatactattatattattatatattactatttgtagttt

SEQ ID NO: 3388 - DNA, 1357 bp, Zea Mays
acatcccgtcgcgtcgcgtcgcggattacggaggaaccctctaggctccggttccggaaacagcgggcgccattcccgggcgaggaggccggcccagatccgagtacggcggcggcggctgcggcggcgagatgactggtggcggcccggccgcggcgtcgcaggcgtacggcgaggcatggtactgggacgagcgctaccgcaaggaggccgggcccttcgactggtaccagaagtacccggccctggcgccgctgctccgcctctacctcgcgccgcaccaacgcctcctcctcgttggctgcggcaactccgtctttggtgagaacatgattgacgatggttatcaagatgttgtcaacattgatatatcttctgtggtaattgagcaaatgaagaagaaataccacgataagcctcaacttaaatacatgaagatggatgtaaagaacatgtcagattttgagtctggttcttttgatgctgttattgacaaaggaacactggattctcttatgtgtggtcaaaattcccaagagaatgcaacgaaaatgctagaggaggtcaacagaatcctcaaggaaaatggtgtctacatgctgatcacttatggggatccaagttaccgcttgcgtctcttgaaggacatggaaaaatggacagtaaagctccatgtcataggttagttagttactcaccatcaggccaattcaactgcaccttccggtatttgcagagctccaatcacattgaccttttctcatatccaaaaaagatgggagaaaagttcgaatcagaacaaatgggaactgacaaagccattgcctctagaggaccatagcacatcactagctgcacttcttggccccaaacctgatgtccactacatctatgtctgtgtaaagggcaacggtggcgcaagtgtggattctaaagctggagaagctgccaattgatttctcctataaccctctgaactgacgtgcgtaaccggtgtagcaaataatgtagagaaatagaacagatgttgtacctcgaattgatcgttgttgttttattggataataaccagcgtgtgaattgtagaacagatatcgcacctcaatttgcagttgtttcattgaataaccagtgtgtgaataatgtagaacagatgttgtaccgcttgtttcagtgtttcatgaattcgattgaccctgtcagtgatcctgtgcttgtaccggatgttctagatcaactgagttagatgtttgcatgattgcatcattgcatggtacttgggattaggctatcagctgtgtaggttacttatatccttatatactattatattattatatattactatttgtagttt

SEQ ID NO: 3389 - DNA, 1282 bp, Zea Mays
ctttctgccccgacacgccctccaaaaatccgcaagccagaacccaacccccctttccccgtccaacgtcctctagccgcctcgccgaactctctctcacacacacacagtctctctgctccacgctcgccgcttttccgctccacccctcctctctttctccctccctctctttctctctcctgccccaaccaaccaatggaggctctcgcgggcgccgcatcctcctccgttctccccgcgcgccacccgccctcccgcgtggccgcgcagtccctcgcgctccgccctagccgctgcggtcccctccgcgcggttagcgccggcggtgtcagtggcaaggacgacgcccacgccgccaacgggtctcccgtcctcaagacccaattttttcgctgtcacccttggcaatccatacgaggaacttactcgctgacccaagatgcacgcttgttgtccaggtgcctggatggagtggactgtcgaacgcgcgagtcaccatatttggtgatgtttaccctttgccagctgaacaacaggaatgggcacataagcaatatgtagcaaaacatcagcagtgggcatcacagcagtggggaaacttttactattacaggatgcacaacataagtgacatatacttcatcgggggcttcggaactgtcgcatggatagatgttaaggagtatgaaacgattcaacctgacaagatagcagttgatggtggtgacttgcaaagtttaaaggagttgaacgctattttctctaaaccacttcgggaggtcctatcatcagaaggggaggttgatgatgctgcgcttatatcagtagatagcaaagggatagatatacgggttcgacagggtgcacagttcaatattcagaggctagcatttgatgtccctcataaggttgagactctggaggaagccaagaaagcactccacaagataatcaaagacaagcagcaaataaagtgaagttgcaggagctggctctacccatttttctggtggtgtaaggtttcattgcaaccggaccaaggattacgtaatggtagcaggtagcatgatacaagtgaaaacgatggctgtttttttaaataatgagagtctcgctctccagctgtggtgaagattgtatatatgctcgtgttgccttattaataattattattgtgcggttgcttcttgaggaaatcggaccttcttgttctctatttccggcttctggctggctacctgggtaccagcatctttttttaaagataatttccctgatt

SEQ ID NO: 3390 - DNA, 1546 bp, Zea Mays
ctttctgccccgacacgccctccaaaaatccgcaagccagaacccaacccccctttccccgtccaacgtcctctagccgcctcgccgaactctctctcacacacacacagtctctctgctccacgctcgccgcttttccgctccacccctcctctctttctccctccctctctttctctctcctgccccaaccaaccaatggaggctctcgcgggcgccgcatcctcctccgttctccccgcgcgccacccgccctcccgcgtggccgcgcagtccctcgcgctccgccctagccgctgcggtcccctccgcgcggttagcgccggcggtgtcagtggcaaggacgacgcccacgccgccaacgggtctcccgtcctcaagctgacaagtcacagaaggcttcatcaactaacgttagtactgactctagtggatctagagctggcctgtttagaacacccatatcaggtggtgtgcagagtgcaactttcgcccacggtctacctccgccggctttggctgttcgcaatttgatggaacaggcgcggtttgcccacctgtgctctgtcatgtctggcatgcaccaccgccgtactggatatccgtttggttcacttgtcgactttgctaacgattcaatgggccacccaattttttcgctgtcacccttggcaatccatacgaggaacttactcgctgacccaagatgcacgcttgttgtccaggtgcctggatggagtggactgtcgaacgcgcgagtcaccatatttggtgatgtttaccctttgccagctgaacaacaggaatgggcacataagcaatatgtagcaaaacatcagcagtgggcatcacagcagtggggaaacttttactattacaggatgcacaacataagtgacatatacttcatcgggggcttcggaactgtcgcatggatagatgttaaggagtatgaaacgattcaacctgacaagatagcagttgatggtggtgacttgcaaagtttaaaggagttgaacgctattttctctaaaccacttcgggaggtcctatcatcagaaggggaggttgatgatgctgcgcttatatcagtagatagcaaagggatagatatacgggttcgacagggtgcacagttcaatattcagaggctagcatttgatgtccctcataaggttgagactctggaggaagccaagaaagcactccacaagataatcaaagacaagcagcaaataaagtgaagttgcaggagctggctctacccatttttctggtggtgtaaggtttcattgcaaccggaccaaggattacgtaatggtagcaggtagcatgatacaagtgaaaacgatggctgtttttttaaataatgagagtctcgctctccagctgtggtgaagattgtatatatgctcgtgttgccttattaataattattattgtgcggttgcttcttgaggaaatcggaccttcttgttctctatttccggcttctggctggctacctgggtaccagcatctttttttaaagataatttccctgatt

SEQ ID NO: 3391 - DNA, 2705 bp, Zea Mays
ctccctccatagtccaatcgcacgtctcccggaccccggcgcttcgtttccgtccgattgatttctcccccatcccaaatcccagccctacccgacacgttccgagacgagagatccttccataccgaggcgggcgcgcggcagactgtagggtgccctagcaaggatctcgccggccccccagccatggccgaggccgccgacgcgtcgcctcctcctcccaccgtcggccgcggagaccgcaagcggggccgagcctcgccagtgctcccgccgccgccgcccgggcccccgccacccggcccgcacaagaagcgtagggaggagggcggtggcggcttcgaccggcgccggctcggcccagtcggcggcggagggcacgaacaggacgacaggaggcaggttttaattctacacatgggttttctgtttcaattttggaactctaggcagtgctataactatgagcagaaaggatggagattctgtgacgagttttcttaaaacagtccccaatttttcttgcacatcttttgagcactgtgtcagttttttgaagtttctgtgatttgtttcctaggtatggaaatggtcttggtggtgtaggaggaagaggtggtgatggtcaatatacgaatcgtgcaccagattggtcggattctggacgtggtggatggaatgagggtcctgggaacagtcgtagggaaggattgatgtcatacaagcaattcattcaggaacttgaagatgacgtttcaccagttgaagctcaaagcagatacgaggggtacaagtcagaatacatcacaactcagaagaaagcatactttgacctccataagaatgaagattggttaagaaataagtatcatcctttgatatatcttcctattttcttcaataactttttaattttgcatctttttcttgtaggttaagaaataagtaccatcctacaaaccttgaaaatgtcattgaaagaaggaatgaactggcaagaactactgcaaatgatttcttcctaaaattgcaaagtggagatctggacatcggtccaggtttgacgggttcggcagtgagcaaatcaggaaataatagcagtaaaaatctagatgctgtggaaggggatggtaaaaagggaaaacatggaaagggttctgatgattcatattatgctgcttccaaggctcacccagttagttccgaggttcgtcgaattcgaattgacattgagcaagctcaagttctcattcgtaaacttgattctgagaagggtattgaaaacaacgttctctcaagtagtgaccatgaaaagtcagacagggataagtcacatggttcagtggggccaattgttataatacaaggatcatctactgtgaagggtcttgagggtgctgagttgctggacactcttgttacttatttatggcgtatccatggtgtggattattatggtatgtctgagacaaatgaacctaaaggcctaaggcatgtgaaagctgatgcaaggacatataatggggctagctcaaatggtgctgaatgggagaataaacttgattcattctggcaagacagaattcaaggtcaggatccattagaaatgttgaaaggaaaggagaagattgatggagctgctactgaagtcttggatccatatgtgaggaaaataagggatgagaaatatgggtggaaatatggatgtggagccaagggctgcacgaaacttttccatgccgctgagtttgtccagaagcatcttaaactgaagcatgcagacttggtggttgatctaacttcaaaagtgagagaggatatttactttgagaactatatgaatgacccaaaggcgcctggtggtacacctatcatgcagcaacctgctccaaggggaaaaggcagacaaaggccaccaatagagagtcggctgagggatgagcgtgggaatcataggttcgacaggaatgttgattcaccaaaacgtgatgggtctggtgaaaatcccgatgatcctatttatgattcgtttggtgatccagctatgcatggtgccttccctccagatatccctgctcccccggttctaatgcctgtgcctggtgctggtccgctcggaccgtttattcccgcaccacccgaagttgccatgcatatgttgagagatcagggtgcgccgccacctattgagccaaccggaggtccacatcctaggaaagcagggacgggtggtggtccttcaatgcgtggcccatccccaatctttggcgctccttcccctcatcatatgcatgatcctcgcagaatacgaagctaccaagacctcgatgctccggaggacgaagtgactgtcatggactaccgaagcttgtagacttcctccagttcttgtgcatccagatacctttgtagtcaacatttttagcgcgagagaaaaacaccttgctctttctagaatcgccgcggaggaaaccccggcaggctttttgtgtcgcgaccactgagatgtcagcttctcagtgttttgtaaaacgaaacacaggaagtacattacaacttctccccattaaacaaggtgaaagatttccatcagtgttttgtttttttggtcagcccagcattgatgtacatgtacgtaccttggcaaatagggcgggggttcgtttgtcgctgcacatgcaaatggcaagtggagtcgactggtg

SEQ ID NO: 3392 - DNA, 2625 bp, Zea Mays
ctccctccatagtccaatcgcacgtctcccggaccccggcgcttcgtttccgtccgattgatttctcccccatcccaaatcccagccctacccgacacgttccgagacgagagatccttccataccgaggcgggcgcgcggcagactgtagggtgccctagcaaggatctcgccggccccccagccatggccgaggccgccgacgcgtcgcctcctcctcccaccgtcggccgcggagaccgcaagcggggccgagcctcgccagtgctcccgccgccgccgcccgggcccccgccacccggcccgcacaagaagcgtagggaggagggcggtggcggcttcgaccggcgccggctcggcccagtcggcggcggagggcacgaacaggacgacaggaggcaggttttaattctacacatgggttttctgtttcaattttggaactctaggcagtgctataactatgagcagaaaggatggagattctgtgacgagttttcttaaaacagtccccaatttttcttgcacatcttttgagcactgtgtcagttttttgaagtttctgtgatttgtttcctaggtatggaaatggtcttggtggtgtaggaggaagaggtggtgatggtcaatatacgaatcgtgcaccagattggtcggattctggacgtggtggatggaatgagggtcctgggaacagtcgtagggaaggattgatgtcatacaagcaattcattcaggaacttgaagatgacgtttcaccagttgaagctcaaagcagatacgaggggtacaagtcagaatacatcacaactcagaagaaagcatactttgacctccataagaatgaagattggttaagaaataagtaccatcctacaaaccttgaaaatgtcattgaaagaaggaatgaactggcaagaactactgcaaatgatttcttcctaaaattgcaaagtggagatctggacatcggtccaggtttgacgggttcggcagtgagcaaatcaggaaataatagcagtaaaaatctagatgctgtggaaggggatggtaaaaagggaaaacatggaaagggttctgatgattcatattatgctgcttccaaggctcacccagttagttccgaggttcgtcgaattcgaattgacattgagcaagctcaagttctcattcgtaaacttgattctgagaagggtattgaaaacaacgttctctcaagtagtgaccatgaaaagtcagacagggataagtcacatggttcagtggggccaattgttataatacaaggatcatctactgtgaagggtcttgagggtgctgagttgctggacactcttgttacttatttatggcgtatccatggtgtggattattatggtatgtctgagacaaatgaacctaaaggcctaaggcatgtgaaagctgatgcaaggacatataatggggctagctcaaatggtgctgaatgggagaataaacttgattcattctggcaagacagaattcaaggtcaggatccattagaaatgttgaaaggaaaggagaagattgatggagctgctactgaagtcttggatccatatgtgaggaaaataagggatgagaaatatgggtggaaatatggatgtggagccaagggctgcacgaaacttttccatgccgctgagtttgtccagaagcatcttaaactgaagcatgcagacttggtggttgatctaacttcaaaagtgagagaggatatttactttgagaactatatgaatgacccaaaggcgcctggtggtacacctatcatgcagcaacctgctccaaggggaaaaggcagacaaaggccaccaatagagagtcggctgagggatgagcgtgggaatcataggttcgacaggaatgttgattcaccaaaacgtgatgggtctggtgaaaatcccgatgatcctatttatgattcgtttggtgatccagctatgcatggtgccttccctccagatatccctgctcccccggttctaatgcctgtgcctggtgctggtccgctcggaccgtttattcccgcaccacccgaagttgccatgcatatgttgagagatcagggtgcgccgccacctattgagccaaccggaggtccacatcctaggaaagcagggacgggtggtggtccttcaatgcgtggcccatccccaatctttggcgctccttcccctcatcatatgcatgatcctcgcagaatacgaagctaccaagacctcgatgctccggaggacgaagtgactgtcatggactaccgaagcttgtagacttcctccagttcttgtgcatccagatacctttgtagtcaacatttttagcgcgagagaaaaacaccttgctctttctagaatcgccgcggaggaaaccccggcaggctttttgtgtcgcgaccactgagatgtcagcttctcagtgttttgtaaaacgaaacacaggaagtacattacaacttctccccattaaacaaggtgaaagatttccatcagtgttttgtttttttggtcagcccagcattgatgtacatgtacgtaccttggcaaatagggcgggggttcgtttgtcgctgcacatgcaaatggcaagtggagtcgactggtg

SEQ ID NO: 3393 - DNA, 2388 bp, Zea Mays
ctccctccatagtccaatcgcacgtctcccggaccccggcgcttcgtttccgtccgattgatttctcccccatcccaaatcccagccctacccgacacgttccgagacgagagatccttccataccgaggcgggcgcgcggcagactgtagggtgccctagcaaggatctcgccggccccccagccatggccgaggccgccgacgcgtcgcctcctcctcccaccgtcggccgcggagaccgcaagcggggccgagcctcgccagtgctcccgccgccgccgcccgggcccccgccacccggcccgcacaagaagcgtagggaggagggcggtggcggcttcgaccggcgccggctcggcccagtcggcggcggagggcacgaacaggacgacaggaggtatggaaatggtcttggtggtgtaggaggaagaggtggtgatggtcaatatacgaatcgtgcaccagggaaggattgatgtcatacaagcaattcattcaggaacttgaagatgacgtttcaccagttgaagctcaaagcagatacgaggggtacaagtcagaatacatcacaactcagaagaaagcatactttgacctccataagaatgaagattggttaagaaataagtaccatcctacaaaccttgaaaatgtcattgaaagaaggaatgaactggcaagaactactgcaaatgatttcttcctaaaattgcaaagtggagatctggacatcggtccaggtttgacgggttcggcagtgagcaaatcaggaaataatagcagtaaaaatctagatgctgtggaaggggatggtaaaaagggaaaacatggaaagggttctgatgattcatattatgctgcttccaaggctcacccagttagttccgaggttcgtcgaattcgaattgacattgagcaagctcaagttctcattcgtaaacttgattctgagaagggtattgaaaacaacgttctctcaagtagtgaccatgaaaagtcagacagggataagtcacatggttcagtggggccaattgttataatacaaggatcatctactgtgaagggtcttgagggtgctgagttgctggacactcttgttacttatttatggcgtatccatggtgtggattattatggtatgtctgagacaaatgaacctaaaggcctaaggcatgtgaaagctgatgcaaggacatataatggggctagctcaaatggtgctgaatgggagaataaacttgattcattctggcaagacagaattcaaggtcaggatccattagaaatgttgaaaggaaaggagaagattgatggagctgctactgaagtcttggatccatatgtgaggaaaataagggatgagaaatatgggtggaaatatggatgtggagccaagggctgcacgaaacttttccatgccgctgagtttgtccagaagcatcttaaactgaagcatgcagacttggtggttgatctaacttcaaaagtgagagaggatatttactttgagaactatatgaatgacccaaaggcgcctggtggtacacctatcatgcagcaacctgctccaaggggaaaaggcagacaaaggccaccaatagagagtcggctgagggatgagcgtgggaatcataggttcgacaggaatgttgattcaccaaaacgtgatgggtctggtgaaaatcccgatgatcctatttatgattcgtttggtgatccagctatgcatggtgccttccctccagatatccctgctcccccggttctaatgcctgtgcctggtgctggtccgctcggaccgtttattcccgcaccacccgaagttgccatgcatatgttgagagatcagggtgcgccgccacctattgagccaaccggaggtccacatcctaggaaagcagggacgggtggtggtccttcaatgcgtggcccatccccaatctttggcgctccttcccctcatcatatgcatgatcctcgcagaatacgaagctaccaagacctcgatgctccggaggacgaagtgactgtcatggactaccgaagcttgtagacttcctccagttcttgtgcatccagatacctttgtagtcaacatttttagcgcgagagaaaaacaccttgctctttctagaatcgccgcggaggaaaccccggcaggctttttgtgtcgcgaccactgagatgtcagcttctcagtgttttgtaaaacgaaacacaggaagtacattacaacttctccccattaaacaaggtgaaagatttccatcagtgttttgtttttttggtcagcccagcattgatgtacatgtacgtaccttggcaaatagggcgggggttcgtttgtcgctgcacatgcaaatggcaagtggagtcgactggtg

SEQ ID NO: 3394 - DNA, 6837 bp, Zea Mays
ctccctccatagtccaatcgcacgtctcccggaccccggcgcttcgtttccgtccgattgatttctcccccatcccaaatcccagccctacccgacacgttccgagacgagagatccttccataccgaggcgggcgcgcggcagactgtagggtgccctagcaaggatctcgccggccccccagccatggccgaggccgccgacgcgtcgcctcctcctcccaccgtcggccgcggagaccgcaagcggggccgagcctcgccagtgctcccgccgccgccgcccgggcccccgccacccggcccgcacaagaagcgtagggaggagggcggtggcggcttcgaccggcgccggctcggcccagtcggcggcggagggcacgaacaggacgacaggaggttttaattctacacatgggttttctgtttcaattttggaactctaggcagtgctataactatgagcagaaaggatggagattctgtgacgagttttcttaaaacagtccccaatttttcttgcacatcttttgagcactgtgtcagttttttgaagtttctgtgatttgtttcctaggtatggaaatggtcttggtggtgtaggaggaagaggtggtgatggtcaatatacgaatcgtgcaccagattggtcggattctggacgtggtggatggaatgagggtcctgggaacagtcgtagggaaggattgatgtcatacaagcaattcattcaggaacttgaagatgacgtttcaccagttgaagctcaaagcagatacgaggggtacaagtcagaatacatcacaactcagaagaaagcatactttgacctccataagaatgaagattggttaagaaataagtaccatcctacaaaccttgaaaatgtcattgaaagaaggaatgaactggcaagaactactgcaaatgatttcttcctaaaattgcaaagtggagatctggacatgtttgacgggttcggcagtgagcaaatcaggaaataatagcagtaaaaatctagatgctgtggaaggggatggtaaaaagggaaaacatggaaagggttctgatgattcatattatgctgcttccaaggctcacccagttagttccgaggttcgtcgaattcgaattgacattgagcaagctcaagttctcattcgtaaacttgattctgagaagggtattgaaaacaacgttctctcaagtagtgaccatgaaaagtcagacagggataagtcacatggttcagtggggccaattgttataatacaaggatcatctactgtgaagggtcttgagggtgctgagttgctggacactcttgttacttatttatggcgtatccatggtgtggattattatggtatgtctgagacaaatgaacctaaaggcctaaggcatgtgaaagctgatgcaaggacatataatggggctagctcaaatggtgctgaatgggagaataaacttgattcattctggcaagacagaattcaaggtcaggatccattagaaatgttgaaaggaaaggagaagattgatggagctgctactgaagtcttggatccatatgtgaggaaaataagggatgagaaatatgggtggaaatatggatgtggagccaagggctgcacgaaacttttccatgccgctgagtttgtccagaagcatcttaaactgaagcatgcagacttggtggttgatctaacttcaaaagtgagagaggatatttactttgagaactatatgaatgacccaaaggcgcctggtggtacacctatcatgcagcaacctgctccaaggggaaaaggcagacaaaggccaccaatagagagtcggctgagggatgagcgtgggaatcataggttcgacaggaatgttgattcaccaaaacgtgatgggtctggtgaaaatcccgatgatcctatttatgattcgtttggtgatccagctatgcatggtgccttccctccagatatccctgctcccccggttctaatgcctgtgcctggtgctggtccgctcggaccgtttattcccgcaccacccgaagttgccatgcatatgttgagagatcagggtgcgccgccacctattgagccaaccggaggtccacatcctaggaaagcagggacgggtggtggtccttcaatgcgtggcccatccccaatctttggcgctccttcccctcatcatatgcatgatcctcgcagaatacgaagctaccaagacctcgatgctccggaggacgaagtgactgtcatggactaccgaagcttgtagacttcctccagttcttgtgcatccagatacctttgtagtcaacatttttagcgcgagagaaaaacaccttgctctttctagaatcgccgcggaggaaaccccggcaggctttttgtgtcgcgaccactgagatgtcagcttctcagtgttttgtaaaacgaaacacaggaagtacattacaacttctccccattaaacaaggtgaaagatttccatcagtgttttgtttttttggtcagcccagcattgatgtacatgtacgtaccttggcaaatagggcgggggttcgtttgtcgctgcacatgcaaatggcaagtggagtcgactggtgtctgctctcgcagtttattatattctgtgcctgcctggagctgtttccgggaattcttcatttcttccccgtgaccgtgatcctgatccgtgggagctggcaagcatgctggtccagctcgtggacggaaactgtttggaaagctccagcccctggacctggacctggagcgctgagctggacgggtggaccccagatccggtccagtctgtctgtatctgctcacccaatctggacaacacgtggaaacacactgctgagtgctgactgcgatgtgcgatcgcatcgcatgcatgacccagcgacggtcgcgggggcctcaatcaacacggcgaacacgaaacccagcggatgacagatgcgccggaacgggcgtgccgcgccacgcttccttgctggccagcggcggcgagcagccggcggtggtcgctgtcggccacccaccgccggagccggagctctcgctctcgtgccccggcgtgcaagtaaatccgtgacccgtgagaaagggaggcgggcgagtactatgattgggcggcagggcgctgtacccgtactgagggaagacgagcaggagcatgtgtgcggtggtgtgtgaccgaagagcccgggtttccggcgaagtgagtggcacgcgacgtggaccggaccggagcgggatcctggacggatcgcaagctggacccacaagctgctcttgttcttaatgcttcacgacgttttagatatactcttgaccttaaaaaggaggaagagaaagagattataaggaggaagatccggtcccatgcgcaagttatacgggcagcatttcttttcaaagaagctgggcaaaaagatatcagagaagcttatactggtataaatcttgcaacggcctctcgcagttttccaattgaactggaaaagcttaacacattaaacagggaccatgacagtgttcttcttcaagaaattggaggagttaagggattgtcagatttgttgaagagtaatttagagaagggagttagtccaaatgaggatgaattattacaaaggaagaatgtatatggatcaaatacatatccacgcaagaagagaaaaaacatactgcgttttgtatttgaagcttgccaagatttaactcttgtcattctgatgatagctgctgccatatcactaacattgggtatgactacagagggtgttgatgaaggatggtatgatggcggaagtatctttttagccgtttttcttgtgatacttgttactgcaacaagtgattataggcaatctctacagtttcgacatctgaatgaggagaaacagaacatacaagtggaggttgttagaggtggtaaaagatttggagcttcaatctttgaccttgttgttggtgatgtagttcctctcaaaattggtgatcaagttcctgctgatggtgtcctgatatctggccattctcttgcaatagatgaatcaagtatgactggagagtcaaaagttgtccacaaggatcaaaaggcaccattcttgatgtctggttgcaaggttgcagatggctatggttctatgttggtaacaggggtgggtacaaatactgaatggggtcagttgatggctaacctttcagaagataatggtgaagaaacaccattacaggttcgcttgaatggtgttgcaacttttattggtttggtgggcttgtctgttgctggtgcagtacttgttgtgctttggataaggtattttactggacataccgaaaatcctgatgggacacctcaatttgttgctggaactactggtgtgaagcaaggatttatgggggcaattagaattttgactatcgctgtgaccattgtagttgttgctgtgcctgagggactcccattggcagtaacactgacgcttgcatattccatgaaaaagatgatgcgagacaaagctctggtgaggcggctctcgtcatgtgaaacaatgggatcagctactacaatatgcagtgataagacaggaacccttacattgaataagatgacagtcgtggaagcatattttgctggaacaaagttggatccatgtgatgatgttagccagatgtcagacagtgcagcgtcacttattattgaaggaattgcgcagaacacaacaggaactgtatttctgccagaggatgggggagcagctgaacttactggttcgcctactgaaaaggccattctttcttggggccttaagatagggatggatttcgacgatgtgaggacaaaatcttcagttattcatgtttttccatttaactcggagaagaaacgtggcgctgttgcagtacagttagatgatggtgttcacatccactggaaaggtgcagctgaaatagtgttatcatcttgcaaaagctggctttccgtcgatggctctgttcagtcaatgagtgctgagaagcacgatgaattcaagagatcaatcgaagacatgggagcgaattcattacgctgtgttgcttttgcatactgttcctttgacattgaaaagatcccaatggaagacataacaagctgggagttgcctgaggatgacctgactctgcttggcatcataggaataaaggacccctgtcgcccaggtgtaagggatgctgtacgcctgtgcactactgctggtgttaaggtgcgcatggttacaggagataatattgaaacagctaaagctatagctctggagtgtggaatactagatgcaaatagtgttatttcagagccagttgtaatcgagggaaaagtgttccgtgagatgtctgaaagtgcaagaggagaggccgccgacaagataattgtgatggggagatcctcgccaaatgataaacttttgcttgtccaagctttaaaacgaaaaggccatgttgtagctgttactggtgatggcacaaatgatgcccctgcattgcacgaggccgatataggtctttcaatgggcatttccgggacagaagttgctaaagaaagctctgacattataatcttggatgatgacttcacgtcagttgtcaaggttgttcgttggggacgatctgtctacgctaatatccagaaattcattcagttccagctcaccgtcaatgttgctgcacttgtcattaatgtggttgctgctgtgtcctctggtgatgtgcccctaaatgctgttgagcttctgtgggtgaacctcataatggacacacttggagctcttgcattagcaaccgagcctccaacagacaaccttatgaagagaaatcctgttggtcgaagggaacctcttgttacaaatatcatgtggagaaacttgtttgttcaggccctttaccaagtagcaattcttctgattttcgattttgatggagtaaggattctgcgtctgcagaatgaaagccgatctgatgctgagaagataacaaatactttcatcttcaacacatttgtattttgccagatcttcaatgagttcaatgcacgaaaacccgaggaaaagaatgtcttcaaaggggtcacgaagaatcacctgttcatgggaataatcggtataacgacagtatttcagatactgataattcagttcctggggaagttcttcaaaatagtgaggcttggttggagactatggttggtttcagttgctatcggccttgtgagttggcccctggcttatgtgggtaaatttattcctgtgcccgtaagacctcttccggactatttcaaaccccgctgttgttggaaaccgccgcgccgagacgaggaggaaggtgggcagagctaaagcgcaacgagtgggcagtgtaaataggcacgtgataaaaaaatggagataaattgcactggttgattccatggtagcagcatcctggggatgtacgcataagatggcaggtagtcggcctcgtcgttttcttctaggagaagcagtcggaagaaaagaagtactatacagaagccaaacttgtctacccctatccagctggtgtgtctgctatgcggcagcgaaacttgagtcattagattgtagcctgaatgaaagcagcgctagcttgcgatgtagcagtacctttttttccctggcgatatcatctgactgtaaatttgtaaatgctttcggactacgagttgttcttatttttcatccacctcttctctacggaacgtttttttctatataagaaaataaagtcaacagagcagttctaaaacgactgttttttttttc

SEQ ID NO: 3395 - DNA, 1805 bp, Zea Mays
cggccacccaccgccggagccggagctctcgctctcgtgccccggcgtgcaagtaaatccgtgacccgtgagaaagggaggcgggcgagtactatgattgggcggcagggcgctgtacccgtactgagggaagacgagcaggagcatgtgtgcggtggtgtgtgaccgaagagcccgggtttccggcgaagtgagtggcacgcgacgtggaccggaccggagcgggatcctggacggatcgcaagctggacccacaagctgctcttgttcttaatgcttcacgacgttttagatatactcttgaccttaaaaaggaggaagagaaagagattataaggaggaagatccggtcccatgcgcaagttatacgggcagcatttcttttcaaagaagctgggcaaaaagatatcagagttttccaattgaactggaaaagcttaacacattaaacagggaccatgacagtgttcttcttcaagaaattggaggagttaagggattgtcagatttgttgaagagtaatttagagaagggagttagtccaaatgaggatgaattattacaaaggaagaatgtatatggatcaaatacatatccacgcaagaagagaaaaaacatactgcgttttgtatttgaagcttgccaagatttaactcttgtcattctgatgatagctgctgccatatcactaacattgggtatgactacagagggtgttgatgaaggatggtatgatggcggaagtatctttttagccgtttttcttgtgatacttgttactgcaacaagtgattataggcaatctctacagtttcgacatctgaatgaggagaaacagaacatacaagtggaggttgttagaggtggtaaaagatttggagcttcaatctttgaccttgttgttggtgatgtagttcctctcaaaattggtgatcaagttcctgctgatggtgtcctgatatctggccattctcttgcaatagatgaatcaagtatgactggagagtcaaaagttgtccacaaggatcaaaaggcaccattcttgatgtctggttgcaaggttgcagatggctatggttctatgttggtaacaggggtgggtacaaatactgaatggggtcagttgatggctaacctttcagaagataatggtgaagaaacaccattacaggttattctctgtaaggatagtgcaaattctcgaatggacaattactgaaggctctctttggtttatgctttgaccctttttaggttcgcttgaatggtgttgcaacttttattggtttggtgggcttgtctgttgctggtgcagtacttgttgtgctttggataaggtattttactggacataccgaaaatcctgatgggacacctcaatttgttgctggaactactggtgtgaagcaaggatttatgggggcaattagaattttgactatcgctgtgaccattgtagttgttgctgtgcctgagggactcccattggcagtaacactgacgcttgcatattccatgaaaaagatgatgcgagacaaagctctggtgaggcggctctcgtcatgtgaaacaatgggatcagctactacaatatgcagtgataagacaggaacccttacattgaataagatgacagtcgtggaagcatattttgctggaacaaagttggatccatgtgatgatgttagccagatgtcagacagtgcagcgtcacttattattgaaggaattgcgcagaacacaacaggaactgtatttctgccagaggagacttgaactggtcatcctcctggaggcagtctaag

SEQ ID NO: 3396 - DNA, 3584 bp, Zea Mays
cttttgtcgcctgaccgatcgtctatacatcgtattgatatgtcatacaagctgctcttgttcttaatgcttcacgacgttttagatatactcttgaccttaaaaaggaggaagagaaagagattataaggaggaagatccggtcccatgcgcaagttatacgggcagcatttcttttcaaagaagctgggcaaaaagatatcagagaagcttatactggtataaatcttgcaacggcctctcgcagttttccaattgaactggaaaagcttaacacattaaacagggaccatgacagtgttcttcttcaagaaattggaggagttaagggattgtcagatttgttgaagagtaatttagagaagggagttagtccaaatgaggatgaattattacaaaggaagaatgtatatggatcaaatacatatccacgcaagaagagaaaaaacatactgcgttttgtatttgaagcttgccaagatttaactcttgtcattctgatgatagctgctgccatatcactaacattgggtatgactacagagggtgttgatgaaggatggtatgatggcggaagtatctttttagccgtttttcttgtgatacttgttactgcaacaagtgattataggcaatctctacagtttcgacatctgaatgaggagaaacagaacatacaagtggaggttgttagaggtggtaaaagatttggagcttcaatctttgaccttgttgttggtgatgtagttcctctcaaaattggtgatcaagttcctgctgatggtgtcctgatatctggccattctcttgcaatagatgaatcaagtatgactggagagtcaaaagttgtccacaaggatcaaaaggcaccattcttgatgtctggttgcaaggttgcagatggctatggttctatgttggtaacaggggtgggtacaaatactgaatggggtcagttgatggctaacctttcagaagataatggtgaagaaacaccattacaggttcgcttgaatggtgttgcaacttttattggtttggtgggcttgtctgttgctggtgcagtacttgttgtgctttggataaggtattttactggacataccgaaaatcctgatgggacacctcaatttgttgctggaactactggtgtgaagcaaggatttatgggggcaattagaattttgactatcgctgtgaccattgtagttgttgctgtgcctgagggactcccattggcagtaacactgacgcttgcatattccatgaaaaagatgatgcgagacaaagctctggtgaggcggctctcgtcatgtgaaacaatgggatcagctactacaatatgcagtgataagacaggaacccttacattgaataagatgacagtcgtggaagcatattttgctggaacaaagttggatccatgtgatgatgttagccagatgtcagacagtgcagcgtcacttattattgaaggaattgcgcagaacacaacaggaactgtatttctgccagaggatgggggagcagctgaacttactggttcgcctactgaaaaggccattctttcttggggccttaagatagggatggatttcgacgatgtgaggacaaaatcttcagttattcatgtttttccatttaactcggagaagaaacgtggcgctgttgcagtacagttagatgatggtgttcacatccactggaaaggtgcagctgaaatagtgttatcatcttgcaaaagctggctttccgtcgatggctctgttcagtcaatgagtgctgagaagcacgatgaattcaagagatcaatcgaagacatgggagcgaattcattacgctgtgttgcttttgcatactgttcctttgacattgaaaagatcccaatggaagacataacaagctgggagttgcctgaggatgacctgactctgcttggcatcataggaataaaggacccctgtcgcccaggtgtaagggatgctgtacgcctgtgcactactgctggtgttaaggtgcgcatggttacaggagataatattgaaacagctaaagctatagctctggagtgtggaatactagatgcaaatagtgttatttcagagccagttgtaatcgagggaaaagtgttccgtgagatgtctgaaagtgcaagaggagaggccgccgacaagataattgtgatggggagatcctcgccaaatgataaacttttgcttgtccaagctttaaaacgaaaaggccatgttgtagctgttactggtgatggcacaaatgatgcccctgcattgcacgaggccgatataggtctttcaatgggcatttccgggacagaagttgctaaagaaagctctgacattataatcttggatgatgacttcacgtcagttgtcaaggttgttcgttggggacgatctgtctacgctaatatccagaaattcattcagttccagctcaccgtcaatgttgctgcacttgtcattaatgtggttgctgctgtgtcctctggtgatgtgcccctaaatgctgttgagcttctgtgggtgaacctcataatggacacacttggagctcttgcattagcaaccgagcctccaacagacaaccttatgaagagaaatcctgttggtcgaagggaacctcttgttacaaatatcatgtggagaaacttgtttgttcaggccctttaccaagtagcaattcttctgattttcgattttgatggagtaaggattctgcgtctgcagaatgaaagccgatctgatgctgagaagataacaaatactttcatcttcaacacatttgtattttgccagatcttcaatgagttcaatgcacgaaaacccgaggaaaagaatgtcttcaaaggggtcacgaagaatcacctgttcatgggaataatcggtataacgacagtatttcagatactgataattcagttcctggggaagttcttcaaaatagtgaggcttggttggagactatggttggtttcagttgctatcggccttgtgagttggcccctggcttatgtgggtaaatttattcctgtgcccgtaagacctcttccggactatttcaaaccccgctgttgttggaaaccgccgcgccgagacgaggaggaaggtgggcagagctaaagcgcaacgagtgggcagtgtaaataggcacgtgataaaaaaatggagataaattgcactggttgattccatggtagcagcatcctggggatgtacgcataagatggcaggtagtcggcctcgtcgttttcttctaggagaagcagtcggaagaaaagaagtactatacagaagccaaacttgtctacccctatccagctggtgtgtctgctatgcggcagcgaaacttgagtcattagattgtagcctgaatgaaagcagcgctagcttgcgatgtagcagtacctttttttccctggcgatatcatctgactgtaaatttgtaaatgctttcggactacgagttgttcttatttttcatccacctcttctctacggaacgtttttttctatataagaaaataaagtcaacagagcagttctaaaacgactgttttttttttc

SEQ ID NO: 3397 - DNA, 3992 bp, Zea Mays
cttgactcgagtaatccgcagcgtccgattccgatcgttacttcccgccggacacggatcactgaccggtgggccacctccacgtctggacgagctcccacggtcctggccatgcgcgggcccatgtggcagcgtgatgcgccgcaagaagcttccacgaagcttcatggccgctaccgcctcgagaacaagtccccattcccgaccgcaaaagcgggccgagccgaggaagaagagaacaaaacgaaacccgaagctttttcccccattcttcgctggatatacaggaggattttcagagtcagggaggggagttcgccgccgccgccggagatccgctcgccggacgagcgggccgcggcggaggaccccgccgaggcggaggcgggggaggtggtcttcgacgacgcgttcgacataccccataagaacgctccgcacgaccggttgcgccggtggaggcaagctgctcttgttcttaatgcttcacgacgttttagatatactcttgaccttaaaaaggaggaagagaaagagattataaggaggaagatccggtcccatgcgcaagttatacgggcagcatttcttttcaaagaagctgggcaaaaagatatcagagaagcttatactggtataaatcttgcaacggcctctcgcagttttccaattgaactggaaaagcttaacacattaaacagggaccatgacagtgttcttcttcaagaaattggaggagttaagggattgtcagatttgttgaagagtaatttagagaagggagttagtccaaatgaggatgaattattacaaaggaagaatgtatatggatcaaatacatatccacgcaagaagagaaaaaacatactgcgttttgtatttgaagcttgccaagatttaactcttgtcattctgatgatagctgctgccatatcactaacattgggtatgactacagagggtgttgatgaaggatggtatgatggcggaagtatctttttagccgtttttcttgtgatacttgttactgcaacaagtgattataggcaatctctacagtttcgacatctgaatgaggagaaacagaacatacaagtggaggttgttagaggtggtaaaagatttggagcttcaatctttgaccttgttgttggtgatgtagttcctctcaaaattggtgatcaagttcctgctgatggtgtcctgatatctggccattctcttgcaatagatgaatcaagtatgactggagagtcaaaagttgtccacaaggatcaaaaggcaccattcttgatgtctggttgcaaggttgcagatggctatggttctatgttggggtgggtacaaatactgaatggggtcagttgatggctaacctttcagaagataatggtgaagaaacaccattacaggttcgcttgaatggtgttgcaacttttattggtttggtgggcttgtctgttgctggtgcagtacttgttgtgctttggataaggtattttactggacataccgaaaatcctgatgggacacctcaatttgttgctggaactactggtgtgaagcaaggatttatgggggcaattagaattttgactatcgctgtgaccattgtagttgttgctgtgcctgagggactcccattggcagtaacactgacgcttgcatattccatgaaaaagatgatgcgagacaaagctctggtgaggcggctctcgtcatgtgaaacaatgggatcagctactacaatatgcagtgataagacaggaacccttacattgaataagatgacagtcgtggaagcatattttgctggaacaaagttggatccatgtgatgatgttagccagatgtcagacagtgcagcgtcacttattattgaaggaattgcgcagaacacaacaggaactgtatttctgccagaggatgggggagcagctgaacttactggttcgcctactgaaaaggccattctttcttggggccttaagatagggatggatttcgacgatgtgaggacaaaatcttcagttattcatgtttttccatttaactcggagaagaaacgtggcgctgttgcagtacagttagatgatggtgttcacatccactggaaaggtgcagctgaaatagtgttatcatcttgcaaaagctggctttccgtcgatggctctgttcagtcaatgagtgctgagaagcacgatgaattcaagagatcaatcgaagacatgggagcgaattcattacgctgtgttgcttttgcatactgttcctttgacattgaaaagatcccaatggaagacataacaagctgggagttgcctgaggatgacctgactctgcttggcatcataggaataaaggacccctgtcgcccaggtgtaagggatgctgtacgcctgtgcactactgctggtgttaaggtgcgcatggttacaggagataatattgaaacagctaaagctatagctctggagtgtggaatactagatgcaaatagtgttatttcagagccagttgtaatcgagggaaaagtgttccgtgagatgtctgaaagtgcaagaggagaggccgccgacaagataattgtgatggggagatcctcgccaaatgataaacttttgcttgtccaagctttaaaacgaaaaggccatgttgtagctgttactggtgatggcacaaatgatgcccctgcattgcacgaggccgatataggtctttcaatgggcatttccgggacagaagttgctaaagaaagctctgacattataatcttggatgatgacttcacgtcagttgtcaaggttgttcgttggggacgatctgtctacgctaatatccagaaattcattcagttccagctcaccgtcaatgttgctgcacttgtcattaatgtggttgctgctgtgtcctctggtgatgtgcccctaaatgctgttgagcttctgtgggtgaacctcataatggacacacttggagctcttgcattagcaaccgagcctccaacagacaaccttatgaagagaaatcctgttggtcgaagggaacctcttgttacaaatatcatgtggagaaacttgtttgttcaggccctttaccaagtagcaattcttctgattttcgattttgatggagtaaggattctgcgtctgcagaatgaaagccgatctgatgctgagaagataacaaatactttcatcttcaacacatttgtattttgccagatcttcaatgagttcaatgcacgaaaacccgaggaaaagaatgtcttcaaaggggtcacgaagaatcacctgttcatgggaataatcggtataacgacagtatttcagatactgataattcagttcctggggaagttcttcaaaatagtgaggcttggttggagactatggttggtttcagttgctatcggccttgtgagttggcccctggcttatgtgggtaaatttattcctgtgcccgtaagacctcttccggactatttcaaaccccgctgttgttggaaaccgccgcgccgagacgaggaggaaggtgggcagagctaaagcgcaacgagtgggcagtgtaaataggcacgtgataaaaaaatggagataaattgcactggttgattccatggtagcagcatcctggggatgtacgcataagatggcaggtagtcggcctcgtcgttttcttctaggagaagcagtcggaagaaaagaagtactatacagaagccaaacttgtctacccctatccagctggtgtgtctgctatgcggcagcgaaacttgagtcattagattgtagcctgaatgaaagcagcgctagcttgcgatgtagcagtacctttttttccctggcgatatcatctgactgtaaatttgtaaatgctttcggactacgagttgttcttatttttcatccacctcttctctacggaacgtttttttctatataagaaaataaagtcaacagagcagttctaaaacgactgttttttttttc

SEQ ID NO: 3398 - DNA, 3884 bp, Zea Mays
atgtggcagcgtgatgcgccgcaagaagcttccacgaagcttcatggccgctaccgcctcgagaacaagtccccattcccgaccgcaaaagcgggccgagccgaggaagaagagaacaaaacgaaacccgaagctttttcccccattcttcgctggatatacaggaggattttcagagtcagggaggggagttcgccgccgccgccggagatccgctcgccggacgagcgggccgcggcggaggaccccgccgaggcggaggcgggggaggtggtcttcgacgacgcgttcgacataccccataagaacgctccgcacgaccggttgcgccggtggaggcaagctgctcttgttcttaatgcttcacgacgttttagatatactcttgaccttaaaaaggaggaagagaaagagattataaggaggaagatccggtcccatgcgcaagttatacgggcagcatttcttttcaaagaagctgggcaaaaagatatcagagaagcttatactggtataaatcttgcaacggcctctcgcagttttccaattgaactggaaaagcttaacacattaaacagggaccatgacagtgttcttcttcaagaaattggaggagttaagggattgtcagatttgttgaagagtaatttagagaagggagttagtccaaatgaggatgaattattacaaaggaagaatgtatatggatcaaatacatatccacgcaagaagagaaaaaacatactgcgttttgtatttgaagcttgccaagatttaactcttgtcattctgatgatagctgctgccatatcactaacattgggtatgactacagagggtgttgatgaaggatggtatgatggcggaagtatctttttagccgtttttcttgtgatacttgttactgcaacaagtgattataggcaatctctacagtttcgacatctgaatgaggagaaacagaacatacaagtggaggttgttagaggtggtaaaagatttggagcttcaatctttgaccttgttgttggtgatgtagttcctctcaaaattggtgatcaagtaagatggttcctgctgatggtgtcctgatatctggccattctcttgcaatagatgaatcaagtatgactggagagtcaaaagttgtccacaaggatcaaaaggcaccattcttgatgtctggttgcaaggttgcagatggctatggttctatgttggtaacaggggtgggtacaaatactgaatggggtcagttgatggctaacctttcagaagataatggtgaagaaacaccattacaggttcgcttgaatggtgttgcaacttttattggtttggtgggcttgtctgttgctggtgcagtacttgttgtgctttggataaggtattttactggacataccgaaaatcctgatgggacacctcaatttgttgctggaactactggtgtgaagcaaggatttatgggggcaattagaattttgactatcgctgtgaccattgtagttgttgctgtgcctgagggactcccattggcagtaacactgacgcttgcatattccatgaaaaagatgatgcgagacaaagctctggtgaggcggctctcgtcatgtgaaacaatgggatcagctactacaatatgcagtgataagacaggaacccttacattgaataagatgacagtcgtggaagcatattttgctggaacaaagttggatccatgtgatgatgttagccagatgtcagacagtgcagcgtcacttattattgaaggaattgcgcagaacacaacaggaactgtatttctgccagaggatgggggagcagctgaacttactggttcgcctactgaaaaggccattctttcttggggccttaagatagggatggatttcgacgatgtgaggacaaaatcttcagttattcatgtttttccatttaactcggagaagaaacgtggcgctgttgcagtacagttagatgatggtgttcacatccactggaaaggtgcagctgaaatagtgttatcatcttgcaaaagctggctttccgtcgatggctctgttcagtcaatgagtgctgagaagcacgatgaattcaagagatcaatcgaagacatgggagcgaattcattacgctgtgttgcttttgcatactgttcctttgacattgaaaagatcccaatggaagacataacaagctgggagttgcctgaggatgacctgactctgcttggcatcataggaataaaggacccctgtcgcccaggtgtaagggatgctgtacgcctgtgcactactgctggtgttaaggtgcgcatggttacaggagataatattgaaacagctaaagctatagctctggagtgtggaatactagatgcaaatagtgttatttcagagccagttgtaatcgagggaaaagtgttccgtgagatgtctgaaagtgcaagaggagaggccgccgacaagataattgtgatggggagatcctcgccaaatgataaacttttgcttgtccaagctttaaaacgaaaaggccatgttgtagctgttactggtgatggcacaaatgatgcccctgcattgcacgaggccgatataggtctttcaatgggcatttccgggacagaagttgctaaagaaagctctgacattataatcttggatgatgacttcacgtcagttgtcaaggttgttcgttggggacgatctgtctacgctaatatccagaaattcattcagttccagctcaccgtcaatgttgctgcacttgtcattaatgtggttgctgctgtgtcctctggtgatgtgcccctaaatgctgttgagcttctgtgggtgaacctcataatggacacacttggagctcttgcattagcaaccgagcctccaacagacaaccttatgaagagaaatcctgttggtcgaagggaacctcttgttacaaatatcatgtggagaaacttgtttgttcaggccctttaccaagtagcaattcttctgattttcgattttgatggagtaaggattctgcgtctgcagaatgaaagccgatctgatgctgagaagataacaaatactttcatcttcaacacatttgtattttgccagatcttcaatgagttcaatgcacgaaaacccgaggaaaagaatgtcttcaaaggggtcacgaagaatcacctgttcatgggaataatcggtataacgacagtatttcagatactgataattcagttcctggggaagttcttcaaaatagtgaggcttggttggagactatggttggtttcagttgctatcggccttgtgagttggcccctggcttatgtgggtaaatttattcctgtgcccgtaagacctcttccggactatttcaaaccccgctgttgttggaaaccgccgcgccgagacgaggaggaaggtgggcagagctaaagcgcaacgagtgggcagtgtaaataggcacgtgataaaaaaatggagataaattgcactggttgattccatggtagcagcatcctggggatgtacgcataagatggcaggtagtcggcctcgtcgttttcttctaggagaagcagtcggaagaaaagaagtactatacagaagccaaacttgtctacccctatccagctggtgtgtctgctatgcggcagcgaaacttgagtcattagattgtagcctgaatgaaagcagcgctagcttgcgatgtagcagtacctttttttccctggcgatatcatctgactgtaaatttgtaaatgctttcggactacgagttgttcttatttttcatccacctcttctctacggaacgtttttttctatataagaaaataaagtcaacagagcagttctaaaacgactgttttttttttc

SEQ ID NO: 3399 - DNA, 4006 bp, Zea Mays
atgtggcagcgtgatgcgccgcaagaagcttccacgaagcttcatggccgctaccgcctcgagaacaagtccccattcccgaccgcaaaagcgggccgagccgaggaagaagagaacaaaacgaaacccgaagctttttcccccattcttcgctggatatacaggaggattttcagagtcagggaggggagttcgccgccgccgccggagatccgctcgccggacgagcgggccgcggcggaggaccccgccgaggcggaggcgggggaggtggtcttcgacgacgcgttcgacataccccataagaacgctccgcacgaccggttgcgccggtggaggcaagctgctcttgttcttaatgcttcacgacgttttagatatactcttgaccttaaaaaggaggaagagaaagagattataaggaggaagatccggtcccatgcgcaagttatacgggcagcatttcttttcaaagaagctgggcaaaaagatatcagagaagcttatactggtataaatcttgcaacggcctctcgcagttttccaattgaactggaaaagcttaacacattaaacagggaccatgacagtgttcttcttcaagaaattggaggagttaagggattgtcagatttgttgaagagtaatttagagaagggagttagtccaaatgaggatgaattattacaaaggaagaatgtatatggatcaaatacatatccacgcaagaagagaaaaaacatactgcgttttgtatttgaagcttgccaagatttaactcttgtcattctgatgatagctgctgccatatcactaacattgggtatgactacagagggtgttgatgaaggatggtatgatggcggaagtatctttttagccgtttttcttgtgatacttgttactgcaacaagtgattataggcaatctctacagtttcgacatctgaatgaggagaaacagaacatacaagtggaggttgttagaggtggtaaaagatttggagcttcaatctttgaccttgttgttggtgatgtagttcctctcaaaattggtgatcaagttcctgctgatggtgtcctgatatctggccattctcttgcaatagatgaatcaagtatgactggagagtcaaaagttgtccacaaggatcaaaaggcaccattcttgatgtctggttgcaaggttgcagatggctatggttctatgttggtaacaggggtgggtacaaatactgaatggggtcagttgatggctaacctttcagaagataatggtgaagaaacaccattacaggttcgcttgaatggtgttgcaacttttattggtttggtgggcttgtctgttgctggtgcagtacttgttgtgctttggataaggtattttactggacataccgaaaatcctgatgggacacctcaatttgttgctggaactactggtgtgaagcaaggatttatgggggcaattagaattttgactatcgctgtgaccattgtagttgttgctgtgcctgagggactcccattggcagtaacactgacgcttgcatattccatgaaaaagatgatgcgagacaaagctctggtgaggcggctctcgtcatgtgaaacaatgggatcagctactacaatatgcagtgataagacaggaacccttacattgaataagatgacagtcgtggaagcatattttgctggaacaaagttggatccatgtgatgatgttagccagatgtcagacagtgcagcgtcacttattattgaaggaattgcgcagaacacaacaggaactgtatttctgccagaggagacttgaactggtcatcctcctggaggcagtctaagggcgctattaaaaatcatccagagtactcgtcttttcaatcgacaacttgccatgttcgacaatttttcatccattctttttctttatacaggatgggggagcagctgaacttactggttcgcctactgaaaaggccattctttcttggggccttaagatagggatggatttcgacgatgtgaggacaaaatcttcagttattcatgtttttccatttaactcggagaagaaacgtggcgctgttgcagtacagttagatgatggtgttcacatccactggaaaggtgcagctgaaatagtgttatcatcttgcaaaagctggctttccgtcgatggctctgttcagtcaatgagtgctgagaagcacgatgaattcaagagatcaatcgaagacatgggagcgaattcattacgctgtgttgcttttgcatactgttcctttgacattgaaaagatcccaatggaagacataacaagctgggagttgcctgaggatgacctgactctgcttggcatcataggaataaaggacccctgtcgcccaggtgtaagggatgctgtacgcctgtgcactactgctggtgttaaggtgcgcatggttacaggagataatattgaaacagctaaagctatagctctggagtgtggaatactagatgcaaatagtgttatttcagagccagttgtaatcgagggaaaagtgttccgtgagatgtctgaaagtgcaagaggagaggccgccgacaagataattgtgatggggagatcctcgccaaatgataaacttttgcttgtccaagctttaaaacgaaaaggccatgttgtagctgttactggtgatggcacaaatgatgcccctgcattgcacgaggccgatataggtctttcaatgggcatttccgggacagaagttgctaaagaaagctctgacattataatcttggatgatgacttcacgtcagttgtcaaggttgttcgttggggacgatctgtctacgctaatatccagaaattcattcagttccagctcaccgtcaatgttgctgcacttgtcattaatgtggttgctgctgtgtcctctggtgatgtgcccctaaatgctgttgagcttctgtgggtgaacctcataatggacacacttggagctcttgcattagcaaccgagcctccaacagacaaccttatgaagagaaatcctgttggtcgaagggaacctcttgttacaaatatcatgtggagaaacttgtttgttcaggccctttaccaagtagcaattcttctgattttcgattttgatggagtaaggattctgcgtctgcagaatgaaagccgatctgatgctgagaagataacaaatactttcatcttcaacacatttgtattttgccagatcttcaatgagttcaatgcacgaaaacccgaggaaaagaatgtcttcaaaggggtcacgaagaatcacctgttcatgggaataatcggtataacgacagtatttcagatactgataattcagttcctggggaagttcttcaaaatagtgaggcttggttggagactatggttggtttcagttgctatcggccttgtgagttggcccctggcttatgtgggtaaatttattcctgtgcccgtaagacctcttccggactatttcaaaccccgctgttgttggaaaccgccgcgccgagacgaggaggaaggtgggcagagctaaagcgcaacgagtgggcagtgtaaataggcacgtgataaaaaaatggagataaattgcactggttgattccatggtagcagcatcctggggatgtacgcataagatggcaggtagtcggcctcgtcgttttcttctaggagaagcagtcggaagaaaagaagtactatacagaagccaaacttgtctacccctatccagctggtgtgtctgctatgcggcagcgaaacttgagtcattagattgtagcctgaatgaaagcagcgctagcttgcgatgtagcagtacctttttttccctggcgatatcatctgactgtaaatttgtaaatgctttcggactacgagttgttcttatttttcatccacctcttctctacggaacgtttttttctatataagaaaataaagtcaacagagcagttctaaaacgactgttttttttttc

SEQ ID NO: 3400 - DNA, 3872 bp, Zea Mays
atgtggcagcgtgatgcgccgcaagaagcttccacgaagcttcatggccgctaccgcctcgagaacaagtccccattcccgaccgcaaaagcgggccgagccgaggaagaagagaacaaaacgaaacccgaagctttttcccccattcttcgctggatatacaggaggattttcagagtcagggaggggagttcgccgccgccgccggagatccgctcgccggacgagcgggccgcggcggaggaccccgccgaggcggaggcgggggaggtggtcttcgacgacgcgttcgacataccccataagaacgctccgcacgaccggttgcgccggtggaggcaagctgctcttgttcttaatgcttcacgacgttttagatatactcttgaccttaaaaaggaggaagagaaagagattataaggaggaagatccggtcccatgcgcaagttatacgggcagcatttcttttcaaagaagctgggcaaaaagatatcagagaagcttatactggtataaatcttgcaacggcctctcgcagttttccaattgaactggaaaagcttaacacattaaacagggaccatgacagtgttcttcttcaagaaattggaggagttaagggattgtcagatttgttgaagagtaatttagagaagggagttagtccaaatgaggatgaattattacaaaggaagaatgtatatggatcaaatacatatccacgcaagaagagaaaaaacatactgcgttttgtatttgaagcttgccaagatttaactcttgtcattctgatgatagctgctgccatatcactaacattgggtatgactacagagggtgttgatgaaggatggtatgatggcggaagtatctttttagccgtttttcttgtgatacttgttactgcaacaagtgattataggcaatctctacagtttcgacatctgaatgaggagaaacagaacatacaagtggaggttgttagaggtggtaaaagatttggagcttcaatctttgaccttgttgttggtgatgtagttcctctcaaaattggtgatcaagttcctgctgatggtgtcctgatatctggccattctcttgcaatagatgaatcaagtatgactggagagtcaaaagttgtccacaaggatcaaaaggcaccattcttgatgtctggttgcaaggttgcagatggctatggttctatgttggtaacaggggtgggtacaaatactgaatggggtcagttgatggctaacctttcagaagataatggtgaagaaacaccattacaggttcgcttgaatggtgttgcaacttttattggtttggtgggcttgtctgttgctggtgcagtacttgttgtgctttggataaggtattttactggacataccgaaaatcctgatgggacacctcaatttgttgctggaactactggtgtgaagcaaggatttatgggggcaattagaattttgactatcgctgtgaccattgtagttgttgctgtgcctgagggactcccattggcagtaacactgacgcttgcatattccatgaaaaagatgatgcgagacaaagctctggtgaggcggctctcgtcatgtgaaacaatgggatcagctactacaatatgcagtgataagacaggaacccttacattgaataagatgacagtcgtggaagcatattttgctggaacaaagttggatccatgtgatgatgttagccagatgtcagacagtgcagcgtcacttattattgaaggaattgcgcagaacacaacaggaactgtatttctgccagaggatgggggagcagctgaacttactggttcgcctactgaaaaggccattctttcttggggccttaagatagggatggatttcgacgatgtgaggacaaaatcttcagttattcatgtttttccatttaactcggagaagaaacgtggcgctgttgcagtacagatgatggtgttcacatccactggaaaggtgcagctgaaatagtgttatcatcttgcaaaagctggctttccgtcgatggctctgttcagtcaatgagtgctgagaagcacgatgaattcaagagatcaatcgaagacatgggagcgaattcattacgctgtgttgcttttgcatactgttcctttgacattgaaaagatcccaatggaagacataacaagctgggagttgcctgaggatgacctgactctgcttggcatcataggaataaaggacccctgtcgcccaggtgtaagggatgctgtacgcctgtgcactactgctggtgttaaggtgcgcatggttacaggagataatattgaaacagctaaagctatagctctggagtgtggaatactagatgcaaatagtgttatttcagagccagttgtaatcgagggaaaagtgttccgtgagatgtctgaaagtgcaagaggagaggccgccgacaagataattgtgatggggagatcctcgccaaatgataaacttttgcttgtccaagctttaaaacgaaaaggccatgttgtagctgttactggtgatggcacaaatgatgcccctgcattgcacgaggccgatataggtctttcaatgggcatttccgggacagaagttgctaaagaaagctctgacattataatcttggatgatgacttcacgtcagttgtcaaggttgttcgttggggacgatctgtctacgctaatatccagaaattcattcagttccagctcaccgtcaatgttgctgcacttgtcattaatgtggttgctgctgtgtcctctggtgatgtgcccctaaatgctgttgagcttctgtgggtgaacctcataatggacacacttggagctcttgcattagcaaccgagcctccaacagacaaccttatgaagagaaatcctgttggtcgaagggaacctcttgttacaaatatcatgtggagaaacttgtttgttcaggccctttaccaagtagcaattcttctgattttcgattttgatggagtaaggattctgcgtctgcagaatgaaagccgatctgatgctgagaagataacaaatactttcatcttcaacacatttgtattttgccagatcttcaatgagttcaatgcacgaaaacccgaggaaaagaatgtcttcaaaggggtcacgaagaatcacctgttcatgggaataatcggtataacgacagtatttcagatactgataattcagttcctggggaagttcttcaaaatagtgaggcttggttggagactatggttggtttcagttgctatcggccttgtgagttggcccctggcttatgtgggtaaatttattcctgtgcccgtaagacctcttccggactatttcaaaccccgctgttgttggaaaccgccgcgccgagacgaggaggaaggtgggcagagctaaagcgcaacgagtgggcagtgtaaataggcacgtgataaaaaaatggagataaattgcactggttgattccatggtagcagcatcctggggatgtacgcataagatggcaggtagtcggcctcgtcgttttcttctaggagaagcagtcggaagaaaagaagtactatacagaagccaaacttgtctacccctatccagctggtgtgtctgctatgcggcagcgaaacttgagtcattagattgtagcctgaatgaaagcagcgctagcttgcgatgtagcagtacctttttttccctggcgatatcatctgactgtaaatttgtaaatgctttcggactacgagttgttcttatttttcatccacctcttctctacggaacgtttttttctatataagaaaataaagtcaacagagcagttctaaaacgactgttttttttttc

SEQ ID NO: 3401 - DNA, 4108 bp, Zea Mays
atgtggcagcgtgatgcgccgcaagaagcttccacgaagcttcatggccgctaccgcctcgagaacaagtccccattcccgaccgcaaaagcgggccgagccgaggaagaagagaacaaaacgaaacccgaagctttttcccccattcttcgctggatatacaggaggattttcagagtcagggaggtgagggagagagggcgaggcaactgtgtgtgtgtgtgtgtgtgtgagcaggcccgccgagaagaaccttcgcgacgccgaggggtcggtcgcgcgcgggcgctcgtcggtcggtcggtcggtcggtgtcgtctctcctgcgaaggtgcccctggctgctgctgccggggtggtctgatcgggcatggcgcaggggagttcgccgccgccgccggagatccgctcgccggacgagcgggccgcggcggaggaccccgccgaggcggaggcgggggaggtggtcttcgacgacgcgttcgacataccccataagaacgctccgcacgaccggttgcgccggtggaggcaagctgctcttgttcttaatgcttcacgacgttttagatatactcttgaccttaaaaaggaggaagagaaagagattataaggaggaagatccggtcccatgcgcaagttatacggcatttcttttcaaagaagctgggcaaaaagatatcagagttttccaattgaactggaaaagcttaacacattaaacagggaccatgacagtgttcttcttcaagaaattggaggagttaagggattgtcagatttgttgaagagtaatttagagaagggagttagtccaaatgaggatgaattattacaaaggaagaatgtatatggatcaaatacatatccacgcaagaagagaaaaaacatactgcgttttgtatttgaagcttgccaagatttaactcttgtcattctgatgatagctgctgccatatcactaacattgggtatgactacagagggtgttgatgaaggatggtatgatggcggaagtatctttttagccgtttttcttgtgatacttgttactgcaacaagtgattataggcaatctctacagtttcgacatctgaatgaggagaaacagaacatacaagtggaggttgttagaggtggtaaaagatttggagcttcaatctttgaccttgttgttggtgatgtagttcctctcaaaattggtgatcaagttcctgctgatggtgtcctgatatctggccattctcttgcaatagatgaatcaagtatgactggagagtcaaaagttgtccacaaggatcaaaaggcaccattcttgatgtctggttgcaaggttgcagatggctatggttctatgttggtaacaggggtgggtacaaatactgaatggggtcagttgatggctaacctttcagaagataatggtgaagaaacaccattacaggttattctctgtaaggatagtgcaaattctcgaatggacaattactgaaggctctctttggtttatgctttgaccctttttaggttcgcttgaatggtgttgcaacttttattggtttggtgggcttgtctgttgctggtgcagtacttgttgtgctttggataaggtattttactggacataccgaaaatcctgatgggacacctcaatttgttgctggaactactggtgtgaagcaaggatttatgggggcaattagaattttgactatcgctgtgaccattgtagttgttgctgtgcctgagggactcccattggcagtaacactgacgcttgcatattccatgaaaaagatgatgcgagacaaagctctggtgaggcggctctcgtcatgtgaaacaatgggatcagctactacaatatgcagtgataagacaggaacccttacattgaataagatgacagtcgtggaagcatattttgctggaacaaagttggatccatgtgatgatgttagccagatgtcagacagtgcagcgtcacttattattgaaggaattgcgcagaacacaacaggaactgtatttctgccagaggatgggggagcagctgaacttactggttcgcctactgaaaaggccattctttcttggggccttaagatagggatggatttcgacgatgtgaggacaaaatcttcagttattcatgtttttccatttaactcggagaagaaacgtggcgctgttgcagtacagttagatgatggtgttcacatccactggaaaggtgcagctgaaatagtgttatcatcttgcaaaagctggctttccgtcgatggctctgttcagtcaatgagtgctgagaagcacgatgaattcaagagatcaatcgaagacatgggagcgaattcattacgctgtgttgcttttgcatactgttcctttgacattgaaaagatcccaatggaagacataacaagctgggagttgcctgaggatgacctgactctgcttggcatcataggaataaaggacccctgtcgcccaggtgtaagggatgctgtacgcctgtgcactactgctggtgttaaggtgcgcatggttacaggagataatattgaaacagctaaagctatagctctggagtgtggaatactagatgcaaatagtgttatttcagagccagttgtaatcgagggaaaagtgttccgtgagatgtctgaaagtgcaagaggagaggccgccgacaagataattgtgatggggagatcctcgccaaatgataaacttttgcttgtccaagctttaaaacgaaaaggccatgttgtagctgttactggtgatggcacaaatgatgcccctgcattgcacgaggccgatataggtctttcaatgggcatttccgggacagaagttgctaaagaaagctctgacattataatcttggatgatgacttcacgtcagttgtcaaggttgttcgttggggacgatctgtctacgctaatatccagaaattcattcagttccagctcaccgtcaatgttgctgcacttgtcattaatgtggttgctgctgtgtcctctggtgatgtgcccctaaatgctgttgagcttctgtgggtgaacctcataatggacacacttggagctcttgcattagcaaccgagcctccaacagacaaccttatgaagagaaatcctgttggtcgaagggaacctcttgttacaaatatcatgtggagaaacttgtttgttcaggccctttaccaagtagcaattcttctgattttcgattttgatggagtaaggattctgcgtctgcagaatgaaagccgatctgatgctgagaagataacaaatactttcatcttcaacacatttgtattttgccagatcttcaatgagttcaatgcacgaaaacccgaggaaaagaatgtcttcaaaggggtcacgaagaatcacctgttcatgggaataatcggtataacgacagtatttcagatactgataattcagttcctggggaagttcttcaaaatagtgaggcttggttggagactatggttggtttcagttgctatcggccttgtgagttggcccctggcttatgtgggtaaatttattcctgtgcccgtaagacctcttccggactatttcaaaccccgctgttgttggaaaccgccgcgccgagacgaggaggaaggtgggcagagctaaagcgcaacgagtgggcagtgtaaataggcacgtgataaaaaaatggagataaattgcactggttgattccatggtagcagcatcctggggatgtacgcataagatggcaggtagtcggcctcgtcgttttcttctaggagaagcagtcggaagaaaagaagtactatacagaagccaaacttgtctacccctatccagctggtgtgtctgctatgcggcagcgaaacttgagtcattagattgtagcctgaatgaaagcagcgctagcttgcgatgtagcagtacctttttttccctggcgatatcatctgactgtaaatttgtaaatgctttcggactacgagttgttcttatttttcatccacctcttctctacggaacgtttttttctatataagaaaataaagtcaacagagcagttctaaaacgactgttttttttttc

SEQ ID NO: 3402 - DNA, 4069 bp, Zea Mays
atgtggcagcgtgatgcgccgcaagaagcttccacgaagcttcatggccgctaccgcctcgagaacaagtccccattcccgaccgcaaaagcgggccgagccgaggaagaagagaacaaaacgaaacccgaagctttttcccccattcttcgctggatatacaggaggattttcagagtcagggaggtgagggagagagggcgaggcaactgtgtgtgtgtgtgtgtgtgtgagcaggcccgccgagaagaaccttcgcgacgccgaggggtcggtcgcgcgcgggcgctcgtcggtcggtcggtcggtcggtgtcgtctctcctgcgaaggtgcccctggctgctgctgccggggtggtctgatcgggcatggcgcaggggagttcgccgccgccgccggagatccgctcgccggacgagcgggccgcggcggaggaccccgccgaggcggaggcgggggaggtggtcttcgacgacgcgttcgacataccccataagaacgctccgcacgaccggttgcgccggtggaggcaagctgctcttgttcttaatgcttcacgacgttttagatatactcttgaccttaaaaaggaggaagagaaagagattataaggaggaagatccggtcccatgcgcaagttatacgggcagcatttcttttcaaagaagctgggcaaaaagatatcagagaagcttatactggtataaatcttgcaacggcctctcgcagttttccaattgaactggaaaagcttaacacattaaacagggaccatgacagtgttcttcttcaagaaattggaggagttaagggattgtcagatttgttgaagagtaatttagagaagggagttagtccaaatgaggatgaattattacaaaggaagaatgtatatggatcaaatacatatccacgcaagaagagaaaaaacatactgcgttttgtatttgaagcttgccaagatttaactcttgtcattctgatgatagctgctgccatatcactaacattgggtatgactacagagggtgttgatgaaggatggtatgatggcggaagtatctttttagccgtttttcttgtgatacttgttactgcaacaagtgattataggcaatctctacagtttcgacatctgaatgaggagaaacagaacatacaagtggaggttgttagaggtggtaaaagatttggagcttcaatctttgaccttgttgttggtgatgtagttcctctcaaaattggtgatcaagttcctgctgatggtgtcctgatatctggccattctcttgcaatagatgaatcaagtatgactggagagtcaaaagttgtccacaaggatcaaaaggcaccattcttgatgtctggttgcaaggttgcagatggctatggttctatgttggtaacaggggtgggtacaaatactgaatggggtcagttgatggctaacctttcagaagataatggtgaagaaacaccattacaggttcgcttgaatggtgttgcaacttttattggtttggtgggcttgtctgttgctggtgcagtacttgttgtgctttggataaggtattttactggacataccgaaaatcctgatgggacacctcaatttgttgctggaactactggtgtgaagcaaggatttatgggggcaattagaattttgactatcgctgtgaccattgtagttgttgctgtgcctgagggactcccattggcagtaacactgacgcttgcatattccatgaaaaagatgatgcgagacaaagctctggtgaggcggctctcgtcatgtgaaacaatgggatcagctactacaatatgcagtgataagacaggaacccttacattgaataagatgacagtcgtggaagcatattttgctggaacaaagttggatccatgtgatgatgttagccagatgtcagacagtgcagcgtcacttattattgaaggaattgcgcagaacacaacaggaactgtatttctgccagaggatgggggagcagctgaacttactggttcgcctactgaaaaggccattctttcttggggccttaagatagggatggatttcgacgatgtgaggacaaaatcttcagttattcatgtttttccatttaactcggagaagaaacgtggcgctgttgcagtacagttagatgatggtgttcacatccactggaaaggtgcagctgaaatagtgttatcatcttgcaaaagctggctttccgtcgatggctctgttcagtcaatgagtgctgagaagcacgatgaattcaagagatcaatcgaagacatgggagcgaattcattacgctgtgttgcttttgcatactgttcctttgacattgaaaagatcccaatggaagacataacaagctgggagttgcctgaggatgacctgactctgcttggcatcataggaataaaggacccctgtcgcccaggtgtaagggatgctgtacgcctgtgcactactgctggtgttaaggtgcgcatggttacaggagataatattgaaacagctaaagctatagctctggagtgtggaatactagatgcaaatagtgttatttcagagccagttgtaatcgagggaaaagtgttccgtgagatgtctgaaagtgcaagaggagaggccgccgacaagataattgtgatggggagatcctcgccaaatgataaacttttgcttgtccaagctttaaaacgaaaaggccatgttgtagctgttactggtgatggcacaaatgatgcccctgcattgcacgaggccgatataggtctttcaatgggcatttccgggacagaagttgctaaagaaagctctgacattataatcttggatgatgacttcacgtcagttgtcaaggttgttcgttggggacgatctgtctacgctaatatccagaaattcattcagttccagctcaccgtcaatgttgctgcacttgtcattaatgtggttgctgctgtgtcctctggtgatgtgcccctaaatgctgttgagcttctgtgggtgaacctcataatggacacacttggagctcttgcattagcaaccgagcctccaacagacaaccttatgaagagaaatcctgttggtcgaagggaacctcttgttacaaatatcatgtggagaaacttgtttgttcaggccctttaccaagtagcaattcttctgattttcgattttgatggagtaaggattctgcgtctgcagaatgaaagccgatctgatgctgagaagataacaaatactttcatcttcaacacatttgtattttgccagatcttcaatgagttcaatgcacgaaaacccgaggaaaagaatgtcttcaaaggggtcacgaagaatcacctgttcatgggaataatcggtataacgacagtatttcagatactgataattcagttcctggggaagttcttcaaaatagtgaggcttggttggagactatggttggtttcagttgctatcggccttgtgagttggcccctggcttatgtgggtaaatttattcctgtgcccgtaagacctcttccggactatttcaaaccccgctgttgttggaaaccgccgcgccgagacgaggaggaaggtgggcagagctaaagcgcaacgagtgggcagtgtaaataggcacgtgataaaaaaatggagataaattgcactggttgattccatggtagcagcatcctggggatgtacgcataagatggcaggtagtcggcctcgtcgttttcttctaggagaagcagtcggaagaaaagaagtactatacagaagccaaacttgtctacccctatccagctggtgtgtctgctatgcggcagcgaaacttgagtcattagattgtagcctgaatgaaagcagcgctagcttgcgatgtagcagtacctttttttccctggcgatatcatctgactgtaaatttgtaaatgctttcggactacgagttgttcttatttttcatccacctcttctctacggaacgtttttttctatataagaaaataaagtcaacagagcagttctaaaacgactgttttttttttc

SEQ ID NO: 3403 - DNA, 3872 bp, Zea Mays
atgtggcagcgtgatgcgccgcaagaagcttccacgaagcttcatggccgctaccgcctcgagaacaagtccccattcccgaccgcaaaagcgggccgagccgaggaagaagagaacaaaacgaaacccgaagctttttcccccattcttcgctggatatacaggaggattttcagagtcagggaggggagttcgccgccgccgccggagatccgctcgccggacgagcgggccgcggcggaggaccccgccgaggcggaggcgggggaggtggtcttcgacgacgcgttcgacataccccataagaacgctccgcacgaccggttgcgccggtggaggcaagctgctcttgttcttaatgcttcacgacgttttagatatactcttgaccttaaaaaggaggaagagaaagagattataaggaggaagatccggtcccatgcgcaagttatacgggcagcatttcttttcaaagaagctgggcaaaaagatatcagagaagcttatactggtataaatcttgcaacggcctctcgcagttttccaattgaactggaaaagcttaacacattaaacagggaccatgacagtgttcttcttcaagaaattggaggagttaagggattgtcagatttgttgaagagtaatttagagaagggagttagtccaaatgaggatgaattattacaaaggaagaatgtatatggatcaaatacatatccacgcaagaagagaaaaaacatactgcgttttgtatttgaagcttgccaagatttaactcttgtcattctgatgatagctgctgccatatcactaacattgggtatgactacagagggtgttgatgaaggatggtatgatggcggaagtatctttttagccgtttttcttgtgatacttgttactgcaacaagtgattataggcaatctctacagtttcgacatctgaatgaggagaaacagaacatacaagtggaggttgttagaggtggtaaaagatttggagcttcaatctttgaccttgttgttggtgatgtagttcctctcaaaattggtgatcaagttcctgctgatggtgtcctgatatctggccattctcttgcaatagatgaatcaagtatgactggagagtcaaaagttgtccacaaggatcaaaaggcaccattcttgatgtctggttgcaaggttgcagatggctatggttctatgttggtaacaggggtgggtacaaatactgaatggggtcagttgatggctaacctttcagaagataatggtgaagaaacaccattacaggttcgcttgaatggtgttgcaacttttattggtttggtgggcttgtctgttgctggtgcagtacttgttgtgctttggataaggtattttactggacataccgaaaatcctgatgggacacctcaatttgttgctggaactactggtgtgaagcaaggatttatgggggcaattagaattttgactatcgctgtgaccattgtagttgttgctgtgcctgagggactcccattggcagtaacactgacgcttgcatattccatgaaaaagatgatgcgagacaaagctctggtgaggcggctctcgtcatgtgaaacaatgggatcagctactacaatatgcagtgataagacaggaacccttacattgaataagatgacagtcgtggaagcatattttgctggaacaaagttggatccatgtgatgatgttagccagatgtcagacagtgcagcgtcacttattattgaaggaattgcgcagaacacaacaggaactgtatttctgccagaggatgggggagcagctgaacttactggttcgcctactgaaaaggccattctttcttggggccttaagggatggatttcgacgatgtgaggacaaaatcttcagttattcatgtttttccatttaactcggagaagaaacgtggcgctgttgcagtacagttagatgatggtgttcacatccactggaaaggtgcagctgaaatagtgttatcatcttgcaaaagctggctttccgtcgatggctctgttcagtcaatgagtgctgagaagcacgatgaattcaagagatcaatcgaagacatgggagcgaattcattacgctgtgttgcttttgcatactgttcctttgacattgaaaagatcccaatggaagacataacaagctgggagttgcctgaggatgacctgactctgcttggcatcataggaataaaggacccctgtcgcccaggtgtaagggatgctgtacgcctgtgcactactgctggtgttaaggtgcgcatggttacaggagataatattgaaacagctaaagctatagctctggagtgtggaatactagatgcaaatagtgttatttcagagccagttgtaatcgagggaaaagtgttccgtgagatgtctgaaagtgcaagaggagaggccgccgacaagataattgtgatggggagatcctcgccaaatgataaacttttgcttgtccaagctttaaaacgaaaaggccatgttgtagctgttactggtgatggcacaaatgatgcccctgcattgcacgaggccgatataggtctttcaatgggcatttccgggacagaagttgctaaagaaagctctgacattataatcttggatgatgacttcacgtcagttgtcaaggttgttcgttggggacgatctgtctacgctaatatccagaaattcattcagttccagctcaccgtcaatgttgctgcacttgtcattaatgtggttgctgctgtgtcctctggtgatgtgcccctaaatgctgttgagcttctgtgggtgaacctcataatggacacacttggagctcttgcattagcaaccgagcctccaacagacaaccttatgaagagaaatcctgttggtcgaagggaacctcttgttacaaatatcatgtggagaaacttgtttgttcaggccctttaccaagtagcaattcttctgattttcgattttgatggagtaaggattctgcgtctgcagaatgaaagccgatctgatgctgagaagataacaaatactttcatcttcaacacatttgtattttgccagatcttcaatgagttcaatgcacgaaaacccgaggaaaagaatgtcttcaaaggggtcacgaagaatcacctgttcatgggaataatcggtataacgacagtatttcagatactgataattcagttcctggggaagttcttcaaaatagtgaggcttggttggagactatggttggtttcagttgctatcggccttgtgagttggcccctggcttatgtgggtaaatttattcctgtgcccgtaagacctcttccggactatttcaaaccccgctgttgttggaaaccgccgcgccgagacgaggaggaaggtgggcagagctaaagcgcaacgagtgggcagtgtaaataggcacgtgataaaaaaatggagataaattgcactggttgattccatggtagcagcatcctggggatgtacgcataagatggcaggtagtcggcctcgtcgttttcttctaggagaagcagtcggaagaaaagaagtactatacagaagccaaacttgtctacccctatccagctggtgtgtctgctatgcggcagcgaaacttgagtcattagattgtagcctgaatgaaagcagcgctagcttgcgatgtagcagtacctttttttccctggcgatatcatctgactgtaaatttgtaaatgctttcggactacgagttgttcttatttttcatccacctcttctctacggaacgtttttttctatataagaaaataaagtcaacagagcagttctaaaacgactgttttttttttc

SEQ ID NO: 3404 - DNA, 3936 bp, Zea Mays
atgtggcagcgtgatgcgccgcaagaagcttccacgaagcttcatggccgctaccgcctcgagaacaagtccccattcccgaccgcaaaagcgggccgagccgaggaagaagagaacaaaacgaaacccgaagctttttcccccattcttcgctggatatacaggaggattttcagagtcagggaggggagttcgccgccgccgccggagatccgctcgccggacgagcgggccgcggcggaggaccccgccgaggcggaggcgggggaggtggtcttcgacgacgcgttcgacataccccataagaacgctccgcacgaccggttgcgccggtggaggcaagctgctcttgttcttaatgcttcacgacgttttagatatactcttgaccttaaaaaggaggaagagaaagagattataaggaggaagatccggtcccatgcgcaagttatacggcatttcttttcaaagaagctgggcaaaaagatatcagagaagcttatactggtataaatcttgcaacggcctctcgcagttttccaattgaactggaaaagcttaacacattaaacagggaccatgacagtgttcttcttcaagaaattggaggagttaagggattgtcagatttgttgaagagtaatttagagaagggagttagtccaaatgaggatgaattattacaaaggaagaatgtatatggatcaaatacatatccacgcaagaagagaaaaaacatactgcgttttgtatttgaagcttgccaagatttaactcttgtcattctgatgatagctgctgccatatcactaacattgggtatgactacagagggtgttgatgaaggatggtatgatggcggaagtatctttttagccgtttttcttgtgatacttgttactgcaacaagtgattataggcaatctctacagtttcgacatctgaatgaggagaaacagaacatacaagtggaggtgagtgcggctatgccacgtgaactcccattcattggttatatttctgatttgctatctctattggttaggttgttagaggtggtaaaagatttggagcttcaatctttgaccttgttgttggtgatgtagttcctctcaaaattggtgatcaagttcctgctgatggtgtcctgatatctggccattctcttgcaatagatgaatcaagtatgactggagagtcaaaagttgtccacaaggatcaaaaggcaccattcttgatgtctggttgcaaggttgcagatggctatggttctatgttggggtgggtacaaatactgaatggggtcagttgatggctaacctttcagaagataatggtgaagaaacaccattacaggttcgcttgaatggtgttgcaacttttattggtttggtgggcttgtctgttgctggtgcagtacttgttgtgctttggataaggtattttactggacataccgaaaatcctgatgggacacctcaatttgttgctggaactactggtgtgaagcaaggatttatgggggcaattagaattttgactatcgctgtgaccattgtagttgttgctgtgcctgagggactcccattggcagtaacactgacgcttgcatattccatgaaaaagatgatgcgagacaaagctctggtgaggcggctctcgtcatgtgaaacaatgggatcagctactacaatatgcagtgataagacaggaacccttacattgaataagatgacagtcgtggaagcatattttgctggaacaaagttggatccatgtgatgatgttagccagatgtcagacagtgcagcgtcacttattattgaaggaattgcgcagaacacaacaggaactgtatttctgccagaggatgggggagcagctgaacttactggttcgcctactgaaaaggccattctttcttggggccttaagatagggatggatttcgacgatgtgaggacaaaatcttcagttattcatgtttttccatttaactcggagaagaaacgtggcgctgttgcagtacagttagatgatggtgttcacatccactggaaaggtgcagctgaaatagtgttatcatcttgcaaaagctggctttccgtcgatggctctgttcagtcaatgagtgctgagaagcacgatgaattcaagagatcaatcgaagacatgggagcgaattcattacgctgtgttgcttttgcatactgttcctttgacattgaaaagatcccaatggaagacataacaagctgggagttgcctgaggatgacctgactctgcttggcatcataggaataaaggacccctgtcgcccaggtgtaagggatgctgtacgcctgtgcactactgctggtgttaaggtgcgcatggttacaggagataatattgaaacagctaaagctatagctctggagtgtggaatactagatgcaaatagtgttatttcagagccagttgtaatcgagggaaaagtgttccgtgagatgtctgaaagtgcaagaggagaggccgccgacaagataattgtgatggggagatcctcgccaaatgataaacttttgcttgtccaagctttaaaacgaaaaggccatgttgtagctgttactggtgatggcacaaatgatgcccctgcattgcacgaggccgatataggtctttcaatgggcatttccgggacagaagttgctaaagaaagctctgacattataatcttggatgatgacttcacgtcagttgtcaaggttgttcgttggggacgatctgtctacgctaatatccagaaattcattcagttccagctcaccgtcaatgttgctgcacttgtcattaatgtggttgctgctgtgtcctctggtgatgtgcccctaaatgctgttgagcttctgtgggtgaacctcataatggacacacttggagctcttgcattagcaaccgagcctccaacagacaaccttatgaagagaaatcctgttggtcgaagggaacctcttgttacaaatatcatgtggagaaacttgtttgttcaggccctttaccaagtagcaattcttctgattttcgattttgatggagtaaggattctgcgtctgcagaatgaaagccgatctgatgctgagaagataacaaatactttcatcttcaacacatttgtattttgccagatcttcaatgagttcaatgcacgaaaacccgaggaaaagaatgtcttcaaaggggtcacgaagaatcacctgttcatgggaataatcggtataacgacagtatttcagatactgataattcagttcctggggaagttcttcaaaatagtgaggcttggttggagactatggttggtttcagttgctatcggccttgtgagttggcccctggcttatgtgggtaaatttattcctgtgcccgtaagacctcttccggactatttcaaaccccgctgttgttggaaaccgccgcgccgagacgaggaggaaggtgggcagagctaaagcgcaacgagtgggcagtgtaaataggcacgtgataaaaaaatggagataaattgcactggttgattccatggtagcagcatcctggggatgtacgcataagatggcaggtagtcggcctcgtcgttttcttctaggagaagcagtcggaagaaaagaagtactatacagaagccaaacttgtctacccctatccagctggtgtgtctgctatgcggcagcgaaacttgagtcattagattgtagcctgaatgaaagcagcgctagcttgcgatgtagcagtacctttttttccctggcgatatcatctgactgtaaatttgtaaatgctttcggactacgagttgttcttatttttcatccacctcttctctacggaacgtttttttctatataagaaaataaagtcaacagagcagttctaaaacgactgttttttttttc

SEQ ID NO: 3405 - DNA, 3836 bp, Zea Mays
atgtggcagcgtgatgcgccgcaagaagcttccacgaagcttcatggccgctaccgcctcgagaacaagtccccattcccgaccgcaaaagcgggccgagccgaggaagaagagaacaaaacgaaacccgaagctttttcccccattcttcgctggatatacaggaggattttcagagtcagggaggggagttcgccgccgccgccggagatccgctcgccggacgagcgggccgcggcggaggaccccgccgaggcggaggcgggggaggtggtcttcgacgacgcgttcgacataccccataagaacgctccgcacgaccggttgcgccggtggaggcaagctgctcttgttcttaatgcttcacgacgttttagatatactcttgaccttaaaaaggaggaagagaaagagattataaggaggaagatccggtcccatgcgcaagttatacgggcagcatttcttttcaaagaagctgggcaaaaagatatcagagttttccaattgaactggaaaagcttaacacattaaacagggaccatgacagtgttcttcttcaagaaattggaggagttaagggattgtcagatttgttgaagagtaatttagagaagggagttagtccaaatgaggatgaattattacaaaggaagaatgtatatggatcaaatacatatccacgcaagaagagaaaaaacatactgcgttttgtatttgaagcttgccaagatttaactcttgtcattctgatgatagctgctgccatatcactaacattgggtatgactacagagggtgttgatgaaggatggtatgatggcggaagtatctttttagccgtttttcttgtgatacttgttactgcaacaagtgattataggcaatctctacagtttcgacatctgaatgaggagaaacagaacatacaagtggaggttgttagaggtggtaaaagatttggagcttcaatctttgaccttgttgttggtgatgtagttcctctcaaaattggtgatcaagttcctgctgatggtgtcctgatatctggccattctcttgcaatagatgaatcaagtatgactggagagtcaaaagttgtccacaaggatcaaaaggcaccattcttgatgtctggttgcaaggttgcagatggctatggttctatgttggtaacaggggtgggtacaaatactgaatggggtcagttgatggctaacctttcagaagataatggtgaagaaacaccattacaggttcgcttgaatggtgttgcaacttttattggtttggtgggcttgtctgttgctggtgcagtacttgttgtgctttggataaggtattttactggacataccgaaaatcctgatgggacacctcaatttgttgctggaactactggtgtgaagcaaggatttatgggggcaattagaattttgactatcgctgtgaccattgtagttgttgctgtgcctgagggactcccattggcagtaacactgacgcttgcatattccatgaaaaagatgatgcgagacaaagctctggtgaggcggctctcgtcatgtgaaacaatgggatcagctactacaatatgcagtgataagacaggaacccttacattgaataagatgacagtcgtggaagcatattttgctggaacaaagttggatccatgtgatgatgttagccagatgtcagacagtgcagcgtcacttattattgaaggaattgcgcagaacacaacaggaactgtatttctgccagaggatgggggagcagctgaacttactggttcgcctactgaaaaggccattctttcttggggccttaagatagggatggatttcgacgatgtgaggacaaaatcttcagttattcatgtttttccatttaactcggagaagaaacgtggcgctgttgcagtacagttagatgatggtgttcacatccactggaaaggtgcagctgaaatagtgttatcatcttgcaaaagctggctttccgtcgatggctctgttcagtcaatgagtgctgagaagcacgatgaattcaagagatcaatcgaagacatgggagcgaattcattacgctgtgttgcttttgcatactgttcctttgacattgaaaagatcccaatggaagacataacaagctgggagttgcctgaggatgacctgactctgcttggcatcataggaataaaggacccctgtcgcccaggtgtaagggatgctgtacgcctgtgcactactgctggtgttaaggtgcgcatggttacaggagataatattgaaacagctaaagctatagctctggagtgtggaatactagatgcaaatagtgttatttcagagccagttgtaatcgagggaaaagtgttccgtgagatgtctgaaagtgcaagaggagaggccgccgacaagataattgtgatggggagatcctcgccaaatgataaacttttgcttgtccaagctttaaaacgaaaaggccatgttgtagctgttactggtgatggcacaaatgatgcccctgcattgcacgaggccgatataggtctttcaatgggcatttccgggacagaagttgctaaagaaagctctgacattataatcttggatgatgacttcacgtcagttgtcaaggttgttcgttggggacgatctgtctacgctaatatccagaaattcattcagttccagctcaccgtcaatgttgctgcacttgtcattaatgtggttgctgctgtgtcctctggtgatgtgcccctaaatgctgttgagcttctgtgggtgaacctcataatggacacacttggagctcttgcattagcaaccgagcctccaacagacaaccttatgaagagaaatcctgttggtcgaagggaacctcttgttacaaatatcatgtggagaaacttgtttgttcaggccctttaccaagtagcaattcttctgattttcgattttgatggagtaaggattctgcgtctgcagaatgaaagccgatctgatgctgagaagataacaaatactttcatcttcaacacatttgtattttgccagatcttcaatgagttcaatgcacgaaaacccgaggaaaagaatgtcttcaaaggggtcacgaagaatcacctgttcatgggaataatcggtataacgacagtatttcagatactgataattcagttcctggggaagttcttcaaaatagtgaggcttggttggagactatggttggtttcagttgctatcggccttgtgagttggcccctggcttatgtgggtaaatttattcctgtgcccgtaagacctcttccggactatttcaaaccccgctgttgttggaaaccgccgcgccgagacgaggaggaaggtgggcagagctaaagcgcaacgagtgggcagtgtaaataggcacgtgataaaaaaatggagataaattgcactggttgattccatggtagcagcatcctggggatgtacgcataagatggcaggtagtcggcctcgtcgttttcttctaggagaagcagtcggaagaaaagaagtactatacagaagccaaacttgtctacccctatccagctggtgtgtctgctatgcggcagcgaaacttgagtcattagattgtagcctgaatgaaagcagcgctagcttgcgatgtagcagtacctttttttccctggcgatatcatctgactgtaaatttgtaaatgctttcggactacgagttgttcttatttttcatccacctcttctctacggaacgtttttttctatataagaaaataaagtcaacagagcagttctaaaacgactgttttttttttc

SEQ ID NO: 3406 - DNA, 3872 bp, Zea Mays
atgtggcagcgtgatgcgccgcaagaagcttccacgaagcttcatggccgctaccgcctcgagaacaagtccccattcccgaccgcaaaagcgggccgagccgaggaagaagagaacaaaacgaaacccgaagctttttcccccattcttcgctggatatacaggaggattttcagagtcagggaggggagttcgccgccgccgccggagatccgctcgccggacgagcgggccgcggcggaggaccccgccgaggcggaggcgggggaggtggtcttcgacgacgcgttcgacataccccataagaacgctccgcacgaccggttgcgccggtggaggcaagctgctcttgttcttaatgcttcacgacgttttagatatactcttgaccttaaaaaggaggaagagaaagagattataaggaggaagatccggtcccatgcgcaagttatacggcatttcttttcaaagaagctgggcaaaaagatatcagagaagcttatactggtataaatcttgcaacggcctctcgcagttttccaattgaactggaaaagcttaacacattaaacagggaccatgacagtgttcttcttcaagaaattggaggagttaagggattgtcagatttgttgaagagtaatttagagaagggagttagtccaaatgaggatgaattattacaaaggaagaatgtatatggatcaaatacatatccacgcaagaagagaaaaaacatactgcgttttgtatttgaagcttgccaagatttaactcttgtcattctgatgatagctgctgccatatcactaacattgggtatgactacagagggtgttgatgaaggatggtatgatggcggaagtatctttttagccgtttttcttgtgatacttgttactgcaacaagtgattataggcaatctctacagtttcgacatctgaatgaggagaaacagaacatacaagtggaggttgttagaggtggtaaaagatttggagcttcaatctttgaccttgttgttggtgatgtagttcctctcaaaattggtgatcaagttcctgctgatggtgtcctgatatctggccattctcttgcaatagatgaatcaagtatgactggagagtcaaaagttgtccacaaggatcaaaaggcaccattcttgatgtctggttgcaaggttgcagatggctatggttctatgttggtaacaggggtgggtacaaatactgaatggggtcagttgatggctaacctttcagaagataatggtgaagaaacaccattacaggttcgcttgaatggtgttgcaacttttattggtttggtgggcttgtctgttgctggtgcagtacttgttgtgctttggataaggtattttactggacataccgaaaatcctgatgggacacctcaatttgttgctggaactactggtgtgaagcaaggatttatgggggcaattagaattttgactatcgctgtgaccattgtagttgttgctgtgcctgagggactcccattggcagtaacactgacgcttgcatattccatgaaaaagatgatgcgagacaaagctctggtgaggcggctctcgtcatgtgaaacaatgggatcagctactacaatatgcagtgataagacaggaacccttacattgaataagatgacagtcgtggaagcatattttgctggaacaaagttggatccatgtgatgatgttagccagatgtcagacagtgcagcgtcacttattattgaaggaattgcgcagaacacaacaggaactgtatttctgccagaggatgggggagcagctgaacttactggttcgcctactgaaaaggccattctttcttggggccttaagatagggatggatttcgacgatgtgaggacaaaatcttcagttattcatgtttttccatttaactcggagaagaaacgtggcgctgttgcagtacagttagatgatggtgttcacatccactggaaaggtgcagctgaaatagtgttatcatcttgcaaaagctggctttccgtcgatggctctgttcagtcaatgagtgctgagaagcacgatgaattcaagagatcaatcgaagacatgggagcgaattcattacgctgtgttgcttttgcatactgttcctttgacattgaaaagatcccaatggaagacataacaagctgggagttgcctgaggatgacctgactctgcttggcatcataggaataaaggacccctgtcgcccaggtgtaagggatgctgtacgcctgtgcactactgctggtgttaaggtgcgcatggttacaggagataatattgaaacagctaaagctatagctctggagtgtggaatactagatgcaaatagtgttatttcagagccagttgtaatcgagggaaaagtgttccgtgagatgtctgaaagtgcaagaggagaggccgccgacaagataattgtgatggggagatcctcgccaaatgataaacttttgcttgtccaagctttaaaacgaaaaggccatgttgtagctgttactggtgatggcacaaatgatgcccctgcattgcacgaggccgatataggtctttcaatgggcatttccgggacagaagttgctaaagaaagctctgacattataatcttggatgatgacttcacgtcagttgtcaaggttgttcgttggggacgatctgtctacgctaatatccagaaattcattcagttccagctcaccgtcaatgttgctgcacttgtcattaatgtggttgctgctgtgtcctctggtgatgtgcccctaaatgctgttgagcttctgtgggtgaacctcataatggacacacttggagctcttgcattagcaaccgagcctccaacagacaaccttatgaagagaaatcctgttggtcgaagggaacctcttgttacaaatatcatgtggagaaacttgtttgttcaggccctttaccaagtagcaattcttctgattttcgattttgatggagtaaggattctgcgtctgcagaatgaaagccgatctgatgctgagaagataacaaatactttcatcttcaacacatttgtattttgccagatcttcaatgagttcaatgcacgaaaacccgaggaaaagaatgtcttcaaaggggtcacgaagaatcacctgttcatgggaataatcggtataacgacagtatttcagatactgataattcagttcctggggaagttcttcaaaatagtgaggcttggttggagactatggttggtttcagttgctatcggccttgtgagttggcccctggcttatgtgggtaaatttattcctgtgcccgtaagacctcttccggactatttcaaaccccgctgttgttggaaaccgccgcgccgagacgaggaggaaggtgggcagagctaaagcgcaacgagtgggcagtgtaaataggcacgtgataaaaaaatggagataaattgcactggttgattccatggtagcagcatcctggggatgtacgcataagatggcaggtagtcggcctcgtcgttttcttctaggagaagcagtcggaagaaaagaagtactatacagaagccaaacttgtctacccctatccagctggtgtgtctgctatgcggcagcgaaacttgagtcattagattgtagcctgaatgaaagcagcgctagcttgcgatgtagcagtacctttttttccctggcgatatcatctgactgtaaatttgtaaatgctttcggactacgagttgttcttatttttcatccacctcttctctacggaacgtttttttctatataagaaaataaagtcaacagagcagttctaaaacgactgttttttttttc

SEQ ID NO: 3407 - DNA, 3847 bp, Zea Mays
atgtggcagcgtgatgcgccgcaagaagcttccacgaagcttcatggccgctaccgcctcgagaacaagtccccattcccgaccgcaaaagcgggccgagccgaggaagaagagaacaaaacgaaacccgaagctttttcccccattcttcgctggatatacaggaggattttcagagtcagggaggggagttcgccgccgccgccggagatccgctcgccggacgagcgggccgcggcggaggaccccgccgaggcggaggcgggggaggtggtcttcgacgacgcgttcgacataccccataagaacgctccgcacgaccggttgcgccggtggaggcaagctgctcttgttcttaatgcttcacgacgttttagatatactcttgaccttaaaaaggaggaagagaaagagattataaggaggaagatccggtcccatgcgcaagttatacgggcagcatttcttttcaaagaagctgggcaaaaagatatcagagaagcttatactggtataaatcttgcaacggcctctcgcagttttccaattgaactggaaaagcttaacacattaaacagggaccatgacagtgttcttcttcaagaaattggaggagttaagggattgtcagatttgttgaagagtaatttagagaagggagttagtccaaatgaggatgaattattacaaaggaagaatgtatatggatcaaatacatatccacgcaagaagagaaaaaacatactgcgttttgtatttgaagcttgccaagatttaactcttgtcattctgatgatagctgctgccatatcactaacattgggtatgactacagagggtgttgatgaaggatggtatgatggcggaagtatctttttagccgtttttcttgtgatacttgttactgtttcgacatctgaatgaggagaaacagaacatacaagtggaggttgttagaggtggtaaaagatttggagcttcaatctttgaccttgttgttggtgatgtagttcctctcaaaattggtgatcaagttcctgctgatggtgtcctgatatctggccattctcttgcaatagatgaatcaagtatgactggagagtcaaaagttgtccacaaggatcaaaaggcaccattcttgatgtctggttgcaaggttgcagatggctatggttctatgttggtaacaggggtgggtacaaatactgaatggggtcagttgatggctaacctttcagaagataatggtgaagaaacaccattacaggttcgcttgaatggtgttgcaacttttattggtttggtgggcttgtctgttgctggtgcagtacttgttgtgctttggataaggtattttactggacataccgaaaatcctgatgggacacctcaatttgttgctggaactactggtgtgaagcaaggatttatgggggcaattagaattttgactatcgctgtgaccattgtagttgttgctgtgcctgagggactcccattggcagtaacactgacgcttgcatattccatgaaaaagatgatgcgagacaaagctctggtgaggcggctctcgtcatgtgaaacaatgggatcagctactacaatatgcagtgataagacaggaacccttacattgaataagatgacagtcgtggaagcatattttgctggaacaaagttggatccatgtgatgatgttagccagatgtcagacagtgcagcgtcacttattattgaaggaattgcgcagaacacaacaggaactgtatttctgccagaggatgggggagcagctgaacttactggttcgcctactgaaaaggccattctttcttggggccttaagatagggatggatttcgacgatgtgaggacaaaatcttcagttattcatgtttttccatttaactcggagaagaaacgtggcgctgttgcagtacagttagatgatggtgttcacatccactggaaaggtgcagctgaaatagtgttatcatcttgcaaaagctggctttccgtcgatggctctgttcagtcaatgagtgctgagaagcacgatgaattcaagagatcaatcgaagacatgggagcgaattcattacgctgtgttgcttttgcatactgttcctttgacattgaaaagatcccaatggaagacataacaagctgggagttgcctgaggatgacctgactctgcttggcatcataggaataaaggacccctgtcgcccaggtgtaagggatgctgtacgcctgtgcactactgctggtgttaaggtgcgcatggttacaggagataatattgaaacagctaaagctatagctctggagtgtggaatactagatgcaaatagtgttatttcagagccagttgtaatcgagggaaaagtgttccgtgagatgtctgaaagtgcaagaggagaggccgccgacaagataattgtgatggggagatcctcgccaaatgataaacttttgcttgtccaagctttaaaacgaaaaggccatgttgtagctgttactggtgatggcacaaatgatgcccctgcattgcacgaggccgatataggtctttcaatgggcatttccgggacagaagttgctaaagaaagctctgacattataatcttggatgatgacttcacgtcagttgtcaaggttgttcgttggggacgatctgtctacgctaatatccagaaattcattcagttccagctcaccgtcaatgttgctgcacttgtcattaatgtggttgctgctgtgtcctctggtgatgtgcccctaaatgctgttgagcttctgtgggtgaacctcataatggacacacttggagctcttgcattagcaaccgagcctccaacagacaaccttatgaagagaaatcctgttggtcgaagggaacctcttgttacaaatatcatgtggagaaacttgtttgttcaggccctttaccaagtagcaattcttctgattttcgattttgatggagtaaggattctgcgtctgcagaatgaaagccgatctgatgctgagaagataacaaatactttcatcttcaacacatttgtattttgccagatcttcaatgagttcaatgcacgaaaacccgaggaaaagaatgtcttcaaaggggtcacgaagaatcacctgttcatgggaataatcggtataacgacagtatttcagatactgataattcagttcctggggaagttcttcaaaatagtgaggcttggttggagactatggttggtttcagttgctatcggccttgtgagttggcccctggcttatgtgggtaaatttattcctgtgcccgtaagacctcttccggactatttcaaaccccgctgttgttggaaaccgccgcgccgagacgaggaggaaggtgggcagagctaaagcgcaacgagtgggcagtgtaaataggcacgtgataaaaaaatggagataaattgcactggttgattccatggtagcagcatcctggggatgtacgcataagatggcaggtagtcggcctcgtcgttttcttctaggagaagcagtcggaagaaaagaagtactatacagaagccaaacttgtctacccctatccagctggtgtgtctgctatgcggcagcgaaacttgagtcattagattgtagcctgaatgaaagcagcgctagcttgcgatgtagcagtacctttttttccctggcgatatcatctgactgtaaatttgtaaatgctttcggactacgagttgttcttatttttcatccacctcttctctacggaacgtttttttctatataagaaaataaagtcaacagagcagttctaaaacgactgttttttttttc

SEQ ID NO: 3408 - DNA, 4139 bp, Zea Mays
atgtggcagcgtgatgcgccgcaagaagcttccacgaagcttcatggccgctaccgcctcgagaacaagtccccattcccgaccgcaaaagcgggccgagccgaggaagaagagaacaaaacgaaacccgaagctttttcccccattcttcgctggatatacaggaggattttcagagtcagggaggtgagggagagagggcgaggcaactgtgtgtgtgtgtgtgtgtgtgagcaggcccgccgagaagaaccttcgcgacgccgaggtgagccgcgactgggttcccgccggccccacctggcgtccccagcgatctcgtggtgacgtctgtgtggcgcgcaggggtcggtcgcgcgcgggcgctcgtcggtcggtcggtcggtcggtgtcgtctctcctgcgaaggtgcccctggctgctgctgccggggtggtctgatcgggcatggcgcaggggagttcgccgccgccgccggagatccgctcgccggacgagcgggccgcggcggaggaccccgccgaggcggaggcgggggaggtggtcttcgacgacgcgttcgacataccccataagaacgctccgcacgaccggttgcgccggtggaggcaagctgctcttgttcttaatgcttcacgacgttttagatatactcttgaccttaaaaaggaggaagagaaagagattataaggaggaagatccggtcccatgcgcaagttatacgggcagcatttcttttcaaagaagctgggcaaaaagatatcagagaagcttatactggtataaatcttgcaacggcctctcgcagttttccaattgaactggaaaagcttaacacattaaacagggaccatgacagtgttcttcttcaagaaattggaggagttaagggattgtcagatttgttgaagagtaatttagagaagggagttagtccaaatgaggatgaattattacaaaggaagaatgtatatggatcaaatacatatccacgcaagaagagaaaaaacatactgcgttttgtatttgaagcttgccaagatttaactcttgtcattctgatgatagctgctgccatatcactaacattgggtatgactacagagggtgttgatgaaggatggtatgatggcggaagtatctttttagccgtttttcttgtgatacttgttactgcaacaagtgattataggcaatctctacagtttcgacatctgaatgaggagaaacagaacatacaagtggaggttgttagaggtggtaaaagatttggagcttcaatctttgaccttgttgttggtgatgtagttcctctcaaaattggtgatcaagttcctgctgatggtgtcctgatatctggccattctcttgcaatagatgaatcaagtatgactggagagtcaaaagttgtccacaaggatcaaaaggcaccattcttgatgtctggttgcaaggttgcagatggctatggttctatgttggggtgggtacaaatactgaatggggtcagttgatggctaacctttcagaagataatggtgaagaaacaccattacaggttcgcttgaatggtgttgcaacttttattggtttggtgggcttgtctgttgctggtgcagtacttgttgtgctttggataaggtattttactggacataccgaaaatcctgatgggacacctcaatttgttgctggaactactggtgtgaagcaaggatttatgggggcaattagaattttgactatcgctgtgaccattgtagttgttgctgtgcctgagggactcccattggcagtaacactgacgcttgcatattccatgaaaaagatgatgcgagacaaagctctggtgaggcggctctcgtcatgtgaaacaatgggatcagctactacaatatgcagtgataagacaggaacccttacattgaataagatgacagtcgtggaagcatattttgctggaacaaagttggatccatgtgatgatgttagccagatgtcagacagtgcagcgtcacttattattgaaggaattgcgcagaacacaacaggaactgtatttctgccagaggatgggggagcagctgaacttactggttcgcctactgaaaaggccattctttcttggggccttaagatagggatggatttcgacgatgtgaggacaaaatcttcagttattcatgtttttccatttaactcggagaagaaacgtggcgctgttgcagtacagttagatgatggtgttcacatccactggaaaggtgcagctgaaatagtgttatcatcttgcaaaagctggctttccgtcgatggctctgttcagtcaatgagtgctgagaagcacgatgaattcaagagatcaatcgaagacatgggagcgaattcattacgctgtgttgcttttgcatactgttcctttgacattgaaaagatcccaatggaagacataacaagctgggagttgcctgaggatgacctgactctgcttggcatcataggaataaaggacccctgtcgcccaggtgtaagggatgctgtacgcctgtgcactactgctggtgttaaggtgcgcatggttacaggagataatattgaaacagctaaagctatagctctggagtgtggaatactagatgcaaatagtgttatttcagagccagttgtaatcgagggaaaagtgttccgtgagatgtctgaaagtgcaagaggagaggccgccgacaagataattgtgatggggagatcctcgccaaatgataaacttttgcttgtccaagctttaaaacgaaaaggccatgttgtagctgttactggtgatggcacaaatgatgcccctgcattgcacgaggccgatataggtctttcaatgggcatttccgggacagaagttgctaaagaaagctctgacattataatcttggatgatgacttcacgtcagttgtcaaggttgttcgttggggacgatctgtctacgctaatatccagaaattcattcagttccagctcaccgtcaatgttgctgcacttgtcattaatgtggttgctgctgtgtcctctggtgatgtgcccctaaatgctgttgagcttctgtgggtgaacctcataatggacacacttggagctcttgcattagcaaccgagcctccaacagacaaccttatgaagagaaatcctgttggtcgaagggaacctcttgttacaaatatcatgtggagaaacttgtttgttcaggccctttaccaagtagcaattcttctgattttcgattttgatggagtaaggattctgcgtctgcagaatgaaagccgatctgatgctgagaagataacaaatactttcatcttcaacacatttgtattttgccagatcttcaatgagttcaatgcacgaaaacccgaggaaaagaatgtcttcaaaggggtcacgaagaatcacctgttcatgggaataatcggtataacgacagtatttcagatactgataattcagttcctggggaagttcttcaaaatagtgaggcttggttggagactatggttggtttcagttgctatcggccttgtgagttggcccctggcttatgtgggtaaatttattcctgtgcccgtaagacctcttccggactatttcaaaccccgctgttgttggaaaccgccgcgccgagacgaggaggaaggtgggcagagctaaagcgcaacgagtgggcagtgtaaataggcacgtgataaaaaaatggagataaattgcactggttgattccatggtagcagcatcctggggatgtacgcataagatggcaggtagtcggcctcgtcgttttcttctaggagaagcagtcggaagaaaagaagtactatacagaagccaaacttgtctacccctatccagctggtgtgtctgctatgcggcagcgaaacttgagtcattagattgtagcctgaatgaaagcagcgctagcttgcgatgtagcagtacctttttttccctggcgatatcatctgactgtaaatttgtaaatgctttcggactacgagttgttcttatttttcatccacctcttctctacggaacgtttttttctatataagaaaataaagtcaacagagcagttctaaaacgactgttttttttttc

SEQ ID NO: 3409 - DNA, 3829 bp, Zea Mays
atgtggcagcgtgatgcgccgcaagaagcttccacgaagcttcatggccgctaccgcctcgagaacaagtccccattcccgaccgcaaaagcgggccgagccgaggaagaagagaacaaaacgaaacccgaagctttttcccccattcttcgctggatatacaggaggattttcagagtcagggaggggagttcgccgccgccgccggagatccgctcgccggacgagcgggccgcggcggaggaccccgccgaggcggaggcgggggaggtggtcttcgacgacgcgttcgacataccccataagaacgctccgcacgaccggttgcgccggtggaggcaagctgctcttgttcttaatgcttcacgacgttttagatatactcttgaccttaaaaaggaggaagagaaagagattataaggaggaagatccggtcccatgcgcaagttatacgggcagcatttcttttcaaagaagctgggcaaaaagatatcagagttttccaattgaactggaaaagcttaacacattaaacagggaccatgacagtgttcttcttcaagaaattggaggagttaagggattgtcagatttgttgaagagtaatttagagaagggagttagtccaaatgaggatgaattattacaaaggaagaatgtatatggatcaaatacatatccacgcaagaagagaaaaaacatactgcgttttgtatttgaagcttgccaagatttaactcttgtcattctgatgatagctgctgccatatcactaacattgggtatgactacagagggtgttgatgaaggatggtatgatggcggaagtatctttttagccgtttttcttgtgatacttgttactgcaacaagtgattataggcaatctctacagtttcgacatctgaatgaggagaaacagaacatacaagtggaggttgttagaggtggtaaaagatttggagcttcaatctttgaccttgttgttggtgatgtagttcctctcaaaattggtgatcaagttcctgctgatggtgtcctgatatctggccattctcttgcaatagatgaatcaagtatgactggagagtcaaaagttgtccacaaggatcaaaaggcaccattcttgatgtctggttgcaaggttgcagatggctatggttctatgttggggtgggtacaaatactgaatggggtcagttgatggctaacctttcagaagataatggtgaagaaacaccattacaggttcgcttgaatggtgttgcaacttttattggtttggtgggcttgtctgttgctggtgcagtacttgttgtgctttggataaggtattttactggacataccgaaaatcctgatgggacacctcaatttgttgctggaactactggtgtgaagcaaggatttatgggggcaattagaattttgactatcgctgtgaccattgtagttgttgctgtgcctgagggactcccattggcagtaacactgacgcttgcatattccatgaaaaagatgatgcgagacaaagctctggtgaggcggctctcgtcatgtgaaacaatgggatcagctactacaatatgcagtgataagacaggaacccttacattgaataagatgacagtcgtggaagcatattttgctggaacaaagttggatccatgtgatgatgttagccagatgtcagacagtgcagcgtcacttattattgaaggaattgcgcagaacacaacaggaactgtatttctgccagaggatgggggagcagctgaacttactggttcgcctactgaaaaggccattctttcttggggccttaagatagggatggatttcgacgatgtgaggacaaaatcttcagttattcatgtttttccatttaactcggagaagaaacgtggcgctgttgcagtacagttagatgatggtgttcacatccactggaaaggtgcagctgaaatagtgttatcatcttgcaaaagctggctttccgtcgatggctctgttcagtcaatgagtgctgagaagcacgatgaattcaagagatcaatcgaagacatgggagcgaattcattacgctgtgttgcttttgcatactgttcctttgacattgaaaagatcccaatggaagacataacaagctgggagttgcctgaggatgacctgactctgcttggcatcataggaataaaggacccctgtcgcccaggtgtaagggatgctgtacgcctgtgcactactgctggtgttaaggtgcgcatggttacaggagataatattgaaacagctaaagctatagctctggagtgtggaatactagatgcaaatagtgttatttcagagccagttgtaatcgagggaaaagtgttccgtgagatgtctgaaagtgcaagaggagaggccgccgacaagataattgtgatggggagatcctcgccaaatgataaacttttgcttgtccaagctttaaaacgaaaaggccatgttgtagctgttactggtgatggcacaaatgatgcccctgcattgcacgaggccgatataggtctttcaatgggcatttccgggacagaagttgctaaagaaagctctgacattataatcttggatgatgacttcacgtcagttgtcaaggttgttcgttggggacgatctgtctacgctaatatccagaaattcattcagttccagctcaccgtcaatgttgctgcacttgtcattaatgtggttgctgctgtgtcctctggtgatgtgcccctaaatgctgttgagcttctgtgggtgaacctcataatggacacacttggagctcttgcattagcaaccgagcctccaacagacaaccttatgaagagaaatcctgttggtcgaagggaacctcttgttacaaatatcatgtggagaaacttgtttgttcaggccctttaccaagtagcaattcttctgattttcgattttgatggagtaaggattctgcgtctgcagaatgaaagccgatctgatgctgagaagataacaaatactttcatcttcaacacatttgtattttgccagatcttcaatgagttcaatgcacgaaaacccgaggaaaagaatgtcttcaaaggggtcacgaagaatcacctgttcatgggaataatcggtataacgacagtatttcagatactgataattcagttcctggggaagttcttcaaaatagtgaggcttggttggagactatggttggtttcagttgctatcggccttgtgagttggcccctggcttatgtgggtaaatttattcctgtgcccgtaagacctcttccggactatttcaaaccccgctgttgttggaaaccgccgcgccgagacgaggaggaaggtgggcagagctaaagcgcaacgagtgggcagtgtaaataggcacgtgataaaaaaatggagataaattgcactggttgattccatggtagcagcatcctggggatgtacgcataagatggcaggtagtcggcctcgtcgttttcttctaggagaagcagtcggaagaaaagaagtactatacagaagccaaacttgtctacccctatccagctggtgtgtctgctatgcggcagcgaaacttgagtcattagattgtagcctgaatgaaagcagcgctagcttgcgatgtagcagtacctttttttccctggcgatatcatctgactgtaaatttgtaaatgctttcggactacgagttgttcttatttttcatccacctcttctctacggaacgtttttttctatataagaaaataaagtcaacagagcagttctaaaacgactgttttttttttc

SEQ ID NO: 3410 - DNA, 3844 bp, Zea Mays
atgtggcagcgtgatgcgccgcaagaagcttccacgaagcttcatggccgctaccgcctcgagaacaagtccccattcccgaccgcaaaagcgggccgagccgaggaagaagagaacaaaacgaaacccgaagctttttcccccattcttcgctggatatacaggaggattttcagagtcagggaggggagttcgccgccgccgccggagatccgctcgccggacgagcgggccgcggcggaggaccccgccgaggcggaggcgggggaggtggtcttcgacgacgcgttcgacataccccataagaacgctccgcacgaccggttgcgccggtggaggcaagctgctcttgttcttaatgcttcacgacgttttagatatactcttgaccttaaaaaggaggaagagaaagagattataaggaggaagatccggtcccatgcgcaagttatacgggcagcatttcttttcaaagaagctgggcaaaaagatatcagagttttccaattgaactggaaaagcttaacacattaaacagggaccatgacagtgttcttcttcaagaaattggaggagttaagggattgtcagatttgttgaagagtaatttagagaagggagttagtccaaatgaggatgaattattacaaaggaagaatgtatatggatcaaatacatatccacgcaagaagagaaaaaacatactgcgttttgtatttgaagcttgccaagatttaactcttgtcattctgatgatagctgctgccatatcactaacattgggtatgactacagagggtgttgatgaaggatggtatgatggcggaagtatctttttagccgtttttcttgtgatacttgttactgcaacaagtgattataggcaatctctacagtttcgacatctgaatgaggagaaacagaacatacaagtggaggttgttagaggtggtaaaagatttggagcttcaatctttgaccttgttgttggtgatgtagttcctctcaaaattggtgatcaagtaagatggttcctgctgatggtgtcctgatatctggccattctcttgcaatagatgaatcaagtatgactggagagtcaaaagttgtccacaaggatcaaaaggcaccattcttgatgtctggttgcaaggttgcagatggctatggttctatgttggtaacaggggtgggtacaaatactgaatggggtcagttgatggctaacctttcagaagataatggtgaagaaacaccattacaggttcgcttgaatggtgttgcaacttttattggtttggtgggcttgtctgttgctggtgcagtacttgttgtgctttggataaggtattttactggacataccgaaaatcctgatgggacacctcaatttgttgctggaactactggtgtgaagcaaggatttatgggggcaattagaattttgactatcgctgtgaccattgtagttgttgctgtgcctgagggactcccattggcagtaacactgacgcttgcatattccatgaaaaagatgatgcgagacaaagctctggtgaggcggctctcgtcatgtgaaacaatgggatcagctactacaatatgcagtgataagacaggaacccttacattgaataagatgacagtcgtggaagcatattttgctggaacaaagttggatccatgtgatgatgttagccagatgtcagacagtgcagcgtcacttattattgaaggaattgcgcagaacacaacaggaactgtatttctgccagaggatgggggagcagctgaacttactggttcgcctactgaaaaggccattctttcttggggccttaagatagggatggatttcgacgatgtgaggacaaaatcttcagttattcatgtttttccatttaactcggagaagaaacgtggcgctgttgcagtacagttagatgatggtgttcacatccactggaaaggtgcagctgaaatagtgttatcatcttgcaaaagctggctttccgtcgatggctctgttcagtcaatgagtgctgagaagcacgatgaattcaagagatcaatcgaagacatgggagcgaattcattacgctgtgttgcttttgcatactgttcctttgacattgaaaagatcccaatggaagacataacaagctgggagttgcctgaggatgacctgactctgcttggcatcataggaataaaggacccctgtcgcccaggtgtaagggatgctgtacgcctgtgcactactgctggtgttaaggtgcgcatggttacaggagataatattgaaacagctaaagctatagctctggagtgtggaatactagatgcaaatagtgttatttcagagccagttgtaatcgagggaaaagtgttccgtgagatgtctgaaagtgcaagaggagaggccgccgacaagataattgtgatggggagatcctcgccaaatgataaacttttgcttgtccaagctttaaaacgaaaaggccatgttgtagctgttactggtgatggcacaaatgatgcccctgcattgcacgaggccgatataggtctttcaatgggcatttccgggacagaagttgctaaagaaagctctgacattataatcttggatgatgacttcacgtcagttgtcaaggttgttcgttggggacgatctgtctacgctaatatccagaaattcattcagttccagctcaccgtcaatgttgctgcacttgtcattaatgtggttgctgctgtgtcctctggtgatgtgcccctaaatgctgttgagcttctgtgggtgaacctcataatggacacacttggagctcttgcattagcaaccgagcctccaacagacaaccttatgaagagaaatcctgttggtcgaagggaacctcttgttacaaatatcatgtggagaaacttgtttgttcaggccctttaccaagtagcaattcttctgattttcgattttgatggagtaaggattctgcgtctgcagaatgaaagccgatctgatgctgagaagataacaaatactttcatcttcaacacatttgtattttgccagatcttcaatgagttcaatgcacgaaaacccgaggaaaagaatgtcttcaaaggggtcacgaagaatcacctgttcatgggaataatcggtataacgacagtatttcagatactgataattcagttcctggggaagttcttcaaaatagtgaggcttggttggagactatggttggtttcagttgctatcggccttgtgagttggcccctggcttatgtgggtaaatttattcctgtgcccgtaagacctcttccggactatttcaaaccccgctgttgttggaaaccgccgcgccgagacgaggaggaaggtgggcagagctaaagcgcaacgagtgggcagtgtaaataggcacgtgataaaaaaatggagataaattgcactggttgattccatggtagcagcatcctggggatgtacgcataagatggcaggtagtcggcctcgtcgttttcttctaggagaagcagtcggaagaaaagaagtactatacagaagccaaacttgtctacccctatccagctggtgtgtctgctatgcggcagcgaaacttgagtcattagattgtagcctgaatgaaagcagcgctagcttgcgatgtagcagtacctttttttccctggcgatatcatctgactgtaaatttgtaaatgctttcggactacgagttgttcttatttttcatccacctcttctctacggaacgtttttttctatataagaaaataaagtcaacagagcagttctaaaacgactgttttttttttc

SEQ ID NO: 3411 - DNA, 3825 bp, Zea Mays
atgtggcagcgtgatgcgccgcaagaagcttccacgaagcttcatggccgctaccgcctcgagaacaagtccccattcccgaccgcaaaagcgggccgagccgaggaagaagagaacaaaacgaaacccgaagctttttcccccattcttcgctggatatacaggaggattttcagagtcagggaggggagttcgccgccgccgccggagatccgctcgccggacgagcgggccgcggcggaggaccccgccgaggcggaggcgggggaggtggtcttcgacgacgcgttcgacataccccataagaacgctccgcacgaccggttgcgccggtggaggcaagctgctcttgttcttaatgcttcacgacgttttagatatactcttgaccttaaaaaggaggaagagaaagagattataaggaggaagatccggtcccatgcgcaagttatacggcatttcttttcaaagaagctgggcaaaaagatatcagagttttccaattgaactggaaaagcttaacacattaaacagggaccatgacagtgttcttcttcaagaaattggaggagttaagggattgtcagatttgttgaagagtaatttagagaagggagttagtccaaatgaggatgaattattacaaaggaagaatgtatatggatcaaatacatatccacgcaagaagagaaaaaacatactgcgttttgtatttgaagcttgccaagatttaactcttgtcattctgatgatagctgctgccatatcactaacattgggtatgactacagagggtgttgatgaaggatggtatgatggcggaagtatctttttagccgtttttcttgtgatacttgttactgcaacaagtgattataggcaatctctacagtttcgacatctgaatgaggagaaacagaacatacaagtggaggttgttagaggtggtaaaagatttggagcttcaatctttgaccttgttgttggtgatgtagttcctctcaaaattggtgatcaagttcctgctgatggtgtcctgatatctggccattctcttgcaatagatgaatcaagtatgactggagagtcaaaagttgtccacaaggatcaaaaggcaccattcttgatgtctggttgcaaggttgcagatggctatggttctatgttggggtgggtacaaatactgaatggggtcagttgatggctaacctttcagaagataatggtgaagaaacaccattacaggttcgcttgaatggtgttgcaacttttattggtttggtgggcttgtctgttgctggtgcagtacttgttgtgctttggataaggtattttactggacataccgaaaatcctgatgggacacctcaatttgttgctggaactactggtgtgaagcaaggatttatgggggcaattagaattttgactatcgctgtgaccattgtagttgttgctgtgcctgagggactcccattggcagtaacactgacgcttgcatattccatgaaaaagatgatgcgagacaaagctctggtgaggcggctctcgtcatgtgaaacaatgggatcagctactacaatatgcagtgataagacaggaacccttacattgaataagatgacagtcgtggaagcatattttgctggaacaaagttggatccatgtgatgatgttagccagatgtcagacagtgcagcgtcacttattattgaaggaattgcgcagaacacaacaggaactgtatttctgccagaggatgggggagcagctgaacttactggttcgcctactgaaaaggccattctttcttggggccttaagatagggatggatttcgacgatgtgaggacaaaatcttcagttattcatgtttttccatttaactcggagaagaaacgtggcgctgttgcagtacagttagatgatggtgttcacatccactggaaaggtgcagctgaaatagtgttatcatcttgcaaaagctggctttccgtcgatggctctgttcagtcaatgagtgctgagaagcacgatgaattcaagagatcaatcgaagacatgggagcgaattcattacgctgtgttgcttttgcatactgttcctttgacattgaaaagatcccaatggaagacataacaagctgggagttgcctgaggatgacctgactctgcttggcatcataggaataaaggacccctgtcgcccaggtgtaagggatgctgtacgcctgtgcactactgctggtgttaaggtgcgcatggttacaggagataatattgaaacagctaaagctatagctctggagtgtggaatactagatgcaaatagtgttatttcagagccagttgtaatcgagggaaaagtgttccgtgagatgtctgaaagtgcaagaggagaggccgccgacaagataattgtgatggggagatcctcgccaaatgataaacttttgcttgtccaagctttaaaacgaaaaggccatgttgtagctgttactggtgatggcacaaatgatgcccctgcattgcacgaggccgatataggtctttcaatgggcatttccgggacagaagttgctaaagaaagctctgacattataatcttggatgatgacttcacgtcagttgtcaaggttgttcgttggggacgatctgtctacgctaatatccagaaattcattcagttccagctcaccgtcaatgttgctgcacttgtcattaatgtggttgctgctgtgtcctctggtgatgtgcccctaaatgctgttgagcttctgtgggtgaacctcataatggacacacttggagctcttgcattagcaaccgagcctccaacagacaaccttatgaagagaaatcctgttggtcgaagggaacctcttgttacaaatatcatgtggagaaacttgtttgttcaggccctttaccaagtagcaattcttctgattttcgattttgatggagtaaggattctgcgtctgcagaatgaaagccgatctgatgctgagaagataacaaatactttcatcttcaacacatttgtattttgccagatcttcaatgagttcaatgcacgaaaacccgaggaaaagaatgtcttcaaaggggtcacgaagaatcacctgttcatgggaataatcggtataacgacagtatttcagatactgataattcagttcctggggaagttcttcaaaatagtgaggcttggttggagactatggttggtttcagttgctatcggccttgtgagttggcccctggcttatgtgggtaaatttattcctgtgcccgtaagacctcttccggactatttcaaaccccgctgttgttggaaaccgccgcgccgagacgaggaggaaggtgggcagagctaaagcgcaacgagtgggcagtgtaaataggcacgtgataaaaaaatggagataaattgcactggttgattccatggtagcagcatcctggggatgtacgcataagatggcaggtagtcggcctcgtcgttttcttctaggagaagcagtcggaagaaaagaagtactatacagaagccaaacttgtctacccctatccagctggtgtgtctgctatgcggcagcgaaacttgagtcattagattgtagcctgaatgaaagcagcgctagcttgcgatgtagcagtacctttttttccctggcgatatcatctgactgtaaatttgtaaatgctttcggactacgagttgttcttatttttcatccacctcttctctacggaacgtttttttctatataagaaaataaagtcaacagagcagttctaaaacgactgttttttttttc

SEQ ID NO: 3412 - DNA, 3847 bp, Zea Mays
gaggcaactgtgtgtgtgtgtgtgtgtgtgagcaggcccgccgagaagaaccttcgcgacgccgaggtgcccctggctgctgctgccggggtggtctgatcgggcatggcgcaggggagttcgccgccgccgccggagatccgctcgccggacgagcgggccgcggcggaggaccccgccgaggcggaggcgggggaggtggtcttcgacgacgcgttcgacataccccataagaacgctccgcacgaccggttgcgccggtggaggcaagctgctcttgttcttaatgcttcacgacgttttagatatactcttgaccttaaaaaggaggaagagaaagagattataaggaggaagatccggtcccatgcgcaagttatacgggcagcatttcttttcaaagaagctgggcaaaaagatatcagagttttccaattgaactggaaaagcttaacacattaaacagggaccatgacagtgttcttcttcaagaaattggaggagttaagggattgtcagatttgttgaagagtaatttagagaagggagttagtccaaatgaggatgaattattacaaaggaagaatgtatatggatcaaatacatatccacgcaagaagagaaaaaacatactgcgttttgtatttgaagcttgccaagatttaactcttgtcattctgatgatagctgctgccatatcactaacattgggtatgactacagagggtgttgatgaaggatggtatgatggcggaagtatctttttagccgtttttcttgtgatacttgttactgcaacaagtgattataggcaatctctacagtttcgacatctgaatgaggagaaacagaacatacaagtggaggttgttagaggtggtaaaagatttggagcttcaatctttgaccttgttgttggtgatgtagttcctctcaaaattggtgatcaagttcctgctgatggtgtcctgatatctggccattctcttgcaatagatgaatcaagtatgactggagagtcaaaagttgtccacaaggatcaaaaggcaccattcttgatgtctggttgcaaggttgcagatggctatggttctatgttggtaacaggggtgggtacaaatactgaatggggtcagttgatggctaacctttcagaagataatggtgaagaaacaccattacaggttattctctgtaaggatagtgcaaattctcgaatggacaattactgaaggctctctttggtttatgctttgaccctttttaggttcgcttgaatggtgttgcaacttttattggtttggtgggcttgtctgttgctggtgcagtacttgttgtgctttggataaggtattttactggacataccgaaaatcctgatgggacacctcaatttgttgctggaactactggtgtgaagcaaggatttatgggggcaattagaattttgactatcgctgtgaccattgtagttgttgctgtgcctgagggactcccattggcagtaacactgacgcttgcatattccatgaaaaagatgatgcgagacaaagctctggtgaggcggctctcgtcatgtgaaacaatgggatcagctactacaatatgcagtgataagacaggaacccttacattgaataagatgacagtcgtggaagcatattttgctggaacaaagttggatccatgtgatgatgttagccagatgtcagacagtgcagcgtcacttattattgaaggaattgcgcagaacacaacaggaactgtatttctgccagaggatgggggagcagctgaacttactggttcgcctactgaaaaggccattctttcttggggccttaagatagggatggatttcgacgatgtgaggacaaaatcttcagttattcatgtttttccatttaactcggagaagaaacgtggcgctgttgcagtacagttagatgatggtgttcacatccactggaaaggtgcagctgaaatagtgttatcatcttgcaaaagctggctttccgtcgatggctctgttcagtcaatgagtgctgagaagcacgatgaattcaagagatcaatcgaagacatgggagcgaattcattacgctgtgttgcttttgcatactgttcctttgacattgaaaagatcccaatggaagacataacaagctgggagttgcctgaggatgacctgactctgcttggcatcataggaataaaggacccctgtcgcccaggtgtaagggatgctgtacgcctgtgcactactgctggtgttaaggtgcgcatggttacaggagataatattgaaacagctaaagctatagctctggagtgtggaatactagatgcaaatagtgttatttcagagccagttgtaatcgagggaaaagtgttccgtgagatgtctgaaagtgcaagaggagaggccgccgacaagataattgtgatggggagatcctcgccaaatgataaacttttgcttgtccaagctttaaaacgaaaaggccatgttgtagctgttactggtgatggcacaaatgatgcccctgcattgcacgaggccgatataggtctttcaatgggcatttccgggacagaagttgctaaagaaagctctgacattataatcttggatgatgacttcacgtcagttgtcaaggttgttcgttggggacgatctgtctacgctaatatccagaaattcattcagttccagctcaccgtcaatgttgctgcacttgtcattaatgtggttgctgctgtgtcctctggtgatgtgcccctaaatgctgttgagcttctgtgggtgaacctcataatggacacacttggagctcttgcattagcaaccgagcctccaacagacaaccttatgaagagaaatcctgttggtcgaagggaacctcttgttacaaatatcatgtggagaaacttgtttgttcaggccctttaccaagtagcaattcttctgattttcgattttgatggagtaaggattctgcgtctgcagaatgaaagccgatctgatgctgagaagataacaaatactttcatcttcaacacatttgtattttgccagatcttcaatgagttcaatgcacgaaaacccgaggaaaagaatgtcttcaaaggggtcacgaagaatcacctgttcatgggaataatcggtataacgacagtatttcagatactgataattcagttcctggggaagttcttcaaaatagtgaggcttggttggagactatggttggtttcagttgctatcggccttgtgagttggcccctggcttatgtgggtaaatttattcctgtgcccgtaagacctcttccggactatttcaaaccccgctgttgttggaaaccgccgcgccgagacgaggaggaaggtgggcagagctaaagcgcaacgagtgggcagtgtaaataggcacgtgataaaaaaatggagataaattgcactggttgattccatggtagcagcatcctggggatgtacgcataagatggcaggtagtcggcctcgtcgttttcttctaggagaagcagtcggaagaaaagaagtactatacagaagccaaacttgtctacccctatccagctggtgtgtctgctatgcggcagcgaaacttgagtcattagattgtagcctgaatgaaagcagcgctagcttgcgatgtagcagtacctttttttccctggcgatatcatctgactgtaaatttgtaaatgctttcggactacgagttgttcttatttttcatccacctcttctctacggaacgtttttttctatataagaaaataaagtcaacagagcagttctaaaacgactgttttttttttc

SEQ ID NO: 3413 - DNA, 3642 bp, Zea Mays
cttatgtgagatttttttcatgcaagctgctcttgttcttaatgcttcacgacgttttagatatactcttgaccttaaaaaggaggaagagaaagagattataaggaggaagatccggtcccatgcgcaagttatacgggcagcatttcttttcaaagaagctgggcaaaaagatatcagagaagcttatactggtataaatcttgcaacggcctctcgcagttttccaattgaactggaaaagcttaacacattaaacagggaccatgacagtgttcttcttcaagaaattggaggagttaagggattgtcagatttgttgaagagtaatttagagaagggagttagtccaaatgaggatgaattattacaaaggaagaatgtatatggatcaaatacatatccacgcaagaagagaaaaaacatactgcgttttgtatttgaagcttgccaagatttaactcttgtcattctgatgatagctgctgccatatcactaacattgggtatgactacagagggtgttgatgaaggatggtatgatggcggaagtatctttttagccgtttttcttgtgatacttgttactgcaacaagtgattataggcaatctctacagtttcgacatctgaatgaggagaaacagaacatacaagtggaggttgttagaggtggtaaaagatttggagcttcaatctttgaccttgttgttggtgatgtagttcctctcaaaattggtgatcaagttcctgctgatggtgtcctgatatctggccattctcttgcaatagatgaatcaagtatgactggagagtcaaaagttgtccacaaggatcaaaaggcaccattcttgatgtctggttgcaaggttgcagatggctatggttctatgttggtaacaggggtgggtacaaatactgaatggggtcagttgatggctaacctttcagaagataatggtgaagaaacaccattacaggttattctctgtaaggatagtgcaaattctcgaatggacaattactgaaggctctctttggtttatgctttgaccctttttaggttcgcttgaatggtgttgcaacttttattggtttggtgggcttgtctgttgctggtgcagtacttgttgtgctttggataaggtattttactggacataccgaaaatcctgatgggacacctcaatttgttgctggaactactggtgtgaagcaaggatttatgggggcaattagaattttgactatcgctgtgaccattgtagttgttgctgtgcctgagggactcccattggcagtaacactgacgcttgcatattccatgaaaaagatgatgcgagacaaagctctggtgaggcggctctcgtcatgtgaaacaatgggatcagctactacaatatgcagtgataagacaggaacccttacattgaataagatgacagtcgtggaagcatattttgctggaacaaagttggatccatgtgatgatgttagccagatgtcagacagtgcagcgtcacttattattgaaggaattgcgcagaacacaacaggaactgtatttctgccagaggatgggggagcagctgaacttactggttcgcctactgaaaaggccattctttcttggggccttaagatagggatggatttcgacgatgtgaggacaaaatcttcagttattcatgtttttccatttaactcggagaagaaacgtggcgctgttgcagtacagttagatgatggtgttcacatccactggaaaggtgcagctgaaatagtgttatcatcttgcaaaagctggctttccgtcgatggctctgttcagtcaatgagtgctgagaagcacgatgaattcaagagatcaatcgaagacatgggagcgaattcattacgctgtgttgcttttgcatactgttcctttgacattgaaaagatcccaatggaagacataacaagctgggagttgcctgaggatgacctgactctgcttggcatcataggaataaaggacccctgtcgcccaggtgtaagggatgctgtacgcctgtgcactactgctggtgttaaggtgcgcatggttacaggagataatattgaaacagctaaagctatagctctggagtgtggaatactagatgcaaatagtgttatttcagagccagttgtaatcgagggaaaagtgttccgtgagatgtctgaaagtgcaagaggagaggccgccgacaagataattgtgatggggagatcctcgccaaatgataaacttttgcttgtccaagctttaaaacgaaaaggccatgttgtagctgttactggtgatggcacaaatgatgcccctgcattgcacgaggccgatataggtctttcaatgggcatttccgggacagaagttgctaaagaaagctctgacattataatcttggatgatgacttcacgtcagttgtcaaggttgttcgttggggacgatctgtctacgctaatatccagaaattcattcagttccagctcaccgtcaatgttgctgcacttgtcattaatgtggttgctgctgtgtcctctggtgatgtgcccctaaatgctgttgagcttctgtgggtgaacctcataatggacacacttggagctcttgcattagcaaccgagcctccaacagacaaccttatgaagagaaatcctgttggtcgaagggaacctcttgttacaaatatcatgtggagaaacttgtttgttcaggccctttaccaagtagcaattcttctgattttcgattttgatggagtaaggattctgcgtctgcagaatgaaagccgatctgatgctgagaagataacaaatactttcatcttcaacacatttgtattttgccagatcttcaatgagttcaatgcacgaaaacccgaggaaaagaatgtcttcaaaggggtcacgaagaatcacctgttcatgggaataatcggtataacgacagtatttcagatactgataattcagttcctggggaagttcttcaaaatagtgaggcttggttggagactatggttggtttcagttgctatcggccttgtgagttggcccctggcttatgtgggtaaatttattcctgtgcccgtaagacctcttccggactatttcaaaccccgctgttgttggaaaccgccgcgccgagacgaggaggaaggtgggcagagctaaagcgcaacgagtgggcagtgtaaataggcacgtgataaaaaaatggagataaattgcactggttgattccatggtagcagcatcctggggatgtacgcataagatggcaggtagtcggcctcgtcgttttcttctaggagaagcagtcggaagaaaagaagtactatacagaagccaaacttgtctacccctatccagctggtgtgtctgctatgcggcagcgaaacttgagtcattagattgtagcctgaatgaaagcagcgctagcttgcgatgtagcagtacctttttttccctggcgatatcatctgactgtaaatttgtaaatgctttcggactacgagttgttcttatttttcatccacctcttctctacggaacgtttttttctatataagaaaataaagtcaacagagcagttctaaaacgactgttttttttttc

SEQ ID NO: 3414 - DNA, 767 bp, Zea Mays
gtggaatcgaaccgcgcagctgatgcgttgcttttacccttccaagctggcggagatggagtggaagtggatggatggatcttatgatgcggcacatccatcatcatgatatatgtccaccgaatctactacgatcattgaccggcctgctagggaagaagtggagtgagaacaaacttaattcagtttgttcttaactgtagtcctaatggttccgttgtgcattaggagtatattctgctcctctactacacaacagacgtggtgtggaggttttgtcatacgttaaggactaaaagctggcggacttacataaccagcagcatagtgtggagaagaaaaccaaggaccttgaagcatcctttgaagccatgcaccttgatgatgaccaagaacaagtacactagggatcatgagaaaggagcaagaacaagtataaggagctggttgtattcttttcgttccttggattttttttttcatgaggtgtgagttcttaactggggagggtttttagtgagctaacattgcattaaggctccacctttatttgaagactagtttttgttatgtagtgtagcatgatctttttatgcattaatatggataaatgtcatctagataatcataaatgcgagctagagttcaaagagtttatttctattgaaaggcatgagcacgacaaagacaccgacgtgttagctagtcgtgccttgcgtatgacgcgatccgtgtgaaagtagtcatgtcatgcctagctagacaat

SEQ ID NO: 3415 - DNA, 3517 bp, Zea Mays
cgttcgtgggcagccgaaagcgaggcccggaagcggaaaggcgaagtccagatctcgccggtcacggcgggtcgatctcgcctgcatgcgtggaatctcggtggacatagtctacaagactacaacggtgatatggatatgcaactatgcaaggtgaaatttggtcaggatcggaaggaggtgcgataaaggcatggccttgggaagcccttgctaagtgcctctcatctacaccagaagaaattcatgaggctgcctcgttggttgaaaaatcctatatcgaccttaggaaccatgctacagttggtaacatgtgctctttgcctactgctgatgtgaaacacatgctcgcagaccactgccgattgaaagtttggagtgtaactagcatgacatttgctctttgggatgctaagactagggagcttttaaaagtatttggcatcgatggccaagtcgacttagctcgtcctgaggccccagtaatgccggaacaattcatagaggaagagattaaagcaaaacccacaaaaaaggagaaactgcaaggttctttaagtttctttcggaaatctaggaatgccttgatgggcgcagctgatgctgtacgcagagttgcaacaaaagggacatttgtggaagataatcggcgaaccgaagcggtggctcaagcaatgaatgggactatttggtctggttgtacagatggttcaattattgtgtgggatggaaatgggaatagactgcaagaatttcattaccatagctcttctgttcaatgcatagaggcactcggagagaggatctgggtgggctatgcaagtggtactattcaagttatggatgttgaaggtaaccttcaggcaggatggattggtcatagctgcccagtcataagcatggcagtcggcgattcttacattttttctttggcacatcatggtggcattcgaggatggtctctaagttcccctagccctcttgatgatattctacgctatgaattggctagcagggagctgtcatacacaaggctagagaaccttaaaatactggttgggacttggaatgttgcacaagagaaagcttgtcctgaagcgctaaagtcatggttgggtggtgcatttttcgatgttgggttggtggtggttggtttgcaagaggtcgagatgggtgctggagttcttgccatggcagcagccaaagaaagtgtaggacttgagggcagtaccaatgggcaatggtggatagacagtattggcaaaacacttgatgaggggatatccttccacagggttggttcaaggcagttggcaggattacttattgctgcatgggcaaggaatgaccttaagccacatgttggtgatgttgatgctgctgcagtgccatgtggctttggacgtgctattggcaacaaggtaagcgattgtcaaggcatcttcacttttttttgggtttctgaaggtaccaggtatcatctgtttggtctgtttattaccactaggcatcccctaggccctcccttctgcacaatataataaaaactttgtcagaaaaaaaggaaaagagaaactggtaatctgcatggcatttattggagatattgcaatatagaatcagcaaacttattaaaatgtgctgtttttttgttgctgtatcatggagaagcaatgtgctcgtctgtgctagaacaaaagaaatgaactgacagaaaaaaaaatattaacggacagctatgtttggaagattctaacttcactaatctgcagataagctcttggacaagtagttatatatttgaattcaatagttgattattaccttttcatgtctgtcaaagttgtgctcctaatttccttcaccgttctacattgtaactgtacaaatgaccgctgatacttctttcagggtggtgtaggattaagaataagagtctttgatcgcaggatatgttttgtaaacaatcattttgctgcacaccaagaaaatgttagccgccgtaatgctgattttgaccatatttatcggacaatgactttcaacaaaccccatggatctacaggctaatgaaaaccaagccgatgaagataggcctgagctggcagaagctgacatggttgtctttcttggtgatttcaactaccgacttgatggcatcacctatgatgaagcaagggatatggtctctcagaggagctttgactggcttagagaaagggaccaacttcgagcggaaatggaggcaggaaatgtgtttcaaggaatgcgtgaaggtcgaatcaaatttcctccgacctacaaattccaacgacaccagatgggtctctcaggtacgaagcttgcatggatgtcacagatagtgatcataaaccagtgagatgtacatttagcgttgatattgcgagagtagacgagctgataagaaggcaagagtatggaaaaatagtcgagtctaacaaaagggtacactctttgcttcgggagttgcattttgttccggacactatcgtcagcacaaacaacattatattggaaaaccaagaagatgtcatcctccgaataactaataactgcgaaactagtaaggctgcatttgaaatcctgtgtgaaggccaatcaatcagaaagcaagatggaactaaatctgagccagtcataagggcatcctttggctttccactttggcttgaggtccagccatcatccggcctcatcggaccaggagacacaacggaagtcgccgtgcaccacgaagacttcttcacgcaagaagagttcgtcgacggggtgcagcagagctggtggtgcgagaccaccagagacatagaggtcgtcctgtcggtgaacgtcacgggcgtcgcctcgaccgaggccgccacgcacaggatcaccgtccggcactgctgcccggcgcctccagccccgccgtccgctaacccacgcggccccattaccgactcacctagcgacgctgtgccaggtcccaagagtagccagtcgaatcacttgctgcgttctgacttcgcaaacttcggcagctccgaggtgcgcgacctgtgcggcgtgcggaagcggaacctgtagagacgagcagctcagttttgttttgcctggtgctgtggtttttttgctttctgtccgagtgtttagccggtggagtcttggatttcttgcctaagcttgggggtgggggtggggagagaagaagtggttctgctcttcatcttgttctgtacatatgcgtccctgacctctcacgtctcaccgtcctttgcatatcagatcaaaaagggaaaagaaaaaagtgtgtgtgtgcagttgttgcaaacatttttctttttacattcttacgttctagatgtggcattgaaattatgtggttagaaggtggagtacataattgtgtgtgtacttataatagaggtttacttcattgaatcaagctagtgtgaattatacacagaggcagtacatttaacttacagggcaattctcttggattaatgaggcagtg

SEQ ID NO: 3416 - DNA, 3189 bp, Zea Mays
cgttcgtgggcagccgaaagcgaggcccggaagcggaaaggcgaagtccagatctcgccggtcacggcgggtcgatctcgcctgcatgcgtggaatctcggtggacatagtctacaagactacaacggtgatatggatatgcaactatgcaaggtgaaatttggtcaggatcggaaggaggtgcgataaaggcatggccttgggaagcccttgctaagtgcctctcatctacaccagaagaaattcatgaggctgcctcgttggttgaaaaatcctatatcgaccttaggaaccatgctacagttggtaacatgtgctctttgcctactgctgatgtgaaacacatgctcgcagaccactgccgattgaaagtttggagtgtaactagcatgacatttgctctttgggatgctaagactagggagcttttaaaagtatttggcatcgatggccaagtcgacttagctcgtcctgaggccccagtaatgccggaacaattcatagaggaagagattaaagcaaaacccacaaaaaaggagaaactgcaaggttctttaagtttctttcggaaatctaggaatgccttgatgggcgcagctgatgctgtacgcagagttgcaacaaaagggacatttgtggaagataatcggcgaaccgaagcggtggctcaagcaatgaatgggactatttggtctggttgtacagatggttcaattattgtgtgggatggaaatgggaatagactgcaagaatttcattaccatagctcttctgttcaatgcatagaggcactcggagagaggatctgggtgggctatgcaagtggtactattcaagttatggatgttgaaggtaaccttcaggcaggatggattggtcatagctgcccagtcataagcatggcagtcggcgattcttacattttttctttggcacatcatggtggcattcgaggatggtctctaagttcccctagccctcttgatgatattctacgctatgaattggctagcagggagctgtcatacacaaggctagagaaccttaaaatactggttgggacttggaatgttgcacaagagaaagcttgtcctgaagcgctaaagtcatggttgggtggtgcatttttcgatgttgggttggtggtggttggtttgcaagaggtcgagatgggtgctggagttcttgccatggcagcagccaaagaaagtgtaggacttgagggcagtaccaatgggcaatggtggatagacagtattggcaaaacacttgatgaggggatatccttccacagggttggttcaaggcagttggcaggattacttattgctgcatgggcaaggaatgaccttaagccacatgttggtgatgttgatgctgctgcagtgccatgtggctttggacgtgctattggcaacaagggtggtgtaggattaagaataagagtctttgatcgcaggatatgttttgtaaacaatcattttgctgcacaccaagaaaatgttagccgccgtaatgctgattttgaccatatttatcggacaatgactttcaacaaaccccatggatctacagcttctgctacatctgtccaattgcataaagcagtgagtgctaatgaaaaccaagccgatgaagataggcctgagctggcagaagctgacatggttgtctttcttggtgatttcaactaccgacttgatggcatcacctatgatgaagcaagggatatggtctctcagaggagctttgactggcttagagaaagggaccaacttcgagcggaaatggaggcaggaaatgtgtttcaaggaatgcgtgaaggtcgaatcaaatttcctccgacctacaaattccaacgacaccagatgggtctctcagggtacgattcaggcgagaagaagagaatacctgcttggtgcgatagaatactatatcgtgatagccgttctgtatcaatgcctgaatgctcattagagtgtcctgttgtcgctgcaattacagcgtacgaagcttgcatggatgtcacagatagtgatcataaaccagtgagatgtacatttagcgttgatattgcgagagtagacgagctgataagaaggcaagagtatggaaaaatagtcgagtctaacaaaagggtacactctttgcttcgggagttgcattttgttccggacactatcgtcagcacaaacaacattatattggaaaaccaagaagatgtcatcctccgaataactaataactgcgaaactagtaaggctgcatttgaaatcctgtgtgaaggccaatcaatcagaaagcaagatggaactaaatctgagccagtcataagggcatcctttggctttccactttggcttgaggtccagccatcatccggcctcatcggaccaggagacacaacggaagtcgccgtgcaccacgaagacttcttcacgcaagaagagttcgtcgacggggtgcagcagagctggtggtgcgagaccaccagagacatagaggtcgtcctgtcggtgaacgtcacgggcgtcgcctcgaccgaggccgccacgcacaggatcaccgtccggcactgctgcccggcgcctccagccccgccgtccgctaacccacgcggccccattaccgactcacctagcgacgctgtgccaggtcccaagagtagccagtcgaatcacttgctgcgttctgacttcgcaaacttcggcagctccgaggtgcgcgacctgtgcggcgtgcggaagcggaacctgtagagacgagcagctcagttttgttttgcctggtgctgtggtttttttgctttctgtccgagtgtttagccggtggagtcttggatttcttgcctaagcttgggggtgggggtggggagagaagaagtggttctgctcttcatcttgttctgtacatatgcgtccctgacctctcacgtctcaccgtcctttgcatatcagatcaaaaagggaaaagaaaaaagtgtgtgtgtgcagttgttgcaaacatttttctttttacattcttacgttctagatgtggcattgaaattatgtggttagaaggtggagtacataattgtgtgtgtacttataatagaggtttacttcattgaatcaagctagtgtgaattatacacagaggcagtacatttaacttacagggcaattctcttggattaatgaggcagtg

SEQ ID NO: 3417 - DNA, 4078 bp, Zea Mays
agctccaaacggcttcaggttttaataactctgattacattggttgtcacggcagagccagccggcggccgcggaccttgatttgcctggcctgcctctgccgtggtcccggtccacgaggcatccacccatataaacccacacgccacagtccacgctctcatggttgccttccctgcacggcccctcccctgccccttccgctcccgcaacgggtgtgcctccgttccggccccgcccgaccttctctcacctctccagcgctcgcctcccgatcctcctgcagtcccacctccttcgccgccttctcatcgcttccaaaatcgcaaagccggatcgcggggacatggacccggacgacgagtccgcggcgcagcggaaagccgccgacttgcacctgccgcgcgtcacggagcctgcctccgcgcccgcacgcaccttctgcgccgcgcagcgcgtgctcagctacggtgacggccctgtcgcctccgcctcggcgcagcgctgcgcgtcgttcccgcagcgccacgggcacgggcacggccacggcgaggcggcgctcgcccctgctgcgtccttcgccgcctgggtcgacggcggcccgacgccgccttcggcggtggcagcggcactggagcgggccatgtcgcagtacgacggcgcgggcgacgcgctgccggagttcgtcggcgccggcgggggcgagggcatcttccgcgtgccgctccgcgcggcggtgcacccggcccgcccgccgccgctcgaggtgcgtccccacccgctgcgggagacgcaggtgggcgccttcctgcggacgctggtgtgcgacccgcggcggcggaagctgtgggccggcgccgagtccggggtccgggtgtggtgcctcgacgaggtgttccgcgggtggtggccaggcgccgggccgcggcgccgcggcgacgaggaggccgcgcccttcagggactccgtgccggtcccgcccgcgctctgcgccgcggtcgacagcgccaacgggctggtgtggacgggacacagggagggcaggatcagggcgtggcgcgtggaccacgccgcgcccgccggaggagaccccaccggcagcgcggccatgttcaaggaggccttcgcgtggcaggcgttcagccgcacgccggtgctcgccatcgtcgtcacgccgtacggatcggaaggaggtgcgataaaggcatggccttgggaagcccttgctaagtgcctctcatctacaccagaagaaattcatgaggctgcctcgttggttgaaaaatcctatatcgaccttaggaaccatgctacagttggtaacatgtgctctttgcctactgctgatgtgaaacacatgctcgcagaccactgccgattgaaagtttggagtgtaactagcatgacatttgctctttgggatgctaagactagggagcttttaaaagtatttggcatcgatggccaagtcgacttagctcgtcctgaggccccagtaatgccggaacaattcatagaggaagagattaaagcaaaacccacaaaaaaggagaaactgcaaggttctttaagtttctttcggaaatctaggaatgccttgatgggcgcagctgatgctgtacgcagagttgcaacaaaagggacatttgtggaagataatcggcgaaccgaagcggtggctcaagcaatgaatgggactatttggtctggttgtacagatggttcaattattgtgtgggatggaaatgggaatagactgcaagaatttcattaccatagctcttctgttcaatgcatagaggcactcggagagaggatctgggtgggctatgcaagtggtactattcaagttatggatgttgaaggtaaccttcaggcaggatggattggtcatagctgcccagtcataagcatggcagtcggcgattcttacattttttctttggcacatcatggtggcattcgaggatggtctctaagttcccctagccctcttgatgatattctacgctatgaattggctagcagggagctgtcatacacaaggctagagaaccttaaaatactggttgggacttggaatgttgcacaagagaaagcttgtcctgaagcgctaaagtcatggttgggtggtgcatttttcgatgttgggttggtggtggttggtttgcaagaggtcgagatgggtgctggagttcttgccatggcagcagccaaagaaagtgtaggacttgagggcagtaccaatgggcaatggtggatagacagtattggcaaaacacttgatgaggggatatccttccacagggttggttcaaggcagttggcaggattacttattgctgcatgggcaaggaatgaccttaagccacatgttggtgatgttgatgctgctgcagtgccatgtggctttggacgtgctattggcaacaagggtggtgtaggattaagaataagagtctttgatcgcaggatatgttttgtaaacaatcattttgctgcacaccaagaaaatgttagccgccgtaatgctgattttgaccatatttatcggacaatgactttcaacaaaccccatggatctacagcttctgctacatctgtccaattgcataaagcagtgagtgctaatgaaaaccaagccgatgaagataggcctgagctggcagaagctgacatggttgtctttcttggtgatttcaactaccgacttgatggcatcacctatgatgaagcaagggatatggtctctcagaggagctttgactggcttagagaaagggaccaacttcgagcggaaatggaggcaggaaatgtgtttcaaggaatgcgtgaaggtcgaatcaaatttcctccgacctacaaattccaacgacaccagatgggtctctcaggtacgaagcttgcatggatgtcacagatagtgatcataaaccagtgagatgtacatttagcgttgatattgcgagagtagacgagctgataagaaggcaagagtatggaaaaatagtcgagtctaacaaaagggtacactctttgcttcgggagttgcattttgttccggacactatcgtcagcacaaacaacattatattggaaaaccaagaagatgtcatcctccgaataactaataactgcgaaactagtaaggctgcatttgaaatcctgtgtgaaggccaatcaatcagaaagcaagatggaactaaatctgagccagtcataagggcatcctttggctttccactttggcttgaggtccagccatcatccggcctcatcggaccaggagacacaacggaagtcgccgtgcaccacgaagacttcttcacgcaagaagagttcgtcgacggggtgcagcagagctggtggtgcgagaccaccagagacatagaggtcgtcctgtcggtgaacgtcacgggcgtcgcctcgaccgaggccgccacgcacaggatcaccgtccggcactgctgcccggcgcctccagccccgccgtccgctaacccacgcggccccattaccgactcacctagcgacgctgtgccaggtcccaagagtagccagtcgaatcacttgctgcgttctgacttcgcaaacttcggcagctccgaggtgcgcgacctgtgcggcgtgcggaagcggaacctgtagagacgagcagctcagttttgttttgcctggtgctgtggtttttttgctttctgtccgagtgtttagccggtggagtcttggatttcttgcctaagcttgggggtgggggtggggagagaagaagtggttctgctcttcatcttgttctgtacatatgcgtccctgacctctcacgtctcaccgtcctttgcatatcagatcaaaaagggaaaagaaaaaagtgtgtgtgtgcagttgttgcaaacatttttctttttacattcttacgttctagatgtggcattgaaattatgtggttagaaggtggagtacataattgtgtgtgtacttataatagaggtttacttcattgaatcaagctagtgtgaattatacacagaggcagtacatttaacttacagggcaattctcttggattaatgaggcagtg

SEQ ID NO: 3418 - DNA, 4217 bp, Zea Mays
agctccaaacggcttcaggttttaataactctgattacattggttgtcacggcagagccagccggcggccgcggaccttgatttgcctggcctgcctctgccgtggtcccggtccacgaggcatccacccatataaacccacacgccacagtccacgctctcatggttgccttccctgcacggcccctcccctgccccttccgctcccgcaacgggtgtgcctccgttccggccccgcccgaccttctctcacctctccagcgctcgcctcccgatcctcctgcagtcccacctccttcgccgccttctcatcgcttccaaaatcgcaaagccggatcgcggggacatggacccggacgacgagtccgcggcgcagcggaaagccgccgacttgcacctgccgcgcgtcacggagcctgcctccgcgcccgcacgcaccttctgcgccgcgcagcgcgtgctcagctacggtgacggccctgtcgcctccgcctcggcgcagcgctgcgcgtcgttcccgcagcgccacgggcacgggcacggccacggcgaggcggcgctcgcccctgctgcgtccttcgccgcctgggtcgacggcggcccgacgccgccttcggcggtggcagcggcactggagcgggccatgtcgcagtacgacggcgcgggcgacgcgctgccggagttcgtcggcgccggcgggggcgagggcatcttccgcgtgccgctccgcgcggcggtgcacccggcccgcccgccgccgctcgaggtgcgtccccacccgctgcgggagacgcaggtgggcgccttcctgcggacgctggtgtgcgacccgcggcggcggaagctgtgggccggcgccgagtccggggtccgggtgtggtgcctcgacgaggtgttccgcgggtggtggccaggcgccgggccgcggcgccgcggcgacgaggaggccgcgcccttcagggactccgtgccggtcccgcccgcgctctgcgccgcggtcgacagcgccaacgggctggtgtggacgggacacagggagggcaggatcagggcgtggcgcgtggaccacgccgcgcccgccggaggagaccccaccggcagcgcggccatgttcaaggaggccttcgcgtggcaggcgttcagccgcacgccggtgctcgccatcgtcgtcacgccgtacggtgaaatttggtcaggatcggaaggaggtgcgataaaggcatggccttgggaagcccttgctaagtgcctctcatctacaccagaagaaattcatgaggctgcctcgttggttgaaaaatcctatatcgaccttaggaaccatgctacagttggtaacatgtgctctttgcctactgctgatgtgaaacacatgctcgcagaccactgccgattgaaagtttggagtgtaactagcatgacatttgctctttgggatgctaagactagggagcttttaaaagtatttggcatcgatggccaagtcgacttagctcgtcctgaggccccagtaatgccggaacaattcatagaggaagagattaaagcaaaacccacaaaaaaggagaaactgcaaggttctttaagtttctttcggaaatctaggaatgccttgatgggcgcagctgatgctgtacgcagagttgcaacaaaagggacatttgtggaagataatcggcgaaccgaagcggtggctcaagcaatgaatgggactatttggtctggttgtacagatggttcaattattgtgtgggatggaaatgggaatagactgcaagaatttcattaccatagctcttctgttcaatgcatagaggcactcggagagaggatctgggtgggctatgcaagtggtactattcaagttatggatgttgaaggtaaccttcaggcaggatggattggtcatagctgcccagtcataagcatggcagtcggcgattcttacattttttctttggcacatcatggtggcattcgaggatggtctctaagttcccctagccctcttgatgatattctacgctatgaattggctagcagggagctgtcatacacaaggctagagaaccttaaaatactggttgggacttggaatgttgcacaagagaaagcttgtcctgaagcgctaaagtcatggttgggtggtgcatttttcgatgttgggttggtggtggttggtttgcaagaggtcgagatgggtgctggagttcttgccatggcagcagccaaagaaagtgtaggacttgagggcagtaccaatgggcaatggtggatagacagtattggcaaaacacttgatgaggggatatccttccacagggttggttcaaggcagttggcaggattacttattgctgcatgggcaaggaatgaccttaagccacatgttggtgatgttgatgctgctgcagtgccatgtggctttggacgtgctattggcaacaagggtggtgtaggattaagaataagagtctttgatcgcaggatatgttttgtaaacaatcattttgctgcacaccaagaaaatgttagccgccgtaatgctgattttgaccatatttatcggacaatgactttcaacaaaccccatggatctacagcttctgctacatctgtccaattgcataaagcagtgagtgctaatgaaaaccaagccgatgaagataggcctgagctggcagaagctgacatggttgtctttcttggtgatttcaactaccgacttgatggcatcacctatgatgaagcaagggatatggtctctcagaggagctttgactggcttagagaaagggaccaacttcgagcggaaatggaggcaggaaatgtgtttcaaggaatgcgtgaaggtcgaatcaaatttcctccgacctacaaattccaacgacaccagatgggtctctcagggtacgattcaggcgagaagaagagaatacctgcttggtgcgatagaatactatatcgtgatagccgttctgtatcaatgcctgaatgctcattagagtgtcctgttgtcgctgcaattacagcgtacgaagcttgcatggatgtcacagatagtgatcataaaccagtgagatgtacatttagcgttgatattgcgagagtagacgagctgataagaaggcaagagtatggaaaaatagtcgagtctaacaaaagggtacactctttgcttcgggagttgcattttgttccggacactatcgtcagcacaaacaacattatattggaaaaccaagaagatgtcatcctccgaataactaataactgcgaaactagtaaggctgcatttgaaatcctgtgtgaaggccaatcaatcagaaagcaagatggaactaaatctgagccagtcataagggcatcctttggctttccactttggcttgaggtccagccatcatccggcctcatcggaccaggagacacaacggaagtcgccgtgcaccacgaagacttcttcacgcaagaagagttcgtcgacggggtgcagcagagctggtggtgcgagaccaccagagacatagaggtcgtcctgtcggtgaacgtcacgggcgtcgcctcgaccgaggccgccacgcacaggatcaccgtccggcactgctgcccggcgcctccagccccgccgtccgctaacccacgcggccccattaccgactcacctagcgacgctgtgccaggtcccaagagtagccagtcgaatcacttgctgcgttctgacttcgcaaacttcggcagctccgaggtgcgcgacctgtgcggcgtgcggaagcggaacctgtagagacgagcagctcagttttgttttgcctggtgctgtggtttttttgctttctgtccgagtgtttagccggtggagtcttggatttcttgcctaagcttgggggtgggggtggggagagaagaagtggttctgctcttcatcttgttctgtacatatgcgtccctgacctctcacgtctcaccgtcctttgcatatcagatcaaaaagggaaaagaaaaaagtgtgtgtgtgcagttgttgcaaacatttttctttttacattcttacgttctagatgtggcattgaaattatgtggttagaaggtggagtacataattgtgtgtgtacttataatagaggtttacttcattgaatcaagctagtgtgaattatacacagaggcagtacatttaacttacagggcaattctcttggattaatgaggcagtg

SEQ ID NO: 3419 - DNA, 4179 bp, Zea Mays
agctccaaacggcttcaggttttaataactctgattacattggttgtcacggcagagccagccggcggccgcggaccttgatttgcctggcctgcctctgccgtggtcccggtccacgaggcatccacccatataaacccacacgccacagtccacgctctcatggttgccttccctgcacggcccctcccctgccccttccgctcccgcaacgggtgtgcctccgttccggccccgcccgaccttctctcacctctccagcgctcgcctcccgatcctcctgcagtcccacctccttcgccgccttctcatcgcttccaaaatcgcaaagccggatcgcggggacatggacccggacgacgagtccgcggcgcagcggaaagccgccgacttgcacctgccgcgcgtcacggagcctgcctccgcgcccgcacgcaccttctgcgccgcgcagcgcgtgctcagctacggtgacggccctgtcgcctccgcctcggcgcagcgctgcgcgtcgttcccgcagcgccacgggcacgggcacggccacggcgaggcggcgctcgcccctgctgcgtccttcgccgcctgggtcgacggcggcccgacgccgccttcggcggtggcagcggcactggagcgggccatgtcgcagtacgacggcgcgggcgacgcgctgccggagttcgtcggcgccggcgggggcgagggcatcttccgcgtgccgctccgcgcggcggtgcacccggcccgcccgccgccgctcgaggtgcgtccccacccgctgcgggagacgcaggtgggcgccttcctgcggacgctggtgtgcgacccgcggcggcggaagctgtgggccggcgccgagtccggggtccgggtgtggtgcctcgacgaggtgttccgcgggtggtggccaggcgccgggccgcggcgccgcggcgacgaggaggccgcgcccttcagggactccgtgccggtcccgcccgcgctctgcgccgcggtcgacagcgccaacgggctggtgtggacgggacacagggagggcaggatcagggcgtggcgcgtggaccacgccgcgcccgccggaggagaccccaccggcagcgcggccatgttcaaggaggccttcgcgtggcaggcgttcagccgcacgccggtgctcgccatcgtcgtcacgccgtacggtgaaatttggtcaggatcggaaggaggtgcgataaaggcatggccttgggaagcccttgctaagtgcctctcatctacaccagaagaaattcatgaggctgcctcgttggttgaaaaatcctatatcgaccttaggaaccatgctacagttggtaacatgtgctctttgcctactgctgatgtgaaacacatgctcgcagaccactgccgattgaaagtttggagtgtaactagcatgacatttgctctttgggatgctaagactagggagcttttaaaagtatttggcatcgatggccaagtcgacttagctcgtcctgaggccccagtaatgccggaacaattcatagaggaagagattaaagcaaaacccacaaaaaaggagaaactgcaaggttctttaagtttctttcggaaatctaggaatgccttgatgggcgcagctgatgctgtacgcagagttgcaacaaaagggacatttgtggaagataatcggcgaaccgaagcggtggctcaagcaatgaatgggactatttggtctggttgtacagatggttcaattattgtgtgggatggaaatgggaatagactgcaagaatttcattaccatagctcttctgttcaatgcatagaggcactcggagagaggatctgggtgggctatgcaagtggtactattcaagttatggatgttgaaggtaaccttcaggcaggatggattggtcatagctgcccagtcataagcatggcagtcggcgattcttacattttttctttggcacatcatggtggcattcgaggatggtctctaagttcccctagccctcttgatgatattctacgctatgaattggctagcagggagctgtcatacacaaggctagagaaccttaaaatactggttgggacttggaatgttgcacaagagaaagcttgtcctgaagcgctaaagtcatggttgggtggtgcatttttcgatgttgggttggtggtggttggtttgcaagaggtcgagatgggtgctggagttcttgccatggcagcagccaaagaaagtgtaggacttgagggcagtaccaatgggcaatggtggatagacagtattggcaaaacacttgatgaggggatatccttccacagggttggttcaaggcagttggcaggattacttattgctgcatgggcaaggaatgaccttaagccacatgttggtgatgttgatgctgctgcagtgccatgtggctttggacgtgctattggcaacaaggatatgttttgtaaacaatcattttgctgcacaccaagaaaatgttagccgccgtaatgctgattttgaccatatttatcggacaatgactttcaacaaaccccatggatctacagcttctgctacatctgtccaattgcataaagcagtgagtgctaatgaaaaccaagccgatgaagataggcctgagctggcagaagctgacatggttgtctttcttggtgatttcaactaccgacttgatggcatcacctatgatgaagcaagggatatggtctctcagaggagctttgactggcttagagaaagggaccaacttcgagcggaaatggaggcaggaaatgtgtttcaaggaatgcgtgaaggtcgaatcaaatttcctccgacctacaaattccaacgacaccagatgggtctctcagggtacgattcaggcgagaagaagagaatacctgcttggtgcgatagaatactatatcgtgatagccgttctgtatcaatgcctgaatgctcattagagtgtcctgttgtcgctgcaattacagcgtacgaagcttgcatggatgtcacagatagtgatcataaaccagtgagatgtacatttagcgttgatattgcgagagtagacgagctgataagaaggcaagagtatggaaaaatagtcgagtctaacaaaagggtacactctttgcttcgggagttgcattttgttccggacactatcgtcagcacaaacaacattatattggaaaaccaagaagatgtcatcctccgaataactaataactgcgaaactagtaaggctgcatttgaaatcctgtgtgaaggccaatcaatcagaaagcaagatggaactaaatctgagccagtcataagggcatcctttggctttccactttggcttgaggtccagccatcatccggcctcatcggaccaggagacacaacggaagtcgccgtgcaccacgaagacttcttcacgcaagaagagttcgtcgacggggtgcagcagagctggtggtgcgagaccaccagagacatagaggtcgtcctgtcggtgaacgtcacgggcgtcgcctcgaccgaggccgccacgcacaggatcaccgtccggcactgctgcccggcgcctccagccccgccgtccgctaacccacgcggccccattaccgactcacctagcgacgctgtgccaggtcccaagagtagccagtcgaatcacttgctgcgttctgacttcgcaaacttcggcagctccgaggtgcgcgacctgtgcggcgtgcggaagcggaacctgtagagacgagcagctcagttttgttttgcctggtgctgtggtttttttgctttctgtccgagtgtttagccggtggagtcttggatttcttgcctaagcttgggggtgggggtggggagagaagaagtggttctgctcttcatcttgttctgtacatatgcgtccctgacctctcacgtctcaccgtcctttgcatatcagatcaaaaagggaaaagaaaaaagtgtgtgtgtgcagttgttgcaaacatttttctttttacattcttacgttctagatgtggcattgaaattatgtggttagaaggtggagtacataattgtgtgtgtacttataatagaggtttacttcattgaatcaagctagtgtgaattatacacagaggcagtacatttaacttacagggcaattctcttggattaatgaggcagtg

SEQ ID NO: 3420 - DNA, 4164 bp, Zea Mays
agctccaaacggcttcaggttttaataactctgattacattggttgtcacggcagagccagccggcggccgcggaccttgatttgcctggcctgcctctgccgtggtcccggtccacgaggcatccacccatataaacccacacgccacagtccacgctctcatggttgccttccctgcacggcccctcccctgccccttccgctcccgcaacgggtgtgcctccgttccggccccgcccgaccttctctcacctctccagcgctcgcctcccgatcctcctgcagtcccacctccttcgccgccttctcatcgcttccaaaatcgcaaagccggatcgcggggacatggacccggacgacgagtccgcggcgcagcggaaagccgccgacttgcacctgccgcgcgtcacggagcctgcctccgcgcccgcacgcaccttctgcgccgcgcagcgcgtgctcagctacggtgacggccctgtcgcctccgcctcggcgcagcgctgcgcgtcgttcccgcagcgccacgggcacgggcacggccacggcgaggcggcgctcgcccctgctgcgtccttcgccgcctgggtcgacggcggcccgacgccgccttcggcggtggcagcggcactggagcgggccatgtcgcagtacgacggcgcgggcgacgcgctgccggagttcgtcggcgccggcgggggcgagggcatcttccgcgtgccgctccgcgcggcggtgcacccggcccgcccgccgccgctcgaggtgcgtccccacccgctgcgggagacgcaggtgggcgccttcctgcggacgctggtgtgcgacccgcggcggcggaagctgtgggccggcgccgagtccggggtccgggtgtggtgcctcgacgaggtgttccgcgggtggtggccaggcgccgggccgcggcgccgcggcgacgaggaggccgcgcccttcagggactccgtgccggtcccgcccgcgctctgcgccgcggtcgacagcgccaacgggctggtgtggacgggacacagggagggcaggatcagggcgtggcgcgtggaccacgccgcgcccgccggaggagaccccaccggcagcgcggccatgttcaaggaggccttcgcgtggcaggcgttcagccgcacgccggtgctcgccatcgtcgtcacgccgtacggatcggaaggaggtgcgataaaggcatggccttgggaagcccttgctaagtgcctctcatctacaccagaagaaattcatgaggctgcctcgttggttgaaaaatcctatatcgaccttaggaaccatgctacagttggtaacatgtgctctttgcctactgctgatgtgaaacacatgctcgcagaccactgccgattgaaagtttggagtgtaactagcatgacatttgctctttgggatgctaagactagggagcttttaaaagtatttggcatcgatggccaagtcgacttagctcgtcctgaggccccagtaatgccggaacaattcatagaggaagagattaaagcaaaacccacaaaaaaggagaaactgcaaggttctttaagtttctttcggaaatctaggaatgccttgatgggcgcagctgatgctgtacgcagagttgcaacaaaagggacatttgtggaagataatcggcgaaccgaagcggtggctcaagcaatgaatgggactatttggtctggttgtacagatggttcaattattgtgtgggatggaaatgggaatagactgcaagaatttcattaccatagctcttctgttcaatgcatagaggcactcggagagaggatctgggtgggctatgcaagtggtactattcaagttatggatgttgaaggtaaccttcaggcaggatggattggtcatagctgcccagtcataagcatggcagtcggcgattcttacattttttctttggcacatcatggtggcattcgaggatggtctctaagttcccctagccctcttgatgatattctacgctatgaattggctagcagggagctgtcatacacaaggctagagaaccttaaaatactggttgggacttggaatgttgcacaagagaaagcttgtcctgaagcgctaaagtcatggttgggtggtgcatttttcgatgttgggttggtggtggttggtttgcaagaggtcgagatgggtgctggagttcttgccatggcagcagccaaagaaagtgtaggacttgagggcagtaccaatgggcaatggtggatagacagtattggcaaaacacttgatgaggggatatccttccacagggttggttcaaggcagttggcaggattacttattgctgcatgggcaaggaatgaccttaagccacatgttggtgatgttgatgctgctgcagtgccatgtggctttggacgtgctattggcaacaagggtggtgtaggattaagaataagagtctttgatcgcaggatatgttttgtaaacaatcattttgctgcacaccaagaaaatgttagccgccgtaatgctgattttgaccatatttatcggacaatgactttcaacaaaccccatggatctacaggctaatgaaaaccaagccgatgaagataggcctgagctggcagaagctgacatggttgtctttcttggtgatttcaactaccgacttgatggcatcacctatgatgaagcaagggatatggtctctcagaggagctttgactggcttagagaaagggaccaacttcgagcggaaatggaggcaggaaatgtgtttcaaggaatgcgtgaaggtcgaatcaaatttcctccgacctacaaattccaacgacaccagatgggtctctcagggtacgattcaggcgagaagaagagaatacctgcttggtgcgatagaatactatatcgtgatagccgttctgtatcaatgcctgaatgctcattagagtgtcctgttgtcgctgcaattacagcgtacgaagcttgcatggatgtcacagatagtgatcataaaccagtgagatgtacatttagcgttgatattgcgagagtagacgagctgataagaaggcaagagtatggaaaaatagtcgagtctaacaaaagggtacactctttgcttcgggagttgcattttgttccggacactatcgtcagcacaaacaacattatattggaaaaccaagaagatgtcatcctccgaataactaataactgcgaaactagtaaggctgcatttgaaatcctgtgtgaaggccaatcaatcagaaagcaagatggaactaaatctgagccagtcataagggcatcctttggctttccactttggcttgaggtccagccatcatccggcctcatcggaccaggagacacaacggaagtcgccgtgcaccacgaagacttcttcacgcaagaagagttcgtcgacggggtgcagcagagctggtggtgcgagaccaccagagacatagaggtcgtcctgtcggtgaacgtcacgggcgtcgcctcgaccgaggccgccacgcacaggatcaccgtccggcactgctgcccggcgcctccagccccgccgtccgctaacccacgcggccccattaccgactcacctagcgacgctgtgccaggtcccaagagtagccagtcgaatcacttgctgcgttctgacttcgcaaacttcggcagctccgaggtgcgcgacctgtgcggcgtgcggaagcggaacctgtagagacgagcagctcagttttgttttgcctggtgctgtggtttttttgctttctgtccgagtgtttagccggtggagtcttggatttcttgcctaagcttgggggtgggggtggggagagaagaagtggttctgctcttcatcttgttctgtacatatgcgtccctgacctctcacgtctcaccgtcctttgcatatcagatcaaaaagggaaaagaaaaaagtgtgtgtgtgcagttgttgcaaacatttttctttttacattcttacgttctagatgtggcattgaaattatgtggttagaaggtggagtacataattgtgtgtgtacttataatagaggtttacttcattgaatcaagctagtgtgaattatacacagaggcagtacatttaacttacagggcaattctcttggattaatgaggcagtg

SEQ ID NO: 3421 - DNA, 4072 bp, Zea Mays
agctccaaacggcttcaggttttaataactctgattacattggttgtcacggcagagccagccggcggccgcggaccttgatttgcctggcctgcctctgccgtggtcccggtccacgaggcatccacccatataaacccacacgccacagtccacgctctcatggttgccttccctgcacggcccctcccctgccccttccgctcccgcaacgggtgtgcctccgttccggccccgcccgaccttctctcacctctccagcgctcgcctcccgatcctcctgcagtcccacctccttcgccgccttctcatcgcttccaaaatcgcaaagccggatcgcggggacatggacccggacgacgagtccgcggcgcagcggaaagccgccgacttgcacctgccgcgcgtcacggagcctgcctccgcgcccgcacgcaccttctgcgccgcgcagcgcgtgctcagctacggtgacggccctgtcgcctccgcctcggcgcagcgctgcgcgtcgttcccgcagcgccacgggcacgggcacggccacggcgaggcggcgctcgcccctgctgcgtccttcgccgcctgggtcgacggcggcccgacgccgccttcggcggtggcagcggcactggagcgggccatgtcgcagtacgacggcgcgggcgacgcgctgccggagttcgtcggcgccggcgggggcgagggcatcttccgcgtgccgctccgcgcggcggtgcacccggcccgcccgccgccgctcgaggtgcgtccccacccgctgcgggagacgcaggtgggcgccttcctgcggacgctggtgtgcgacccgcggcggcggaagctgtgggccggcgccgagtccggggtccgggtgtggtgcctcgacgaggtgttccgcgggtggtggccaggcgccgggccgcggcgccgcggcgacgaggaggccgcgcccttcagggactccgtgccggtcccgcccgcgctctgcgccgcggtcgacagcgccaacgggctggtgtggacgggacacagggagggcaggatcagggcgtggcgcgtggaccacgccgcgcccgccggaggagaccccaccggcagcgcggccatgttcaaggaggccttcgcgtggcaggcgttcagccgcacgccggtgctcgccatcgtcgtcacgccgtacggatcggaaggaggtgcgataaaggcatggccttgggaagcccttgctaagtgcctctcatctacaccagaagaaattcatgaggctgcctcgttggttgaaaaatcctatatcgaccttaggaaccatgctacagttggtaacatgtgctctttgcctactgctgatgtgaaacacatgctcgcagaccactgccgattgaaagtttggagtgtaactagcatgacatttgctctttgggatgctaagactagggagcttttaaaagtatttggcatcgatggccaagtcgacttagctcgtcctgaggccccagtaatgccggaacaattcatagaggaagagattaaagcaaaacccacaaaaaaggagaaactgcaaggttctttaagtttctttcggaaatctaggaatgccttgatgggcgcagctgatgctgtacgcagagttgcaacaaaagggacatttgtggaagataatcggcgaaccgaagcggtggctcaagcaatgaatgggactatttggtctggttgtacagatggttcaattattgtgtgggatggaaatgggaatagactgcaagaatttcattaccatagctcttctgttcaatgcatagaggcactcggagagaggatctgggtgggctatgcaagtggtactattcaagttatggatgttgaaggtaaccttcaggcaggatggattggtcatagctgcccagtcataagcatggcagtcggcgattcttacattttttctttggcacatcatggtggcattcgaggatggtctctaagttcccctagccctcttgatgatattctacgctatgaattggctagcagggagctgtcatacacaaggctagagaaccttaaaatactggttgggacttggaatgttgcacaagagaaagcttgtcctgaagcgctaaagtcatggttgggtggtgcatttttcgatgttgggttggtggtggttggtttgcaagaggtcgagatgggtgctggagttcttgccatggcagcagccaaagaaagtgtaggacttgagggcagtaccaatgggcaatggtggatagacagtattggcaaaacacttgatgaggggatatccttccacagggttggttcaaggcagttggcaggattacttattgctgcatgggcaaggaatgaccttaagccacatgttggtgatgttgatgctgctgcagtgccatgtggctttggacgtgctattggcaacaagggtggtgtaggattaagaataagagtctttgatcgcaggatatgttttgtaaacaatcattttgctgcacaccaagaaaatgttagccgccgtaatgctgattttgaccatatttatcggacaatgactttcaacaaaccccatggatctacagcttctgctacatctgtccaattgcataaagcagctaatgaaaaccaagccgatgaagataggcctgagctggcagaagctgacatggttgtctttcttggtgatttcaactaccgacttgatggcatcacctatgatgaagcaagggatatggtctctcagaggagctttgactggcttagagaaagggaccaacttcgagcggaaatggaggcaggaaatgtgtttcaaggaatgcgtgaaggtcgaatcaaatttcctccgacctacaaattccaacgacaccagatgggtctctcaggtacgaagcttgcatggatgtcacagatagtgatcataaaccagtgagatgtacatttagcgttgatattgcgagagtagacgagctgataagaaggcaagagtatggaaaaatagtcgagtctaacaaaagggtacactctttgcttcgggagttgcattttgttccggacactatcgtcagcacaaacaacattatattggaaaaccaagaagatgtcatcctccgaataactaataactgcgaaactagtaaggctgcatttgaaatcctgtgtgaaggccaatcaatcagaaagcaagatggaactaaatctgagccagtcataagggcatcctttggctttccactttggcttgaggtccagccatcatccggcctcatcggaccaggagacacaacggaagtcgccgtgcaccacgaagacttcttcacgcaagaagagttcgtcgacggggtgcagcagagctggtggtgcgagaccaccagagacatagaggtcgtcctgtcggtgaacgtcacgggcgtcgcctcgaccgaggccgccacgcacaggatcaccgtccggcactgctgcccggcgcctccagccccgccgtccgctaacccacgcggccccattaccgactcacctagcgacgctgtgccaggtcccaagagtagccagtcgaatcacttgctgcgttctgacttcgcaaacttcggcagctccgaggtgcgcgacctgtgcggcgtgcggaagcggaacctgtagagacgagcagctcagttttgttttgcctggtgctgtggtttttttgctttctgtccgagtgtttagccggtggagtcttggatttcttgcctaagcttgggggtgggggtggggagagaagaagtggttctgctcttcatcttgttctgtacatatgcgtccctgacctctcacgtctcaccgtcctttgcatatcagatcaaaaagggaaaagaaaaaagtgtgtgtgtgcagttgttgcaaacatttttctttttacattcttacgttctagatgtggcattgaaattatgtggttagaaggtggagtacataattgtgtgtgtacttataatagaggtttacttcattgaatcaagctagtgtgaattatacacagaggcagtacatttaacttacagggcaattctcttggattaatgaggcagtg

SEQ ID NO: 3422 - DNA, 4030 bp, Zea Mays
agctccaaacggcttcaggttttaataactctgattacattggttgtcacggcagagccagccggcggccgcggaccttgatttgcctggcctgcctctgccgtggtcccggtccacgaggcatccacccatataaacccacacgccacagtccacgctctcatggttgccttccctgcacggcccctcccctgccccttccgctcccgcaacgggtgtgcctccgttccggccccgcccgaccttctctcacctctccagcgctcgcctcccgatcctcctgcagtcccacctccttcgccgccttctcatcgcttccaaaatcgcaaagccggatcgcggggacatggacccggacgacgagtccgcggcgcagcggaaagccgccgacttgcacctgccgcgcgtcacggagcctgcctccgcgcccgcacgcaccttctgcgccgcgcagcgcgtgctcagctacggtgacggccctgtcgcctccgcctcggcgcagcgctgcgcgtcgttcccgcagcgccacgggcacgggcacggccacggcgaggcggcgctcgcccctgctgcgtccttcgccgcctgggtcgacggcggcccgacgccgccttcggcggtggcagcggcactggagcgggccatgtcgcagtacgacggcgcgggcgacgcgctgccggagttcgtcggcgccggcgggggcgagggcatcttccgcgtgccgctccgcgcggcggtgcacccggcccgcccgccgccgctcgaggtgcgtccccacccgctgcgggagacgcaggtgggcgccttcctgcggacgctggtgtgcgacccgcggcggcggaagctgtgggccggcgccgagtccggggtccgggtgtggtgcctcgacgaggtgttccgcgggtggtggccaggcgccgggccgcggcgccgcggcgacgaggaggccgcgcccttcagggactccgtgccggtcccgcccgcgctctgcgccgcggtcgacagcgccaacgggctggtgtggacgggacacagggagggcaggatcagggcgtggcgcgtggaccacgccgcgcccgccggaggagaccccaccggcagcgcggccatgttcaaggaggccttcgcgtggcaggcgttcagccgcacgccggtgctcgccatcgtcgtcacgccgtacggatcggaaggaggtgcgataaaggcatggccttgggaagcccttgctaagtgcctctcatctacaccagaagaaattcatgaggctgcctcgttggttgaaaaatcctatatcgaccttaggaaccatgctacagttggtaacatgtgctctttgcctactgctgatgtgaaacacatgctcgcagaccactgccgattgaaagtttggagtgtaactagcatgacatttgctctttgggatgctaagactagggagcttttaaaagtatttggcatcgatggccaagtcgacttagctcgtcctgaggccccagtaatgccggaacaattcatagaggaagagattaaagcaaaacccacaaaaaaggagaaactgcaaggttctttaagtttctttcggaaatctaggaatgccttgatgggcgcagctgatgctgtacgcagagttgcaacaaaagggacatttgtggaagataatcggcgaaccgaagcggtggctcaagcaatgaatgggactatttggtctggttgtacagatggttcaattattgtgtgggatggaaatgggaatagactgcaagaatttcattaccatagctcttctgttcaatgcatagaggcactcggagagaggatctgggtgggctatgcaagtggtactattcaagttatggatgttgaaggtaaccttcaggcaggatggattggtcatagctgcccagtcataagcatggcagtcggcgattcttacattttttctttggcacatcatggtggcattcgaggatggtctctaagttcccctagccctcttgatgatattctacgctatgaattggctagcagggagctgtcatacacaaggctagagaaccttaaaatactggttgggacttggaatgttgcacaagagaaagcttgtcctgaagcgctaaagtcatggttgggtggtgcatttttcgatgttgggttggtggtggttggtttgcaagaggtcgagatgggtgctggagttcttgccatggcagcagccaaagaaagtgacttgagggcagtaccaatgggcaatggtggatagacagtattggcaaaacacttgatgaggggatatccttccacagggttggttcaaggcagttggcaggattacttattgctgcatgggcaaggaatgaccttaagccacatgttggtgatgttgatgctgctgcagtgccatgtggctttggacgtgctattggcaacaaggatatgttttgtaaacaatcattttgctgcacaccaagaaaatgttagccgccgtaatgctgattttgaccatatttatcggacaatgactttcaacaaaccccatggatctacagcttctgctacatctgtccaattgcataaagcagctaatgaaaaccaagccgatgaagataggcctgagctggcagaagctgacatggttgtctttcttggtgatttcaactaccgacttgatggcatcacctatgatgaagcaagggatatggtctctcagaggagctttgactggcttagagaaagggaccaacttcgagcggaaatggaggcaggaaatgtgtttcaaggaatgcgtgaaggtcgaatcaaatttcctccgacctacaaattccaacgacaccagatgggtctctcaggtacgaagcttgcatggatgtcacagatagtgatcataaaccagtgagatgtacatttagcgttgatattgcgagagtagacgagctgataagaaggcaagagtatggaaaaatagtcgagtctaacaaaagggtacactctttgcttcgggagttgcattttgttccggacactatcgtcagcacaaacaacattatattggaaaaccaagaagatgtcatcctccgaataactaataactgcgaaactagtaaggctgcatttgaaatcctgtgtgaaggccaatcaatcagaaagcaagatggaactaaatctgagccagtcataagggcatcctttggctttccactttggcttgaggtccagccatcatccggcctcatcggaccaggagacacaacggaagtcgccgtgcaccacgaagacttcttcacgcaagaagagttcgtcgacggggtgcagcagagctggtggtgcgagaccaccagagacatagaggtcgtcctgtcggtgaacgtcacgggcgtcgcctcgaccgaggccgccacgcacaggatcaccgtccggcactgctgcccggcgcctccagccccgccgtccgctaacccacgcggccccattaccgactcacctagcgacgctgtgccaggtcccaagagtagccagtcgaatcacttgctgcgttctgacttcgcaaacttcggcagctccgaggtgcgcgacctgtgcggcgtgcggaagcggaacctgtagagacgagcagctcagttttgttttgcctggtgctgtggtttttttgctttctgtccgagtgtttagccggtggagtcttggatttcttgcctaagcttgggggtgggggtggggagagaagaagtggttctgctcttcatcttgttctgtacatatgcgtccctgacctctcacgtctcaccgtcctttgcatatcagatcaaaaagggaaaagaaaaaagtgtgtgtgtgcagttgttgcaaacatttttctttttacattcttacgttctagatgtggcattgaaattatgtggttagaaggtggagtacataattgtgtgtgtacttataatagaggtttacttcattgaatcaagctagtgtgaattatacacagaggcagtacatttaacttacagggcaattctcttggattaatgaggcagtg

SEQ ID NO: 3423 - DNA, 4164 bp, Zea Mays
agctccaaacggcttcaggttttaataactctgattacattggttgtcacggcagagccagccggcggccgcggaccttgatttgcctggcctgcctctgccgtggtcccggtccacgaggcatccacccatataaacccacacgccacagtccacgctctcatggttgccttccctgcacggcccctcccctgccccttccgctcccgcaacgggtgtgcctccgttccggccccgcccgaccttctctcacctctccagcgctcgcctcccgatcctcctgcagtcccacctccttcgccgccttctcatcgcttccaaaatcgcaaagccggatcgcggggacatggacccggacgacgagtccgcggcgcagcggaaagccgccgacttgcacctgccgcgcgtcacggagcctgcctccgcgcccgcacgcaccttctgcgccgcgcagcgcgtgctcagctacggtgacggccctgtcgcctccgcctcggcgcagcgctgcgcgtcgttcccgcagcgccacgggcacgggcacggccacggcgaggcggcgctcgcccctgctgcgtccttcgccgcctgggtcgacggcggcccgacgccgccttcggcggtggcagcggcactggagcgggccatgtcgcagtacgacggcgcgggcgacgcgctgccggagttcgtcggcgccggcgggggcgagggcatcttccgcgtgccgctccgcgcggcggtgcacccggcccgcccgccgccgctcgaggtgcgtccccacccgctgcgggagacgcaggtgggcgccttcctgcggacgctggtgtgcgacccgcggcggcggaagctgtgggccggcgccgagtccggggtccgggtgtggtgcctcgacgaggtgttccgcgggtggtggccaggcgccgggccgcggcgccgcggcgacgaggaggccgcgcccttcagggactccgtgccggtcccgcccgcgctctgcgccgcggtcgacagcgccaacgggctggtgtggacgggacacagggagggcaggatcagggcgtggcgcgtggaccacgccgcgcccgccggaggagaccccaccggcagcgcggccatgttcaaggaggccttcgcgtggcaggcgttcagccgcacgccggtgctcgccatcgtcgtcacgccgtacggatcggaaggaggtgcgataaaggcatggccttgggaagcccttgctaagtgcctctcatctacaccagaagaaattcatgaggctgcctcgttggttgaaaaatcctatatcgaccttaggaaccatgctacagttggtaacatgtgctctttgcctactgctgatgtgaaacacatgctcgcagaccactgccgattgaaagtttggagtgtaactagcatgacatttgctctttgggatgctaagactagggagcttttaaaagtatttggcatcgatggccaagtcgacttagctcgtcctgaggccccagtaatgccggaacaattcatagaggaagagattaaagcaaaacccacaaaaaaggagaaactgcaaggttctttaagtttctttcggaaatctaggaatgccttgatgggcgcagctgatgctgtacgcagagttgcaacaaaagggacatttgtggaagataatcggcgaaccgaagcggtggctcaagcaatgaatgggactatttggtctggttgtacagatggttcaattattgtgtgggatggaaatgggaatagactgcaagaatttcattaccatagctcttctgttcaatgcatagaggcactcggagagaggatctgggtgggctatgcaagtggtactattcaagttatggatgttgaaggtaaccttcaggcaggatggattggtcatagctgcccagtcataagcatggcagtcggcgattcttacattttttctttggcacatcatggtggcattcgaggatggtctctaagttcccctagccctcttgatgatattctacgctatgaattggctagcagggagctgtcatacacaaggctagagaaccttaaaatactggttgggacttggaatgttgcacaagagaaagcttgtcctgaagcgctaaagtcatggttgggtggtgcatttttcgatgttgggttggtggtggttggtttgcaagaggtcgagatgggtgctggagttcttgccatggcagcagccaaagaaagtgtaggacttgagggcagtaccaatgggcaatggtggatagacagtattggcaaaacacttgatgaggggatatccttccacagggttggttcaaggcagttggcaggattacttattgctgcatgggcaaggaatgaccttaagccacatgttggtgatgttgatgctgctgcagtgccatgtggctttggacgtgctattggcaacaaggatatgttttgtaaacaatcattttgctgcacaccaagaaaatgttagccgccgtaatgctgattttgaccatatttatcggacaatgactttcaacaaaccccatggatctacagcttctgctacatctgtccaattgcataaagcagtgagtgctaatgaaaaccaagccgatgaagataggcctgagctggcagaagctgacatggttgtctttcttggtgatttcaactaccgacttgatggcatcacctatgatgaagcaagggatatggtctctcagaggagctttgactggcttagagaaagggaccaacttcgagcggaaatggaggcaggaaatgtgtttcaaggaatgcgtgaaggtcgaatcaaatttcctccgacctacaaattccaacgacaccagatgggtctctcagggtacgattcaggcgagaagaagagaatacctgcttggtgcgatagaatactatatcgtgatagccgttctgtatcaatgcctgaatgctcattagagtgtcctgttgtcgctgcaattacagcgtacgaagcttgcatggatgtcacagatagtgatcataaaccagtgagatgtacatttagcgttgatattgcgagagtagacgagctgataagaaggcaagagtatggaaaaatagtcgagtctaacaaaagggtacactctttgcttcgggagttgcattttgttccggacactatcgtcagcacaaacaacattatattggaaaaccaagaagatgtcatcctccgaataactaataactgcgaaactagtaaggctgcatttgaaatcctgtgtgaaggccaatcaatcagaaagcaagatggaactaaatctgagccagtcataagggcatcctttggctttccactttggcttgaggtccagccatcatccggcctcatcggaccaggagacacaacggaagtcgccgtgcaccacgaagacttcttcacgcaagaagagttcgtcgacggggtgcagcagagctggtggtgcgagaccaccagagacatagaggtcgtcctgtcggtgaacgtcacgggcgtcgcctcgaccgaggccgccacgcacaggatcaccgtccggcactgctgcccggcgcctccagccccgccgtccgctaacccacgcggccccattaccgactcacctagcgacgctgtgccaggtcccaagagtagccagtcgaatcacttgctgcgttctgacttcgcaaacttcggcagctccgaggtgcgcgacctgtgcggcgtgcggaagcggaacctgtagagacgagcagctcagttttgttttgcctggtgctgtggtttttttgctttctgtccgagtgtttagccggtggagtcttggatttcttgcctaagcttgggggtgggggtggggagagaagaagtggttctgctcttcatcttgttctgtacatatgcgtccctgacctctcacgtctcaccgtcctttgcatatcagatcaaaaagggaaaagaaaaaagtgtgtgtgtgcagttgttgcaaacatttttctttttacattcttacgttctagatgtggcattgaaattatgtggttagaaggtggagtacataattgtgtgtgtacttataatagaggtttacttcattgaatcaagctagtgtgaattatacacagaggcagtacatttaacttacagggcaattctcttggattaatgaggcagtg

SEQ ID NO: 3424 - DNA, 4198 bp, Zea Mays
agctccaaacggcttcaggttttaataactctgattacattggttgtcacggcagagccagccggcggccgcggaccttgatttgcctggcctgcctctgccgtggtcccggtccacgaggcatccacccatataaacccacacgccacagtccacgctctcatggttgccttccctgcacggcccctcccctgccccttccgctcccgcaacgggtgtgcctccgttccggccccgcccgaccttctctcacctctccagcgctcgcctcccgatcctcctgcagtcccacctccttcgccgccttctcatcgcttccaaaatcgcaaagccggatcgcggggacatggacccggacgacgagtccgcggcgcagcggaaagccgccgacttgcacctgccgcgcgtcacggagcctgcctccgcgcccgcacgcaccttctgcgccgcgcagcgcgtgctcagctacggtgacggccctgtcgcctccgcctcggcgcagcgctgcgcgtcgttcccgcagcgccacgggcacgggcacggccacggcgaggcggcgctcgcccctgctgcgtccttcgccgcctgggtcgacggcggcccgacgccgccttcggcggtggcagcggcactggagcgggccatgtcgcagtacgacggcgcgggcgacgcgctgccggagttcgtcggcgccggcgggggcgagggcatcttccgcgtgccgctccgcgcggcggtgcacccggcccgcccgccgccgctcgaggtgcgtccccacccgctgcgggagacgcaggtgggcgccttcctgcggacgctggtgtgcgacccgcggcggcggaagctgtgggccggcgccgagtccggggtccgggtgtggtgcctcgacgaggtgttccgcgggtggtggccaggcgccgggccgcggcgccgcggcgacgaggaggccgcgcccttcagggactccgtgccggtcccgcccgcgctctgcgccgcggtcgacagcgccaacgggctggtgtggacgggacacagggagggcaggatcagggcgtggcgcgtggaccacgccgcgcccgccggaggagaccccaccggcagcgcggccatgttcaaggaggccttcgcgtggcaggcgttcagccgcacgccggtgctcgccatcgtcgtcacgccgtacggatcggaaggaggtgcgataaaggcatggccttgggaagcccttgctaagtgcctctcatctacaccagaagaaattcatgaggctgcctcgttggttgaaaaatcctatatcgaccttaggaaccatgctacagttggtaacatgtgctctttgcctactgctgatgtgaaacacatgctcgcagaccactgccgattgaaagtttggagtgtaactagcatgacatttgctctttgggatgctaagactagggagcttttaaaagtatttggcatcgatggccaagtcgacttagctcgtcctgaggccccagtaatgccggaacaattcatagaggaagagattaaagcaaaacccacaaaaaaggagaaactgcaaggttctttaagtttctttcggaaatctaggaatgccttgatgggcgcagctgatgctgtacgcagagttgcaacaaaagggacatttgtggaagataatcggcgaaccgaagcggtggctcaagcaatgaatgggactatttggtctggttgtacagatggttcaattattgtgtgggatggaaatgggaatagactgcaagaatttcattaccatagctcttctgttcaatgcatagaggcactcggagagaggatctgggtgggctatgcaagtggtactattcaagttatggatgttgaaggtaaccttcaggcaggatggattggtcatagctgcccagtcataagcatggcagtcggcgattcttacattttttctttggcacatcatggtggcattcgaggatggtctctaagttcccctagccctcttgatgatattctacgctatgaattggctagcagggagctgtcatacacaaggctagagaaccttaaaatactggttgggacttggaatgttgcacaagagaaagcttgtcctgaagcgctaaagtcatggttgggtggtgcatttttcgatgttgggttggtggtggttggtttgcaagaggtcgagatgggtgctggagttcttgccatggcagcagccaaagaaagtgacttgagggcagtaccaatgggcaatggtggatagacagtattggcaaaacacttgatgaggggatatccttccacagggttggttcaaggcagttggcaggattacttattgctgcatgggcaaggaatgaccttaagccacatgttggtgatgttgatgctgctgcagtgccatgtggctttggacgtgctattggcaacaagggtggtgtaggattaagaataagagtctttgatcgcaggatatgttttgtaaacaatcattttgctgcacaccaagaaaatgttagccgccgtaatgctgattttgaccatatttatcggacaatgactttcaacaaaccccatggatctacagcttctgctacatctgtccaattgcataaagcagtgagtgctaatgaaaaccaagccgatgaagataggcctgagctggcagaagctgacatggttgtctttcttggtgatttcaactaccgacttgatggcatcacctatgatgaagcaagggatatggtctctcagaggagctttgactggcttagagaaagggaccaacttcgagcggaaatggaggcaggaaatgtgtttcaaggaatgcgtgaaggtcgaatcaaatttcctccgacctacaaattccaacgacaccagatgggtctctcagggtacgattcaggcgagaagaagagaatacctgcttggtgcgatagaatactatatcgtgatagccgttctgtatcaatgcctgaatgctcattagagtgtcctgttgtcgctgcaattacagcgtacgaagcttgcatggatgtcacagatagtgatcataaaccagtgagatgtacatttagcgttgatattgcgagagtagacgagctgataagaaggcaagagtatggaaaaatagtcgagtctaacaaaagggtacactctttgcttcgggagttgcattttgttccggacactatcgtcagcacaaacaacattatattggaaaaccaagaagatgtcatcctccgaataactaataactgcgaaactagtaaggctgcatttgaaatcctgtgtgaaggccaatcaatcagaaagcaagatggaactaaatctgagccagtcataagggcatcctttggctttccactttggcttgaggtccagccatcatccggcctcatcggaccaggagacacaacggaagtcgccgtgcaccacgaagacttcttcacgcaagaagagttcgtcgacggggtgcagcagagctggtggtgcgagaccaccagagacatagaggtcgtcctgtcggtgaacgtcacgggcgtcgcctcgaccgaggccgccacgcacaggatcaccgtccggcactgctgcccggcgcctccagccccgccgtccgctaacccacgcggccccattaccgactcacctagcgacgctgtgccaggtcccaagagtagccagtcgaatcacttgctgcgttctgacttcgcaaacttcggcagctccgaggtgcgcgacctgtgcggcgtgcggaagcggaacctgtagagacgagcagctcagttttgttttgcctggtgctgtggtttttttgctttctgtccgagtgtttagccggtggagtcttggatttcttgcctaagcttgggggtgggggtggggagagaagaagtggttctgctcttcatcttgttctgtacatatgcgtccctgacctctcacgtctcaccgtcctttgcatatcagatcaaaaagggaaaagaaaaaagtgtgtgtgtgcagttgttgcaaacatttttctttttacattcttacgttctagatgtggcattgaaattatgtggttagaaggtggagtacataattgtgtgtgtacttataatagaggtttacttcattgaatcaagctagtgtgaattatacacagaggcagtacatttaacttacagggcaattctcttggattaatgaggcagtg

SEQ ID NO: 3425 - DNA, 4055 bp, Zea Mays
agctccaaacggcttcaggttttaataactctgattacattggttgtcacggcagagccagccggcggccgcggaccttgatttgcctggcctgcctctgccgtggtcccggtccacgaggcatccacccatataaacccacacgccacagtccacgctctcatggttgccttccctgcacggcccctcccctgccccttccgctcccgcaacgggtgtgcctccgttccggccccgcccgaccttctctcacctctccagcgctcgcctcccgatcctcctgcagtcccacctccttcgccgccttctcatcgcttccaaaatcgcaaagccggatcgcggggacatggacccggacgacgagtccgcggcgcagcggaaagccgccgacttgcacctgccgcgcgtcacggagcctgcctccgcgcccgcacgcaccttctgcgccgcgcagcgcgtgctcagctacggtgacggccctgtcgcctccgcctcggcgcagcgctgcgcgtcgttcccgcagcgccacgggcacgggcacggccacggcgaggcggcgctcgcccctgctgcgtccttcgccgcctgggtcgacggcggcccgacgccgccttcggcggtggcagcggcactggagcgggccatgtcgcagtacgacggcgcgggcgacgcgctgccggagttcgtcggcgccggcgggggcgagggcatcttccgcgtgccgctccgcgcggcggtgcacccggcccgcccgccgccgctcgaggtgcgtccccacccgctgcgggagacgcaggtgggcgccttcctgcggacgctggtgtgcgacccgcggcggcggaagctgtgggccggcgccgagtccggggtccgggtgtggtgcctcgacgaggtgttccgcgggtggtggccaggcgccgggccgcggcgccgcggcgacgaggaggccgcgcccttcagggactccgtgccggtcccgcccgcgctctgcgccgcggtcgacagcgccaacgggctggtgtggacgggacacagggagggcaggatcagggcgtggcgcgtggaccacgccgcgcccgccggaggagaccccaccggcagcgcggccatgttcaaggaggccttcgcgtggcaggcgttcagccgcacgccggtgctcgccatcgtcgtcacgccgtacggtgaaatttggtcaggatcggaaggaggtgcgataaaggcatggccttgggaagcccttgctaagtgcctctcatctacaccagaagaaattcatgaggctgcctcgttggttgaaaaatcctatatcgaccttaggaaccatgctacagttggtaacatgtgctctttgcctactgctgatgtgaaacacatgctcgcagaccactgccgattgaaagtttggagtgtaactagcatgacatttgctctttgggatgctaagactagggagcttttaaaagtatttggcatcgatggccaagtcgacttagctcgtcctgaggccccagtaatgccggaacaattcatagaggaagagattaaagcaaaacccacaaaaaaggagaaactgcaaggttctttaagtttctttcggaaatctaggaatgccttgatgggcgcagctgatgctgtacgcagagttgcaacaaaagggacatttgtggaagataatcggcgaaccgaagcggtggctcaagcaatgaatgggactatttggtctggttgtacagatggttcaattattgtgtgggatggaaatgggaatagactgcaagaatttcattaccatagctcttctgttcaatgcatagaggcactcggagagaggatctgggtgggctatgcaagtggtactattcaagttatggatgttgaaggtaaccttcaggcaggatggattggtcatagctgcccagtcataagcatggcagtcggcgattcttacattttttctttggcacatcatggtggcattcgaggatggtctctaagttcccctagccctcttgatgatattctacgctatgaattggctagcagggagctgtcatacacaaggctagagaaccttaaaatactggttgggacttggaatgttgcacaagagaaagcttgtcctgaagcgctaaagtcatggttgggtggtgcatttttcgatgttgggttggtggtggttggtttgcaagaggtcgagatgggtgctggagttcttgccatggcagcagccaaagaaagtgtaggacttgagggcagtaccaatgggcaatggtggatagacagtattggcaaaacacttgatgaggggatatccttccacagggttggttcaaggcagttggcaggattacttattgctgcatgggcaaggaatgaccttaagccacatgttggtgatgttgatgctgctgcagtgccatgtggctttggacgtgctattggcaacaaggatatgttttgtaaacaatcattttgctgcacaccaagaaaatgttagccgccgtaatgctgattttgaccatatttatcggacaatgactttcaacaaaccccatggatctacagcttctgctacatctgtccaattgcataaagcagtgagtgctaatgaaaaccaagccgatgaagataggcctgagctggcagaagctgacatggttgtctttcttggtgatttcaactaccgacttgatggcatcacctatgatgaagcaagggatatggtctctcagaggagctttgactggcttagagaaagggaccaacttcgagcggaaatggaggcaggaaatgtgtttcaaggaatgcgtgaaggtcgaatcaaatttcctccgacctacaaattccaacgacaccagatgggtctctcaggtacgaagcttgcatggatgtcacagatagtgatcataaaccagtgagatgtacatttagcgttgatattgcgagagtagacgagctgataagaaggcaagagtatggaaaaatagtcgagtctaacaaaagggtacactctttgcttcgggagttgcattttgttccggacactatcgtcagcacaaacaacattatattggaaaaccaagaagatgtcatcctccgaataactaataactgcgaaactagtaaggctgcatttgaaatcctgtgtgaaggccaatcaatcagaaagcaagatggaactaaatctgagccagtcataagggcatcctttggctttccactttggcttgaggtccagccatcatccggcctcatcggaccaggagacacaacggaagtcgccgtgcaccacgaagacttcttcacgcaagaagagttcgtcgacggggtgcagcagagctggtggtgcgagaccaccagagacatagaggtcgtcctgtcggtgaacgtcacgggcgtcgcctcgaccgaggccgccacgcacaggatcaccgtccggcactgctgcccggcgcctccagccccgccgtccgctaacccacgcggccccattaccgactcacctagcgacgctgtgccaggtcccaagagtagccagtcgaatcacttgctgcgttctgacttcgcaaacttcggcagctccgaggtgcgcgacctgtgcggcgtgcggaagcggaacctgtagagacgagcagctcagttttgttttgcctggtgctgtggtttttttgctttctgtccgagtgtttagccggtggagtcttggatttcttgcctaagcttgggggtgggggtggggagagaagaagtggttctgctcttcatcttgttctgtacatatgcgtccctgacctctcacgtctcaccgtcctttgcatatcagatcaaaaagggaaaagaaaaaagtgtgtgtgtgcagttgttgcaaacatttttctttttacattcttacgttctagatgtggcattgaaattatgtggttagaaggtggagtacataattgtgtgtgtacttataatagaggtttacttcattgaatcaagctagtgtgaattatacacagaggcagtacatttaacttacagggcaattctcttggattaatgaggcagtg

SEQ ID NO: 3426 - DNA, 1083 bp, Zea Mays
ctaaggcccaataatataggagcccatccactccgatccagccatccgactcggttacaacagtccacatcccagcagttcgtccgctagggttttagcccggtaccccgaatcccgctcctccgccgcctcgcgtccacccttcctcttggcgcgctccgatccaagagatggcggtgccgctgctgacaaagaagatcgtgaagaagcgggtcaagcagttcaagaggccccatctcgaccgctataagtgccttaagccaagctggcgcaggccaaagggtattgactcccgtgtcaggaggaagttcaagggatgcaccttgatgcccaacattggttacggctctgacaaatcaaccaggcactacctccccaacaagttcaagaagtttgtggtgcacaatgtctctgagctggagttgctcatgatgcacaacagaacctactgtgccgagatcgcccacaacgtttcaaccaagaagcgcaaggagattgttgaacgtgccgcgcagctcgacattgtggtcaccaacaagctcgccaggctccgcagccaggaggatgagtagtctggtttcttgtcacaacggccaaatagatcctgccattcccggctgtaggaaactactctgctttgtgccttgttagtacttagaataccagacatttctacatttttggtaccagtagcgacttctatgtggcatattctactgttatcttgcgtcttaattacctgcacctcatggtttcattggtgtcgtatgtcatccttgcattggtgggcaattcatggccgcgcagggtgcgcgtatggtggttttgcttattttatccagtctatgggtagcaaagggattgttgtatggttgcatgacaagtttggtcaggtttgctaaaatgatggatttgtttgccctctaccatttgggctgttgctggctagcgcacaacactactggataggttaatgcaagtatgcaatgtactctatcccacgtacagtttttaatgcaaaaaatgcaatatacttgttatgatacaagagcctctctaaatgtgtgtttatttttaccaaac

SEQ ID NO: 3427 - DNA, 1951 bp, Zea Mays
aaaaaagttaggcacgtaaaaaataaaataaaataaaataaatgaaattacgttatcggaggaagtactgaacccgttagggtgccggcgggaggagggggcttaaaaggggcaccgcagtggccaatggcgcagccagaaaaaggcagcctcctcccccaacccaagtctctctctctctcccaaaccaaaagaaggcttccacttccagctgcagcggagcatcgccagttcagagttcaccaccacgcctttgacctccagcccatagcccaatcccgcaagcatccatccacgcccaccgcacccgctataaaatctccccctctgctcccgattcgccacctaaaggaggcgcctttccccaaatccaccaccaccgagaaacaaccgcaggaaatccgctcggccctcggctccggtcactctgttgcggccacgatgaaagagggcagacccggcgccggcgactacattgccagcctgctaagctcgtcgccgaggctcgacttcggcggggaggaggaggaggactgcctggacaggttctgcggcgacccggggttcgcggctcgcgcggcgcggctgtccagcttcagcgggcagcgcttcgccgtcaccgcgggcctcttcgggctgcccccgccgctgcccgccgcgagcggcggcggcgagttcgccgggtcccgggaggcgtcgtcggtgtcggacccggcgtcggcgatgaaggacgccaatgccaagaagcggaaggcgcccgcggcggcggcggccaagggcaaaggcagggagccatctgcgcaggcacaggcaggggagccgaagggtccggacgccaagaggtgctgcaaggcggagggaggcgagggggaggaggggagccccgtgaagctgcccaagccggagcaggccggcagcgacagctccgtcgaggacggcggcgcgcagaaccagaagccgccgccgccggtgaagggaaagaatgccaagccggtggagcctcccagggactacgtccatgtccgggccaggagagggcaggctaccgacagccacagcctcgcagagagggtgagaagggagaggatcagccagaggatgaaggtccttcaggacctggtgccaggatgcaacaaggtgatcggcaaggcgctgatgctcgacgagatcataaactacgtgcagtcgctgcaacggcaggtcgagttcctctccatgaagctcgcaaccgtcaacccactggacctgagcaacctgcccacgctcctacaaaaagatatgttccaggcctgcggcgcttcggcgagctcggtcttctcgctggagagctgcagcccggggttcccgttcggcgggcaaggggacgtgttccagtccttcgtcccgaacggcctggagaacccgtgcggcggcctgaacccgctggacctggctctgtcccaggctaccggcgggcagttcggtttccaggacggaacggccggcacaaacctgcagcaaaggaactactgggaggaggaggaggaggacctgcagagcgtgttccacatcgacgacaacgggcagagccaggagcacggggcctcagcttcagcacaaagcttccatggtcagcttcaaccacaagagggccacatgaagatggagttcttctgatcgggcctcgacacccagccgccgacggccgagggagcgacctgtacatagcgaagactcgaggcccttccttgcccttggagaggcgagttcttcgctcgccgtagcgtgaaccagggggtgggcgatcgtgtgatttctttgaacgttttcgatccggcgattaatttgattgattaacacagccaccccgacgatagcgtacgtagcaatcacccgaacagtgaagctgtcacttttgtgtataagataatgcatatggtgcagatattagtatcaccggcgcttctctctc

SEQ ID NO: 3428 - DNA, 1674 bp, Zea Mays
ggcagcctcctcccccaacccaagtctctctctctctcccaaaccaaaagaaggcttccacttccagctgcagcggagcatcgccagttcagagttcaccaccacgcctttgacctccagcccatagcccaatcccgcaagcatccatccacgcccaccgcacccgctataaaatctccccctctgctcccgattcgccacctaaaggaggcgcctttccccaaatccaccaccaccgagaaacaaccgcaggaaatccgctcggccctcggctccggtcactctgttgcggccacgatgaaagagggcagacccggcgccggcgactacattgccagcctgctaagctcgtcgccgaggctcgacttcggcggggaggaggaggaggactgcctggacaggttctgcggcgacccggggttcgcggctcgcgcggcgcggctgtccagcttcagcgggcagcgcttcgccgtcaccgcgggcctcttcgggctgcccccgccgctgcccgccgcgagcggcggcggcgagttcgccgggtcccgggaggcgtcgtcggtgtcggacccggcgtcggcgatgaaggacgccaatgccaagaagcggaaggcgcccgcggcggcggcggccaagggcaaaggcagggagccatctgcgcaggcacaggcaggggagccgaagggtccggacgccaagaggtgctgcaaggcggagggaggcgagggggaggaggggagccccgtgaagctgcccaagccggagcaggccggcagcgacagctccgtcgaggacggcggcgcgcagaaccagaagccgccgccgccggtgaagggaaagaatgccaagccggtggagcctcccagggactacgtccatgtccgggccaggagagggcaggctaccgacagccacagcctcgcagagagggtgagaagggagaggatcagccagaggatgaaggtccttcaggacctggtgccaggatgcaacaaggtgatcggcaaggcgctgatgctcgacgagatcataaactacgtgcagtcgctgcaacggcaggtcgagttcctctccatgaagctcgcaaccgtcaacccactggacctgagcaacctgcccacgctcctacaaaaagatcaaaggaactactgggaggaggaggaggaggacctgcagagcgtgttccacatcgacgacaacgggcagagccaggagcacggggcctcagcttcagcacaaagcttccatggtcagcttcaaccacaagagggccacatgaagatggagttcttctgatcgggcctcgacacccagccgccgacggccgagggagcgacctgtacatagcgaagactcgaggtacaagtacaaaagcaccagcggcggtggcggcggcggggacggaagctctgaagctatagctaacagcaagtccgtacatgtaggcccttccttgcccttggagaggcgagttcttcgctcgccgtagcgtgaaccagggggtgggcgatcgtgtgatttctttgaacgttttcgatccggcgattaatttgattgattaacacagccaccccgacgatagcgtacgtagcaatcacccgaacagtgaagctgtcacttttgtgtataagataatgcatatggtgcagatattagtatcaccggcgcttctctctc

SEQ ID NO: 3429 - DNA, 4394 bp, Zea Mays
acatatgcgatgtgaagaatttttttccatggagcccaccccgcaaccctcgaacaccgccgcccaccatgcccagctcccgtagcgccgcacacccccagaaaccggcagcgacagccgggagtacatcccaccctcccctccaacgccgccgcccgccatccccctgccctccgtagttccacgatgttggcttaggccgttgcctagggctccattcccctcccacagctctgccgccgcctcctgtcctctgaaaatggctgacctctaaaatctaaacccttcaaagcttctgtagattcacttcacatcgtccatggccgccgctgctcgcgtggcaatctcacggcccccacctctccctctcccttcctcctcgagcagcagggcgtgtaacctggttgctgggaggagcagcgaccccagcgccaccgctcgcgcggccctcccggctcccgcagcccccacctctccctttcccttcctcctccaacagcaggatgcgaaacctggtggctgggaggagcagagaccccggcgttagggcttctacctccaccgctggcgcgtataagaccaccgcgtcgacaacctcaggcgccaccgtgtttacggccccaaccgccacgacgaggttgaactccacccgtggatctctcatcgccagccatggcgctctcgtcgccgggcacccgcgactcgaggaagcgtcatcattgctgagggacgccggcaaggttgatgtcctataaatacatatattacaagcatgatccaaacctgtttggtgaatgggattttgaggtctctaatctctcttgaagtaagctacatcactaagatattgcagcccataccagaagacagaagaggtacatgatctcgatgttgttctctttatctagataaaatatccctctctctatcaatagatgcaatgacaaactattaacccttctaataatgtgaagtaaagttgtttgttcacaaattaaattacctatgctatctgatcttctcatttgtattattgttttccactacaagactcaattcatgcatgtcttttcccctctttttcactcttccttacactactgctggtcaattccatccttctatccttatttgctggtcaataaaagtaaaaagtaaatgtaccgacaattagatagcacatacaaagttgacctcatctattagcaaaagaaaaagggcactccacagtataaaggaactaaatgcagaaaagtatccaaaacttaccttattcagatatattgaatggcaagaacaattaaactgcaataatgctattaacttttgtattgtcatgagtcaagaaacaacctatctcaaatacttaggtttacggtaacatcttgtcatctttcttgcatgtctacttaccatcctaaattcttcgccttcccaactacaaataatgaaatccaagtattttatttttttccctttctctcaattaagttaccacaatcatacaagtatgacccaatacagtactagcaacaggtcaatctcatacatccctaaaaacaaagagtagcgactgttatctaccttggttaaacagctcggtatgaacacccaatgttgtggccaaaagtgttgttgctgctttcatcattcatgggccagtattatgtacaaatatctcatctcttttcatttcgaaactttttcaattgataaaaacactgaatttaacaattgtgccctttcgttctatatgatgatctcaagttccttcaccacataattgatgttgggcggtcaacatcagacttccacacattccatagccaaatgtttaaatctccttaagccaattagtttacatgaatcctagatttctggatccattattccatttgaaagttgcctaggagggggggggggtgaataggcgaaacctgaaatctataacattaaacacatactataagtcgaggttagtgttagaattaaattcaagtccggaagagaggaaaaacaactcaaacaagaatcaagcaagtggacacgatgatttgttttactgaggttcggttccaaagaacctagtccccattgaggaggtcacaaagaccgggtctatttcaaccctttccctctctcaaacggtcacttagaccgagtgagccttctccttaatcaatcgggtcactaagaccccgcaaggaccaccacacacttaggtgtctcttgctttgattacaagtcacttgggaacaagaatgagaaaggaagaaaggcaatccaagaaacaagagcgcaaaagaacatgaacacactctctcaagtcactaagtggttgagatgaattctagacttggagagggtctgatctttggaaatgtgtcttggagtgaatgcactagctcttgtattgaatgtgatctctgaaaaacttggatgccaatgggttgaggtggttgtgggtatttatagccccaaccacttggtagccgtcggccaaggctgctgacgatgggcgcaccggacagtccggtgcgccaccggacagacactgttccttgttcggtgcgccgccacgtcagccaacctttagggttatgagctggtcgaccgttggagactgtcttcttgcggcaccggacagtccggtacccctctgacttctgcgcggcactgttcatcactgtagcactttgcagagtcgaccgttgcgcagggagccgttgctccgctagcacaccggacagttcggtggcataccagacaatccaataaattatagtggagcacaccctggaattctcgagagtggttggtttgcatctgtacggtcctggtgcaccggacattgtccggtggcacaccggacagtcggtgcgcgattctacagcacactccagttcttttgctccaataaaatggtgtccctaacttgatatttttcttggtttgtgttgaaccttatgcacctgtaatacatgtattctaaacaaactagttagtccataggtttgcattggtcgtcaaccaccaaaattaattataggaaatggttagcctaatttccctttcaatctccccctttttggtgattgatgccaacacaaaccaaagcaaatataaagtgcagaaatgtaactagtttgcaattgagatgacaatgcatatgttacttggaattaaaccaattgaaagtcttaggtgaacaaggcaagagcccaaagagccctaccaacaaggcaaaaaagaggaatcagtagaagtgtttcttaggtgaacagaaattacactgaagaaaatataaaatacttaccaatgtttcttttatttgggtagatacatgaccctttttatgtgatagacacaagttttcaaacaccaatatcaataagcttagcattgagactttcatccaaaaggatagtggttgatttgatgttttagtgtatgatttgcggatcaacaagttcatggagttatgctagcccttctgttgagccaatgataatcctgagacgattctttaaatctaaatcaactcctctttctcaaaattggaatcgaaaatcaatgatatcacttatttcacatgtatctttgtttcctgaaattatattggcacctgccacatataaaaataattatatacactgcttcagttatttttctcagattttcatatgattctatgtcggctttgcctagaaatataaattacagattgtaacctgcattgtcatatttcaaatctggttatgtctcttctccatctaaagaaagtctaaaatcaatttttaaatcgcgcgcagggcgcgcgacatccactagtgcaaacgagtcggccttctccaacccgtgtttggtttgaccctgcgctggctggacgtcctccccgaccccattccgcagctcctccgagtgggcgccgactctctccaaaaagaggagcgtccgctagcgagaaggcgagagagagagagagagaaaaaaaatatttgagcagcgagccgcgagcacatcaggcgccactgcctcttcgaaatctccccaccagatttcctccctagaatccgctaccccgatctcgtgtgtcgcccgcggcgatggacacgacggcagcggtggccgcgcgcgtggcgcgtcccacgagcccgtcgcggccgcccaagacgatctgcagcatcaagtcgcaggggctcgacgaggacatggcggcgacgccgcccgtgtttggcaagggcaaggtctcctccgccgcacccgcgacctcgctccaccacaaccaccatgcagacatgccgatggacgcgatcgtctgggcgggtctccctgacgacctgctccccaaggtgctcgcctgtgtgccgaccttcctcctcttccgtcgctag

SEQ ID NO: 3430 - DNA, 4305 bp, Zea Mays
acatatgcgatgtgaagaatttttttccatggagcccaccccgcaaccctcgaacaccgccgcccaccatgcccagctcccgtagcgccgcacacccccagaaaccggcagcgacagccgggagtacatcccaccctcccctccaacgccgccgcccgccatccccctgccctccgtagttccacgatgttggcttaggccgttgcctagggctccattcccctcccacagctctgccgccgcctcctgtcctctgaaaatggctgacctctaaaatctaaacccttcaaagcttctgtagattcacttcacatcgtccatggccgccgctgctcgcgtggcaatctcacggcccccacctctccctctcccttcctcctcgagcagcagggcgtgtaacctggttgctgggaggagcagcgaccccagcgccaccgctcgcgcggccctcccggctcccgcagcccccacctctccctttcccttcctcctccaacagcaggatgcgaaacctggtggctgggaggagcagagaccccggcgttagggcttctacctccaccgctggcgcgtataagaccaccgcgtcgacaacctcaggcgccaccgtgtttacggccccaaccgccacgacgaggggacgccggcaaggttgatgtcctataaatacatatattacaagcatgatccaaacctgtttggtgaatgggattttgaggtctctaatctctcttgaagtaagctacatcactaagatattgcagcccataccagaagacagaagaggtacatgatctcgatgttgttctctttatctagataaaatatccctctctctatcaatagatgcaatgacaaactattaacccttctaataatgtgaagtaaagttgtttgttcacaaattaaattacctatgctatctgatcttctcatttgtattattgttttccactacaagactcaattcatgcatgtcttttcccctctttttcactcttccttacactactgctggtcaattccatccttctatccttatttgctggtcaataaaagtaaaaagtaaatgtaccgacaattagatagcacatacaaagttgacctcatctattagcaaaagaaaaagggcactccacagtataaaggaactaaatgcagaaaagtatccaaaacttaccttattcagatatattgaatggcaagaacaattaaactgcaataatgctattaacttttgtattgtcatgagtcaagaaacaacctatctcaaatacttaggtttacggtaacatcttgtcatctttcttgcatgtctacttaccatcctaaattcttcgccttcccaactacaaataatgaaatccaagtattttatttttttccctttctctcaattaagttaccacaatcatacaagtatgacccaatacagtactagcaacaggtcaatctcatacatccctaaaaacaaagagtagcgactgttatctaccttggttaaacagctcggtatgaacacccaatgttgtggccaaaagtgttgttgctgctttcatcattcatgggccagtattatgtacaaatatctcatctcttttcatttcgaaactttttcaattgataaaaacactgaatttaacaattgtgccctttcgttctatatgatgatctcaagttccttcaccacataattgatgttgggcggtcaacatcagacttccacacattccatagccaaatgtttaaatctccttaagccaattagtttacatgaatcctagatttctggatccattattccatttgaaagttgcctaggagggggggggggtgaataggcgaaacctgaaatctataacattaaacacatactataagtcgaggttagtgttagaattaaattcaagtccggaagagaggaaaaacaactcaaacaagaatcaagcaagtggacacgatgatttgttttactgaggttcggttccaaagaacctagtccccattgaggaggtcacaaagaccgggtctatttcaaccctttccctctctcaaacggtcacttagaccgagtgagccttctccttaatcaatcgggtcactaagaccccgcaaggaccaccacacacttaggtgtctcttgctttgattacaagtcacttgggaacaagaatgagaaaggaagaaaggcaatccaagaaacaagagcgcaaaagaacatgaacacactctctcaagtcactaagtggttgagatgaattctagacttggagagggtctgatctttggaaatgtgtcttggagtgaatgcactagctcttgtattgaatgtgatctctgaaaaacttggatgccaatgggttgaggtggttgtgggtatttatagccccaaccacttggtagccgtcggccaaggctgctgacgatgggcgcaccggacagtccggtgcgccaccggacagacactgttccttgttcggtgcgccgccacgtcagccaacctttagggttatgagctggtcgaccgttggagactgtcttcttgcggcaccggacagtccggtacccctctgacttctgcgcggcactgttcatcactgtagcactttgcagagtcgaccgttgcgcagggagccgttgctccgctagcacaccggacagttcggtggcataccagacaatccaataaattatagtggagcacaccctggaattctcgagagtggttggtttgcatctgtacggtcctggtgcaccggacattgtccggtggcacaccggacagtcggtgcgcgattctacagcacactccagttcttttgctccaataaaatggtgtccctaacttgatatttttcttggtttgtgttgaaccttatgcacctgtaatacatgtattctaaacaaactagttagtccataggtttgcattggtcgtcaaccaccaaaattaattataggaaatggttagcctaatttccctttcaatctccccctttttggtgattgatgccaacacaaaccaaagcaaatataaagtgcagaaatgtaactagtttgcaattgagatgacaatgcatatgttacttggaattaaaccaattgaaagtcttaggtgaacaaggcaagagcccaaagagccctaccaacaaggcaaaaaagaggaatcagtagaagtgtttcttaggtgaacagaaattacactgaagaaaatataaaatacttaccaatgtttcttttatttgggtagatacatgaccctttttatgtgatagacacaagttttcaaacaccaatatcaataagcttagcattgagactttcatccaaaaggatagtggttgatttgatgttttagtgtatgatttgcggatcaacaagttcatggagttatgctagcccttctgttgagccaatgataatcctgagacgattctttaaatctaaatcaactcctctttctcaaaattggaatcgaaaatcaatgatatcacttatttcacatgtatctttgtttcctgaaattatattggcacctgccacatataaaaataattatatacactgcttcagttatttttctcagattttcatatgattctatgtcggctttgcctagaaatataaattacagattgtaacctgcattgtcatatttcaaatctggttatgtctcttctccatctaaagaaagtctaaaatcaatttttaaatcgcgcgcagggcgcgcgacatccactagtgcaaacgagtcggccttctccaacccgtgtttggtttgaccctgcgctggctggacgtcctccccgaccccattccgcagctcctccgagtgggcgccgactctctccaaaaagaggagcgtccgctagcgagaaggcgagagagagagagagagaaaaaaaatatttgagcagcgagccgcgagcacatcaggcgccactgcctcttcgaaatctccccaccagatttcctccctagaatccgctaccccgatctcgtgtgtcgcccgcggcgatggacacgacggcagcggtggccgcgcgcgtggcgcgtcccacgagcccgtcgcggccgcccaagacgatctgcagcatcaagtcgcaggggctcgacgaggacatggcggcgacgccgcccgtgtttggcaagggcaaggtctcctccgccgcacccgcgacctcgctccaccacaaccaccatgcagacatgccgatggacgcgatcgtctgggcgggtctccctgacgacctgctccccaaggtgctcgcctgtgtgccgaccttcctcctcttccgtcgctag

SEQ ID NO: 3431 - DNA, 5921 bp, Zea Mays
acatatgcgatgtgaagaatttttttccatggagcccaccccgcaaccctcgaacaccgccgcccaccatgcccagctcccgtagcgccgcacacccccagaaaccggcagcgacagccgggagtacatcccaccctcccctccaacgccgccgcccgccatccccctgccctccgtagttccacgatgttggcttaggccgttgcctagggctccattcccctcccacagctctgccgccgcctcctgtcctctgaaaatggctgacctctaaaatctaaacccttcaaagcttctgtagattcacttcacatcgtccatggccgccgctgctcgcgtggcaatctcacggcccccacctctccctctcccttcctcctcgagcagcagggcgtgtaacctggttgctgggaggagcagcgaccccagcgccaccgctcgcgcggccctcccggctcccgcagcccccacctctccctttcccttcctcctccaacagcaggatgcgaaacctggtggctgggaggagcagagaccccggcgttagggcttctacctccaccgctggcgcgtataagaccaccgcgtcgacaacctcaggcgccaccgtgtttacggccccaaccgccacgacgaggggacgccggcaaggttgatgtcctataaatacatatattacaagcatgatccaaacctgtttggtgaatgggattttgaggtcattgttctgtcttctgaatgttgaagctgttgaaaaggccacttgtagtatagaacctatacctgcaaagcaacgatgctcctatacctgcaaagcaacgatgcaagagcaaaactagaatttcctagagaaatgtttatctattaacgatgcttacattttttgtgttcaatcttagagtagcatgatctgtaatgctcttatgtactgtcctgataaattttgtggcgaatattggccttatcaagttcaattccactttttagttgtgcttctgagatatcaccaggctgaaactatctcacacacccattattctcttgactacctcacccaggttgcaagtgttacttttgatctattgttccttccgatgcttagttcttaactgtttgttttaactttctttgttgcttcttgcttcagttgtccatgatgggataactaaaaattgaactaattatttgcatgaagcctcataagcaagattgcaggacaacagataccttcttgtcaacgttttggtttaatataagtttctcttccaatcctgttattgctgttaagttggccacacagcaggagtacttcctatctgtgcatttctcttacatgagtttcaaaactacatgagagataggtcattgttacgatgcaaattgtttcccatatggctctttgttttcattttctatttttctcaaaaacgattcgaaaactaatatttgccttcttttttcctctgcttctccctttccctttcttaaccgtttattttcatgctgctgctggaatccatctaagagatgtctcctttttagttcctcattctttgttgcatgttatattagatgatcaggtacgtagtctgccttctcagaaacattgttgtttgtccactttcctttgtgcttccaacaacacattgcactacattatctcattcatgcacttttgcgtaattagacataagtgctgctttttagaacatacacaagcatatgcctctcaactataaccacttaactatgggtacacatcctgatggatggtctaaattttaagaataagagaaacttacatttatgtcgatgtaaacaaacttctatattgggaagttgaaaaggacattggtaaatcatctgcaatactgttttcagcttaattttactttcttattatatggttgataaaacacaactgatgacgaccatactttgctattttttggatagtgagtaacacacttacaaaatactacatgtttgcaataggtggtacatgctaattatgcaaatgaaagttcctttttaggattgttaaatagagttctagagtttgggatttcttttgggtatcttttcggaagcattcatattattagtaaagatatcttttgttaaacaaaggttctccgcagtattctgtgcgggccgttcatgggatctaattttcctcccctgtccacatccccttcctcccgtttcttcattctcagatcactattcgattttttcatataataatatgaatcttgatggtttcacactatggttttaggacaatcattttgttctaaactttttttcttggtgtgtactgtgcatgcaaaggtctctaatctctcttgaagtaagctacatcactaagatattgcagcccataccagaagacagaagaggtacatgatctcgatgttgttctctttatctagataaaatatccctctctctatcaatagatgcaatgacaaactattaacccttctaataatgtgaagtaaagttgtttgttcacaaattaaattacctatgctatctgatcttctcatttgtattattgttttccactacaagactcaattcatgcatgtcttttcccctctttttcactcttccttacactactgctggtcaattccatccttctatccttatttgctggtcaataaaagtaaaaagtaaatgtaccgacaattagatagcacatacaaagttgacctcatctattagcaaaagaaaaagggcactccacagtataaaggaactaaatgcagaaaagtatccaaaacttaccttattcagatatattgaatggcaagaacaattaaactgcaataatgctattaacttttgtattgtcatgagtcaagaaacaacctatctcaaatacttaggtttacggtaacatcttgtcatctttcttgcatgtctacttaccatcctaaattcttcgccttcccaactacaaataatgaaatccaagtattttatttttttccctttctctcaattaagttaccacaatcatacaagtatgacccaatacagtactagcaacaggtcaatctcatacatccctaaaaacaaagagtagcgactgttatctaccttggttaaacagctcggtatgaacacccaatgttgtggccaaaagtgttgttgctgctttcatcattcatgggccagtattatgtacaaatatctcatctcttttcatttcgaaactttttcaattgataaaaacactgaatttaacaattgtgccctttcgttctatatgatgatctcaagttccttcaccacataattgatgttgggcggtcaacatcagacttccacacattccatagccaaatgtttaaatctccttaagccaattagtttacatgaatcctagatttctggatccattattccatttgaaagttgcctaggagggggggggggtgaataggcgaaacctgaaatctataacattaaacacatactataagtcgaggttagtgttagaattaaattcaagtccggaagagaggaaaaacaactcaaacaagaatcaagcaagtggacacgatgatttgttttactgaggttcggttccaaagaacctagtccccattgaggaggtcacaaagaccgggtctatttcaaccctttccctctctcaaacggtcacttagaccgagtgagccttctccttaatcaatcgggtcactaagaccccgcaaggaccaccacacacttaggtgtctcttgctttgattacaagtcacttgggaacaagaatgagaaaggaagaaaggcaatccaagaaacaagagcgcaaaagaacatgaacacactctctcaagtcactaagtggttgagatgaattctagacttggagagggtctgatctttggaaatgtgtcttggagtgaatgcactagctcttgtattgaatgtgatctctgaaaaacttggatgccaatgggttgaggtggttgtgggtatttatagccccaaccacttggtagccgtcggccaaggctgctgacgatgggcgcaccggacagtccggtgcgccaccggacagacactgttccttgttcggtgcgccgccacgtcagccaacctttagggttatgagctggtcgaccgttggagactgtcttcttgcggcaccggacagtccggtacccctctgacttctgcgcggcactgttcatcactgtagcactttgcagagtcgaccgttgcgcagggagccgttgctccgctagcacaccggacagttcggtggcataccagacaatccaataaattatagtggagcacaccctggaattctcgagagtggttggtttgcatctgtacggtcctggtgcaccggacattgtccggtggcacaccggacagtcggtgcgcgattctacagcacactccagttcttttgctccaataaaatggtgtccctaacttgatatttttcttggtttgtgttgaaccttatgcacctgtaatacatgtattctaaacaaactagttagtccataggtttgcattggtcgtcaaccaccaaaattaattataggaaatggttagcctaatttccctttcaatctccccctttttggtgattgatgccaacacaaaccaaagcaaatataaagtgcagaaatgtaactagtttgcaattgagatgacaatgcatatgttacttggaattaaaccaattgaaagtcttaggtgaacaaggcaagagcccaaagagccctaccaacaaggcaaaaaagaggaatcagtagaagtgtttcttaggtgaacagaaattacactgaagaaaatataaaatacttaccaatgtttcttttatttgggtagatacatgaccctttttatgtgatagacacaagttttcaaacaccaatatcaataagcttagcattgagactttcatccaaaaggatagtggttgatttgatgttttagtgtatgatttgcggatcaacaagttcatggagttatgctagcccttctgttgagccaatgataatcctgagacgattctttaaatctaaatcaactcctctttctcaaaattggaatcgaaaatcaatgatatcacttatttcacatgtatctttgtttcctgaaattatattggcacctgccacatataaaaataattatatacactgcttcagttatttttctcagattttcatatgattctatgtcggctttgcctagaaatataaattacagattgtaacctgcattgtcatatttcaaatctggttatgtctcttctccatctaaagaaagtctaaaatcaatttttaaatcgcgcgcagggcgcgcgacatccactagtgcaaacgagtcggccttctccaacccgtgtttggtttgaccctgcgctggctggacgtcctccccgaccccattccgcagctcctccgagtgggcgccgactctctccaaaaagaggagcgtccgctagcgagaaggcgagagagagagagagagaaaaaaaatatttgagcagcgagccgcgagcacatcaggcgccactgcctcttcgaaatctccccaccagatttcctccctagaatccgctaccccgatctcgtgtgtcgcccgcggcgatggacacgacggcagcggtggccgcgcgcgtggcgcgtcccacgagcccgtcgcggccgcccaagacgatctgcagcatcaagtcgcaggggctcgacgaggacatggcggcgacgccgcccgtgtttggcaagggcaaggtctcctccgccgcacccgcgacctcgctccaccacaaccaccatgcagacatgccgatggacgcgatcgtctgggcgggtctccctgacgacctgctccccaaggtgctcgcctgtgtgccgaccttcctcctcttccgtcgctag

SEQ ID NO: 3432 - DNA, 2430 bp, Zea Mays
acatatgcgatgtgaagaatttttttccatggagcccaccccgcaaccctcgaacaccgccgcccaccatgcccagctcccgtagcgccgcacacccccagaaaccggcagcgacagccgggagtacatcccaccctcccctccaacgccgccgcccgccatccccctgccctccgtagttccacgatgttggcttaggccgttgcctagggctccattcccctcccacagctctgccgccgcctcctgtcctctgaaaatggctgacctctaaaatctaaacccttcaaagcttctgtagattcacttcacatcgtccatggccgccgctgctcgcgtggcaatctcacggcccccacctctccctctcccttcctcctcgagcagcagggcgtgtaacctggttgctgggaggagcagcgaccccagcgccaccgctcgcgcggccctcccggctcccgcagcccccacctctccctttcccttcctcctccaacagcaggatgcgaaacctggtggctgggaggagcagagaccccggcgttagggcttctacctccaccgctggcgcgtataagaccaccgcgtcgacaacctcaggcgccaccgtgtttacggccccaaccgccacgacgaggggacgccggcaaggttgatgtcctataaatacatatattacaagcatgatccaaacctgtttggtgaatgggattttgaggtcattgttctgtcttctgaatgttgaagctgttgaaaaggccacttgtagtatagaacctatacctgcaaagcaacgatgctcctatacctgcaaagcaacgatgcaagagcaaaactagaatttcctagagaaatgtttatctattaacgatgcttacattttttgtgttcaatcttagagtagcatgatctgtaatgctcttatgtactgtcctgataaattttgtggcgaatattggccttatcaagttcaattccactttttagttgtgcttctgagatatcaccaggctgaaactatctcacacacccattattctcttgactacctcacccaggttgcaagtgttacttttgatctattgttccttccgatgcttagttcttaactgtttgttttaactttctttgttgcttcttgcttcagttgtccatgatgggataactaaaaattgaactaattatttgcatgaagcctcataagcaagattgcaggacaacagataccttcttgtcaacgttttggtttaatataagtttctcttccaatcctgttattgctgttaagttggccacacagcaggagtacttcctatctgtgcatttctcttacatgagtttcaaaactacatgagagataggtcattgttacgatgcaaattgtttcccatatggctctttgttttcattttctatttttctcaaaaacgattcgaaaactaatatttgccttcttttttcctctgcttctccctttccctttcttaaccgtttattttcatgctgctgctggaatccatctaagagatgtctcctttttagttcctcattctttgttgcatgttatattagatgatcaggtacgtagtctgccttctcagaaacattgttgtttgtccactttcctttgtgcttccaacaacacattgcactacattatctcattcatgcacttttgcgtaattagacataagtgctgctttttagaacatacacaagcatatgcctctcaactataaccacttaactatgggtacacatcctgatggatggtctaaattttaagaataagagaaacttacatttatgtcgatgtaaacaaacttctatattgggaagttgaaaaggacattggtaaatcatctgcaatactgttttcagcttaattttactttcttattatatggttgataaaacacaactgatgacgaccatactttgctattttttggatagtgagtaacacacttacaaaatactacatgtttgcaataggtggtacatgctaattatgcaaatgaaagttcctttttaggattgttaaatagagttctagagtttgggatttcttttgggtatcttttcggaagcattcatattattagtaaagatatcttttgttaaacaaaggttctccgcagtattctgtgcgggccgttcatgggatctaattttcctcccctgtccacatccccttcctcccgtttcttcattctcagatcactattcgattttttcatataataatatgaatcttgatggtttcacactatggttttaggacaatcattttgttctaaactttttttcttggtgtgtactgtgcatgcaaaggtctctaatctctcttgaagtaagctacatcactaagatattgcagcccataccagaagacagaagagcgaaagaacgaacatacatggaaggtgg

SEQ ID NO: 3433 - DNA, 3093 bp, Zea Mays
cattcaaggtgatcgtcactagtgatgtgtatggggacaaggcgctccccactgaggtctaggactccaaggagaataaatggtcggtgcaccagatgatgcctgcgacgaacctgtgctcgtcgaaaatggcgttctacgactctaggttgtacctggatacgctctcgccgctggggctgatgatgtacatagtggatgcggggcgttgggagcatatacctgccaagttcccacggtccctgctcgatggttatctggtggctggagcttgcacgaggttgttcttggttgggtgaatcgggctttacagcaccctatagagtatgaggatctgggagctgaaccatggcagaacagtttgggtggagattagtagaatgccacccaggtacttcagggctctgctgaggttgtcgtctgagaggttcgagtgctttgggcaggacaatttgatctgtttcacgtcgtggaaccagggcaaaggtcttctgtatgatgttgataagaagtcttggtcgtggattaccggttgtgctagtcaactctgcaatagccaggtttgcttttatgagccaaggtttgatacaccaatctgttgaatcttgcaatatgaactgcattatgatgagtttgagatcaaatgcttctggggttcaacatcaggatccctgtgatgtcctattgaatcatggatgttagatttttcaaagtgctgagatgaaaaatgcttcttcgagacactgcaactacaagtagtgggcttgagcaaccgatatttgcaaatcatgcgctgaagactctttactacagcagttataccatctggcagttcttgattagccaaatgttccacatgcattaccaacaatctgctttgtaaagtataccttcttgctcagatccttgttctgattgatatatctctaaagaaagaaatagtttattaatgtgcgttaatgatattgcctgagaggtttaggaaaggaaatatggggcaacaagatagtgagggccttttgtagatagggattccttttgttgtaaaaaaaactttattttcttgtataaaagctaagcccttacagtttgttcttttcgagaggcacttcaacaccaaggcaaatgctgatgaagatgtttgggacggtgaggttgagtaaccgacctggggataactcatggttttattaagcgtgtgtatggtgctgccaataagctcagcacggagattgagggcttgtttggtatggctccagagcaaaactccaaggaggagctggctagagcatgccaaacaacctaactccagagttgtaaactttatgaagtttttgaagttgctgtacaattttttgaagtacctcttttgtggctccgagaactccaaaaaagcaacctagtcatggagtttggagttatttacccgccattgccatcggttatgagaaataatctaaactctggagcagagctgctccaccaagagttttggagtagagctgctctggggtggagcagagccatgccaaacatgccttgagattggagtgctcaaatctcattttgaaagagacctgtccccagattttgtccactatttgatgctcccctggagcttagatcatgacttggcagccttcttccatgggcctattcaaggaataactaagcttaaggtactgtacctaagctccttggatattcatctgagattgacaagtatgaatgtgttggggacttattctcaaatgctaggagttaagaacaaggcaacataaagagtgttaaatgttaaagtctttcgtccttcaagacattatgtcccttcggacataatgaattccggacgaaggttatgaaggaagagaccttcgtaagttcgacggatgatgaagaagaatacatatatgaaatacgaatattaatacagatattatcatcaacttatttttattttatattatcagaatcataataacaaattacaaatgtaccttcggattgacgaaaagtaaaggtacaggcgtgatgcggaaagaaaatgccagatcagcgtgaacagtatgagaatactgttcatctatttataggcacaggacgcagcccgtggaaaattacattaatgccctttacatttatcaataactctatagtgattcttcgaggtctaatttggcttttcatcatataagtcggttccccttctctactgtcatgccgaagctttttctgcgcatagcttcgtgatcatcttatccttcgtcatgatcgccttccgtcctactcaagcttcgtcttgaccatattcttgtatactcgtggcccgattccgaagacacctgttcacatatttcacttggaaaacattgtcaaatcatgtttttgaggaccttcggaagccgaaggcccccaacagaatgaattagatatggagtcattcatcaaacacatctggcaacgtagagttgtagttgcggacgactggaggaacacttatggtaaaattgagctattcaactatgatcttcatgacaacaaagaaggatttgttcgaggcgagtgcgacactttgtttgatgagcagaaacagactggtaggctcattaagaagggtatagcgaagctgacatgtatcatttagaaagagaagcaagtggtcagcgtagagatatacgcagatgtgccttgtaatgataaccagttcgttgaagttctgtctatgttaactcttttgatgaggtgtgaggatgaaaacttttccttggtagaagtgtggaatgatagctctagagcctatggtgttttaagtggttcacaaaccatcaatatggctgatctagattgtggtgtttgccttcttctgagatcaatgaatacaaagtttactaagctcgtgaccaattcagaaacaaagagaattgatgtttttgtcagattatctttttagaatggactactgctactcacccgcttcaaccaagatggccattcaaaactagtcatctaatctgaaaggatgtacaattttcaaaataaccaataacaaaagaatttcagatattatcaatacttttgctacgtactgttttt

SEQ ID NO: 3434 - DNA, 2032 bp, Zea Mays
tggaagatatcttttttgtgcggaatacttctggcaacttgagtaccttcgaaaattgggagaatttagatccaaaaaaaggaacctaattttggtttgtgacatttcaattcgcagagctgctaacgtttaagagacttctgcatcattatatttgcagaagaggaagaagttgagatacagaatagcgtaattgatgagataagtgttgagacatacctatatatccaccacacggagaacaagatgtcaaattgaagagagaaactgaagataaagagctaaagagaaagagaaatgtgacttgcaaacgatgttctttctagatgtttttttagcaatgcctttgcaaacatagtgaatactttaattcaagttcggtcatcctgtagtgactaacagtgaggcagacttgcccactcaaattttcgcaagttttggcctcatgtggtgactaaaagtgttccgattatcctaaatacacaagacaagaggctaaaatttgtgagaatttgagtgggcaagcccgtttcattgttagtcactacaggatgaccgaacctgacttcaactgttaactatgtttgtaaaggtattgccaaaaaacatatagaaagtacattgtttgtaagtcacttttatctttcttttcagctctccatcttcagtttctttcttcactttaatatcttgtactccgctacacaacatgttaaaaaaaattaagtaataagccacaaatccaatgctaacaaaattagggagagtcatgatcatttaattttaaataatattacactcaccgcggtggacataaagctatttctcaacacttatctcaccaattccgttattctgtatttcctaaacttctttatcatctgcaaatataatgatgcaggagtcttcatacatgttagcagctctatggattgaaatgtcccaaagcacaattaggttcctcttttttggatccggattctcccaattttcgaaggtactcaggttgacagaagtattccgcacatgaaagatatcttgcagcagcttcaagagaagtggtgatatccctttacgagcatccataactacagtcatgcagctagacaaaagaaacaaacttaaattccgcaagaccatgatcatgtcttacctttcagctttcaagaagaaagtagttcttagagaatacctaaaacctccacctcccatgtatgccctttttcgctgaaaaataagcacataatgagttcaaaaaacaccagaaggaaagagagagggaaacaaaaagacatgtgagtttaaaggcacaagaaaagagggaaatgaagagtcaggaagagggtcgacgaaaacagtacgtaccaaaagtattgataatatttaaagttcttttgttattggttattttgaacattgtgcatcctttcagattagatgaccatctttgattgaccattttgattgaagcgggtgagtcgctgtatgccattttaagaaaatgatctgacaaaaacatcaattctcttggtctctgaactgtcacgaacttagtaaactttgtattcattgatctcagaagaaagcaaacaccatgatatgaatcagccatcttgatggtttgtgaatcaattaaaacaccacaggctctaaagctgtcattccacacctttacgaaagaaaagttttcatcctcacacctcattaaaagagttaacatagatagaacttcagcgatctggttatcattacaaggcacatcttcgtatatctcatacactgatcatttgcttatctttccaaatgatacatgctagcttcactatacccttcttattgagtctaacagcttgcatctgctcatcaaacaaagcgtcgcactcgcctcgaacaaatcctttgttgtcatgaagatcatagttgagtaactcaatgttaccataagtgttcctccagtcgtccgcaactacaactctacgttggcagatgtgcttgatgaataactctctattcatacttgtctataacaaag

SEQ ID NO: 3435 - DNA, 2192 bp, Zea Mays
gaaccctactcgattggatttaaacccgggtttgggtggcgtcgcctttcatcatttcccccctcgtgctctctctcgaaccttcttccaaagcacccgaaccctagtgatctcggaaccctagccgcgcgcggatctcggcttttccccttcctccacgccagccatggacgaggacttcgagatgcctcccgccggcgccgatgagatgatgggcgacgacgagatgggcgacttcggcggcgacgagggcccggtgatgaaggtgggcgaggagaaggaggtcggcaaggaggggctcaagaagaagctgctcaaggagggcgagggctgggagactcccgaggtcggcgacgaggttgaagtgcattacacgggcacgctccttgatgggacaaaattcgactcaagccgtgatcgtggagaacccttcaagttcaagcttggacaaggtcaagtgataaagggttgggatcaaggaatcaagaccatgaagaaaggagaaaatgctatttttaccattcctccagagctggcttatggagcatctggttcacctccaactatcccacccaatgcaaccctgcagtttgatgttgagctgctttcatggaccagtgtcaaagacatttgcaaagatggcggcatattcaagaagatccttaaagagggagagaaatgggagaacccaaaggatcctgatgaagtacttgtgaaatatgaggcccgtctggaagatggtactgttgtatccaagtctgagggggttgagtttactgtgaaaagggtagaccagcagctggagaggaaggtgctgtgccgccaaatgcttcgctgctcattgaccttgagttgatttcatggaagactgtcacagaaattggggatgataagaaaatccttaagaaggttctcaaggagggagaaggttatgagcgtcccaacgagggtgctgttgttgaagtcaaaattatcggaaagcttcaggatggcgcggtgtttacaaagaaggggcatgacgaagagccatttaaattcaagaccgatgaagaggaagttattgccggtcttgatcgtgctgtgttgaacatgaagaagggcgaggttgctcttgtcacaattcctcctgaatatgcatttggttcaactgagtcaaagcaggatcttgctgttgttccacctaacagcacagtaatatatgaagttgagcttatttcatttgtgaaggacaaggagtcgtgggacttgaacaatgaagagaagattgaggctgctggtaagaagaaagaggaagggaatgcattgttcaaatcgggcaaatatgctagagcttccaagcgatatgagaaggctgccaagtacattgagtacgacacttcgttcagtgaagatgagaagaagcaatccaagcaactgaagatcagctgcaacctaaacaatgctgcctgcaaactgaagttgaaggattacaaggaagctgcgaagctttgcaccaaggttctggaactagacagccaaaatgtcaaggctctctacaggagggtgcaagcttacattcaacttgctgacctagagctagcagaggccgatatcaaaaaggcactggaaatcgatcctgacaacagggatgtcaagttggaatataagatcctgaaggagaagatcaaggagtacaacaagaaggacgccaaattctacagcaacatgttcgccaagatgacaaagtagcttttggggtggaggatgttgtggtgaagcgaagggattaaaaacaccgatttctgctgccgaaggacttcgcccgttgcttaacttctcgcttttcgcatactttgtagtcaattagtgtgcacggatgcttggatatgtgaaactgaggaacatgtacttcgaggattattattggttctgaatttttatgttttctggttcttgttaggaccattgaatgttctctctatataattttcggacacatgttcttaataaaccacgggagcaaaagtttatgctaagaacgtctgctcatcgtaactaacaacagctgcctcaccgtcacgcactgccgtgtcaggatgtgtcaacctgaagatcacagaaactgcacaacgtttgcagatcaatgaatgggcactttggattagaggtggtaatgagctctaaattctatataaaattaattaaggttttaa

SEQ ID NO: 3436 - DNA, 1788 bp, Zea Mays
ctactcgattggatttaaacccgggtttgggtggcgtcgcctttcatcatttcccccctcgtgctctctctcgaaccttcttccaaagcacccgaaccctagtgatctcggaaccctagccgcgcgcggatctcggcttttccccttcctccacgccagccatggacgaggacttcgagatgcctcccgccggcgccgatgagatgatgggcgacgacgagatgggcgacttcggcggcgacgagggcccggtgatgaaggtgggcgaggagaaggaggtcggcaaggaggggctcaagaagaagctgctcaaggagggcgagggctgggagactcccgaggtcggcgacgaggttgaagtgcattacacgggcacgctccttgatgggacaaaattcgactcaagccgtgatcgtggagaacccttcaagttcaagcttggacaaggtcaagtgataaagggttgggatcaaggaatcaagaccatgaagaaaggagaaaatgctatttttaccattcctccagagctggcttatggagcatctggttcacctccaactatcccacccaatgcaaccctgcagtttgatgttgagctgctttcatggaccagtgtcaaagacatttgcaaagatggcggcatattcaagaagatccttaaagagggagagaaatgggagaacccaaaggatcctgatgaagtacttgtgaaatatgaggcccgtctggaagatggtactgttgtatccaagtctgagggggttgagtttactgtgaaaagggtagaccagcagctggagaggaaggtgctgtgccgccaaatgcttcgctgctcattgaccttgagttgatttcatggaagactgtcacagaaattggggatgataagaaaatccttaagaaggttctcaaggagggagaaggttatgagcgtcccaacgagggtgctgttgttgaagtcaaaattatcggaaagcttcaggatggcgcggtgtttacaaagaaggggcatgacgaagagccatttaaattcaagaccgatgaagaggaagttattgccggtcttgatcgtgctgtgttgaacatgaagaagggcgaggttgctcttgtcacaattcctcctgaatatgcatttggttcaactgagtcaaagcaggatcttgctgttgttccacctaacagcacagtaatatatgaagttgagcttatttcatttgtgaaggacaaggagtcgtgggacttgaacaatgaagagaagatcaaggagtacaacaagaaggacgccaaattctacagcaacatgttcgccaagatgacaaagtagcttttggggtggaggatgttgtggtgaagcgaagggattaaaaacaccgatttctgctgccgaaggacttcgcccgttgcttaacttctcgcttttcgcatactttgtagtcaattagtgtgcacggatgcttggatatgtgaaactgaggaacatgtacttcgaggattattattggttctgaatttttatgttttctggttcttgttaggaccattgaatgttctctctatataattttcggacacatgttcttaataaaccacgggagcaaaagtttatgctaagaacgtctgctcatcgtaactaacaacagctgcctcaccgtcacgcactgccgtgtcaggatgtgtcaacctgaagatcacagaaactgcacaacgtttgcagatcaatgaatgggcactttggattagaggtggtaatgagctctaaattctatataaaattaattaaggttttaa

SEQ ID NO: 3437 - DNA, 1304 bp, Zea Mays
agaaatctaagtattgggctgattctgctcaagcacaggggcccatactacggtgccatcgctctcgctctctctctctctctctctctccagactccacgactccaccgctcctctgtcctctccccaccacctccttgtatctctcctccccttctggccgacgaaaccctacgcgcgcgcgctgccaagccctcgccgccgacgcctactccgactccgacgccgcagtagtgatgtacgccgacaggtcctcgggcaggaaacgctctgtaatggaccgcctcgggtcgggcggcggctcgcgctcgcggtccgacgacgcaaaaaggttttgccaggatgatgggacatggagacgtgagctttataaggattctagaggaactcagacttcatgttgttgcttctactgtgtatgttttagctgaacctacttccagaaatctggaatcgaacaaaaaatcccaagtgcagcaaaaggttgtgaagaaattaccagtttcagatcttcgtggaaagttatctggtgtcgcgagccagcgccctcaacttagcagtactgttcaggtcccaaaacctgtaaaagaggttattaagagcaacaaacctgttcaaaagagagaccccgctccaactactgcccctcctgacatcaagaaacccagtgcacctgcacctgtaccagcaccatctgcattaccaaagcaatcccagaacaaggttgatatgaaagcattggtttacatgaatgaagaagatatgaagtctttaggaattccaatgggtcccaggaaaaagatactatcagcattggctcacagaaagaacaagtcttcgaagtcattgcctaccagtaccagttgaggcatctttaagcttgtgtggtagctagacaacttgttgatcttggatatgtgcaagtgcatcatcgacctgcagagttaactccactgacgagcaagattcctatccatcaaggctgatgcggtgtataagtagagaactccgtgatgttggtagttgaaggcaaccaactgattgttgatgtccctcctattctgtgatctccggaatatttgttgatcattgggtgttaattcatgatgatgccttggggattgtttccccttgtccggcaaacccaattcttgcttcttgcgtctcaccgtctgcatatccatccaaaaagaattgagttcacagagaaatgcttgagtttaactaagttcacagaaaaataacaggcaacatttatgtctccaaacaggtttaatatgaaaatatagtatatgattattttc

SEQ ID NO: 3438 - DNA, 543 bp, Zea Mays
tttgcctttttctttccccaagttgggtcccaggaaaaagatactatcagcattggctcacagaaagaacaagtcttcgaagtcattgcctaccagtaccagttgaggcatctttaagcttgtgtggtagctagacaacttgttgatcttggatatgtgcaagtgcatcatcgacctgcagagttaactccactgacgagcaagattcctatccatcaaggctgatgcggtgtataagtagagaactccgtgatgttggtagttgaaggcaaccaactgattgttgatgtccctcctattctgtgatctccggaatatttgttgatcattgggtgttaattcatgatgatgccttggggattgtttccccttgtccggcaaacccaattcttgcttcttgcgtctcaccgtctgcatatccatccaaaaagaattgagttcacagagaaatgcttgagtttaactaagttcacagaaaaataacaggcaacatttatgtctccaaacaggtttaatatgaaaatatagtatatgattattttc

SEQ ID NO: 3439 - DNA, 540 bp, Zea Mays
aagcaatatgtatatatttaagggtcccaggaaaaagatactatcagcattggctcacagaaagaacaagtcttcgaagtcattgcctaccagtaccagttgaggcatctttaagcttgtgtggtagctagacaacttgttgatcttggatatgtgcaagtgcatcatcgacctgcagagttaactccactgacgagcaagattcctatccatcaaggctgatgcggtgtataagtagagaactccgtgatgttggtagttgaaggcaaccaactgattgttgatgtccctcctattctgtgatctccggaatatttgttgatcattgggtgttaattcatgatgatgccttggggattgtttccccttgtccggcaaacccaattcttgcttcttgcgtctcaccgtctgcatatccatccaaaaagaattgagttcacagagaaatgcttgagtttaactaagttcacagaaaaataacaggcaacatttatgtctccaaacaggtttaatatgaaaatatagtatatgattattttc

SEQ ID NO: 3440 - DNA, 3812 bp, Zea Mays
gataattttcctttgatttggggataactcgaggaaggcagctggtccatcgccggcggactggtcggcttcctgtgcggctgtgcctctctcgtccctgtttcttatgtctctctcacgttgtagtcacgtgcgtgcgtacgagcgagggtgtttcgttttggatcgttttgcagcggcccgtctcggacgccgacgcgcaacacggacagatccaccacatatatctctggcctgtgggccgccttttgacacctgcaggccgagcaccgcaccgccttccttccaccgttccgtccgtcccgtccttccccgttcctgtgcagcacaagcaccgaccctgccgtgcgcccaaccccgtgcgccgcgcatggctatggcggcggcgaccggcgcaggcgcggtgggcgaggggatgcgtcggctcacgcagctctcgcttgtctccaaggtctgctcggagctggagtcccacctcggcgtcgcggaccgcgtcctcgccgagttcgtcgtcgaactaggccgcgcctccgcctccgccgccgccttcgccgccgcgctcagggaccacggcgccgagctgccggactacctcgtccgctccctccacgccgtcatcaccgccatcccggacagcgcccccgctccccccgcctcacgtggcgctggtgcccgggggcgcgtggacaaggcggcgggagaggacgaggaccaggagccggggctgcaccaggtgcgccgggggagggtcacccgggtggccaacgccggatgcttcgttcgcctcgacggcggacgcgaggggctcgtgcacgtctcccagatgcccgcccgcggccgcggccgcgccggcgctaccgtcacgctcggccaggaagttttcgtcaaggtcgtctcggtggacggcgccaagctggggctgtcgatgctagacatcgatcaggataccgagaggggtctccatccgatgcggcgtccgcaccctgcggaggaggacgcgccgagggcaaatccgccagctgatcgccccagacccgccgggaggaagaagggggtttctgggattttcgtttccgatgaggacgacgacgacaaggctggtcctccgacgcgcagaccaactaggcggatgacctcgccggagaggtgggaggtaaagcagctgatcgcggcgggggtgttagatgccaagaactacccggtgttggatgaggatgaggaggggatgctttatcaggaggaagaagtggaggagcttgagattgaactcaatcaggatgagccccctttcttgtggggaaaagggcgatcctcatctgacatgtctccagtgaggatttccatgaatcctgaggggtcgatgagccgtgcggcagcgctacaatccgcacttactaaggagaggcgtgatattcgcacacaagagcaaagaggaatggttgatgcgatccccaaggaccttaaccggtcatgggaggatcccatttcaagtggacggtatctgatgcaggagctgatgggcacaggactatcagcgcagagtgtgccggaatggaagatgacatatgggaaggccggaacatatgggcagaagtcgaggctttcgatccaggagcagagacaaagccttccaatattcaggctgaaaaaggagctgatcagtgctgttaatgacaaccaagttttggtggttatcggtgagactggctctgggaaaacaacccaggttacacaataccttgctgaggcagggtatactacaaggggaaagattgcatgtactcaacctcgcagggttgctgcagagtcaattgcaaagcgagtagcagaggaggttggctgtcgagtgggtgaggaagttggttattctatacgctttgatgactgcacagggcctgaaaccgtcatcaagtacatgacagacggcatgctcctccgagagattttggtggatggagacctgtcttcttattcagtggtcatgcttgatgaggcacatgagagaaccatctacacagacattctcttcagcttgctaaagcagctaattaagcggagaaatgatctcaagttaatagtcacttcagccactcttgatgcggagaagttctctggttatttttttgattgcaatatcttcacgattcctggaagaacgtttccagttgagatactacatacaaaacaggcagagagtgactacatggatgctgcactgatcacggtattgcagatccatctgaccgagcccgaaggagatatcctattgttcctgactggccaggaagagattgatcatgcttgcgagcgtctccatgagaggatgaaggcattcggtggggacataccagagcttataatttgtcctgtgtacagtgctcttcctactgaagttcagtcaaagatattcgaaccggctcctccttgtaagaggaaggtggtcgtggccaccaacatagcagaagcatctattaccatagatgggatttactatgttgttgaccctggcttcgcaaagctaaatgtctataacccaaaactagggttagattcactggttatcactccgatctctcaggcgtcagctaagcaaagagcagggcgtgctggacgcacaggtccaggtaaatgttaccgcctgtacactgagagtgcctttcgcaatgaaatgccaccaacaacgattccagaaatccagagggccaacttggggtggacggttctgaatatgaaggcaatgggaataaatgaccttttgtcatttgacttcatggaccctccagcatctcaagcactcatatcggctatggaacaactgtacagtcttggtgccttagatgaagagggtcttcttactaggctagggagaaaaatggctgaatttccacaagaaccacctctttctaagatgctccttgctagtgtagaccttggatgcagtgatgaaatactgacaatcattgcaatgattcaaactgggaacatattctatcgaccaagggagaagcaagcacaagcagatcggaaaagatccaactttttccagccagaaggtgatcatctcaccctactcactgtgtatgaggcatggaaggcaaaggggttttcaggaccatggtgtgttgagaatttcattcaggtaaactcactaaggagggcacaggacgtgcggaaacagcttcttgagattatggacaagttcaagctcaatgtcatctctgccgggaacaattccaccaagatagggaaagccctcactgctggattcttcttccatgctgcaaggaaggaccccagtgacgggtaccggaccctagctgatcatcagcaagtttacatccacccgagcagtgccctctttcaccagcagccacagtgggtgatctaccatgaaattgtgatgacaacaaaagagtatatgagggatgtcacagcggtggacccaagatggctactagagttggcaccgaggtcgtacaagtcggtggacccaacgaagatcagtaagcggaagcgccaagaaaggattgaacctctctatgatagatacaatgaacccaactcgtggcgcctgattaactcctgctgtcgcctgagctctgaaccgatgctttattttctgtcttgtgcatgcattgtccaatgggcgtgttacctgacagtgtctgcattttggatgccccaaacggagacatagagttgctgctttagtcgttcatttactttctgttttcccctgggctgttcactcctcgctgatccctgaccttagcttgtacgcacaaatttctgctgtacatcacaaattacac

SEQ ID NO: 3441 - DNA, 161 bp, Zea Mays
gtcttcgtccacagatcgtgttccaagaactagtacgggagcacgcgaaagaggaaaggggcccgagagattcgggagatctatctatctctacggcacgggctccccccccggtcagaagatgtcgagcacgtcgacgatggcggcgttgcagagcgggc

SEQ ID NO: 3442 - DNA, 985 bp, Zea Mays
cgacaacatcgtcgaccgctacccaccttcttccccattcgccttccctccatcattccttggattgtaaccagcttgtcaattcgtacatttcatccttaaaggtgacgagcgaggagaggaagaaccaagagcaagaagagccagccagacgcccagcccagacataacaagccggcaataatggaggagaagaaggacctgctccgcaagctgacgatcgtgtcgatcccgttcgtgttcgtggcgatcccgtcggtggtgatcatcgtgggcatgctgtcaccgcacgcggcggagccccgggcggggtcgtcgtcgtcgggggcggcggaggcggcgccggggcagaaccactcggtgtcgatgctgagcacgatgacgggggggcagatgatcctgagctgccgcgccgccttctcgggcaactgggagtacttccactacttcatcctggacccgtacaagccgcagcgggccttcttccagccgcaggccgacccctacatcctcttctgcaagtgggggtacatgggcaacttcctccaggacgtcgtcgtcttcaacagctccgccgcgtgggcgccgcgctgccgcgtcgacaacggcggatgccgatacctcttccaggacgcccacatgttcctcatcaccgggaagcacggcggcgacaccgaggcacacagggtgaaggtggaggagacgactgaggaacagcagacgcctgcacctgctggtccggggccggctccgggtcctggtccaggtccgagtccggttcccgttccggctccggcactagttccgtccctggctccgtctccggcctcccaccagcagcggcaggagaagacgctgatcggggacgtgctgctcagggagtgcagacacttgcttggcatgttccccaccatgtgccggagaaagccacacagccacccgtacgtcggaaaaatcatcggccggtggcggtggtggttcaact

SEQ ID NO: 3443 - DNA, 1002 bp, Zea Mays
aaagaaaaagagaaagacacaaacaatgaacaagtctcatggtcatgggccagcaaaccagcgtcgtgatgcgcgtgcagctgcaggaaaaataaaaataaaaagacaaaatcagtcggcccaatagccatggaagaattgctctcctgaggtgtgctctgctgcttggtgtttttcctcctcccgttcacctcgccgtcgacggggccaggcggccgaacacatccttgacgaccgccgtcgccctactcgcagcttcctgggtttcatcggatcctctgctagcgacgagcaccccctacaccaggccgttacttgggcgccggtgccatgcccggcgggtcttcgggtccagatggtgaagtggatgcaggatttgcgaagctccagggagaggatttcgagtattacatgcaaacgtactccatcatgctgggacgcaacagcaagaaatcaacagtggatgtggatctctcgagcctcggtggggattggggacaagaagttctacttcctactgccaacacggtccatcttcgcttcggctgctgctgctcggcatgctcctattattccacagcagcttcctcctccaccgtatgcacatgcacgggcaggccgccctcgtttgtccgagtttcatgaccgctccttcgaaggtgattatgggcgggaggttgatgagattgggaatggtatcagtgaaactgcgatgaggggaaagctggtaaagaggaacaagaagtcttctggcgacttggatatctatggtgggcatagaatcaatgtggaagcaatagggacgctaggtgaagacagtagatcagaaataagatcaaggggtgacagggatattgacaaccaacaagcccttcaagcagaagagaaggatgttgtatcatctgtggccacagtgttatctgatctctgtggccctggggaatggatgcccatggcaaaactccacaacgaggttttgataataattattatgggctcaag

SEQ ID NO: 3444 - DNA, 3251 bp, Zea Mays
aaagaaaaagagaaagacacaaacaatgaacaagtctcatggtcatgggccagcaaaccagcgtcgtgatgcgcgtgcagctgcaggaaaaataaaaataaaaagacaaaatcagtcggcccaatagccatggaagaattgctctcctgaggtgtgctctgctgcttggtgtttttcctcctcccgttcacctcgccgtcgacggggccaggcggccgaacacatccttgacgaccgccgtcgccctactcgcagcttcctgggtttcatcggatcctctgctagcgacgagcaccccctacaccaggccgttacttgggcgccggtgccatgcccggcgggtcttcgggtccagatggtgaagtggatgcaggatttgcgaagctccagggagaggatttcgagtattacatgcaaacgtactccatcatgctgggacgcaacagcaagaaatcaacagtggatgtggatctctcgagcctcggtgggggtatgaacatctcccgccaccacgcccggatattctacgacttccagcgccgcaggttcgcgctcgatgtcattggcaagaacgggtgccttgtcgagggcgtcctgcaccttccagggaacccccctgtcaagcttgactcgcaggatctgctgcagattggggacaagaagttctacttcctactgccaacacggtccatcttcgcttcggctgctgctgctcggcatgctcctattattccacagcagcttcctcctccaccgtatgcacatgcacgggcaggccgccctcgtttgtccgagtttcatgaccgctccttcgaaggtgattatgggcgggaggttgatgagattgggaatggtatcagtgaaactgcgatgaggggaaagctggtaaagaggaacaagaagtcttctggcgacttggatatctatggtgggcatagaatcaatgtggaagcaatagggacgctaggtgaagtagatcagaaataagatcaaggggtgacagggatattgacaaccaacaagcccttcaagcagaagagaaggatgttgtatcatctgtggccacagtgttatctgatctctgtggccctggggaatggatgcccatggcaaaactccacaacgagcttcttgagcagttcggcaacgtgtggcaccccagcagggtccggaagtacctgacacaggacgactggtcgccgacggagacgaagggcaggccttggttcggccttctggcgcttctcaggaagtacccggagcactttgtcatcaacacgaggtccaagggcaggatgacctcggagttcgtctcgctggtctccttgctctcctagagggacggagagggggtggtgttgtgtccagtactccagtccgtgtccagaagggtcggaggtgtactggctctcgtttgcttgccccttgctgtgtttcagcagctgttatatggacccaccatgttgtgctgtagtatctcgtgtggttgaggcagctgcactggtccgtgaccgtctctgtagcgtcggcagcagtgtatggaaagcatgcgttttaagttttaacctatgctagcaattcagcagcagctcggtgattaccgtatccagcatgtatatccaatgccatacttgtaactgttgtgtggtgtcctctttgcagtttcccgactctcgtgaactacgtgagtagaaacgtctcaaaagatgtcacggccactctatataattatttattgggaaaataagtttttcagccgtaattaaccacggcatgtatagtatgccgacaatcttggctgcccacgtgtccgatgcaccgaagcatcgagatcagcataattgctccaagcgtcgctccttcggggtccctctcggtctcgcaagcatcaatgattcctcgcctctcactacacggcagacggcactacaggcctacagcacgcggcgcacgcgcgccttttggtaaacaattccaggagctacagtcacaccaccaaagcaactcggccagcgcgcgggccggggtcgcatgggcgacgccggcgacaagtgtgcgctgcggctggccgccaccgcgaggaagtggctggaggacgtccgcgtcgaccgcgaaggccgcgtccaccccgccgtagccagcggggggcaggcgctcacctggctcgcgactgccggcgcccgcgtctcgctggccgagcccggccgcgtcgtctgctcgctccgcgtgggcgccccgctcaccgacgcggaggggaggtggcacgccggggccatcgcggtggcggcggacaacgtgtgcgcggcggcggtcttcacggctctgggcgcggacgtgctcaccgtccagtacagcctgtcctacttctcgcccgcccatctcgacgtgcgtgcgatgcgtgcgtacaccacggcatagctagtcaacgcccaaacagcaacacagcacaccacactacaccccccagatctttcattttttttgttccgcgccacctgattcgatctgcgtcgctgctccggccggcctcaaatcgcaggaggaggtggagatggaggggcgagtggtgggccggaaggcggcgctggcggccgcgacggtggaggtgcggaagaaagagtccggcgagctggtggcgatctgcaggcagtggatggcacctctctcgacaacaaaggtcagcacaagcacgagcagcaagctctgaagaaatgcagaacgtctctcgccaacacacacaacggttgctgcactcctccggcaggggcggcacggcaacaccactggttgttggtagagagagaatagctgacggtgcagaggatgttgaggcgccgaggcggcgccgcgacggcttgtactctcgaggtagggaatcacttctgtgccgccggcgaggcttgttcagcctgagccttctcctgtttgttaaacgcaaacatcaaatggagaagaaattcatccataaattacatgttgaacataaatatagtgtcaaaaaatcagatcattcgtaagctatttatttccattggttacaaacattatcaattggaaattacctgttacccttctatggatgctcatttattgtccatgacagcaatatgtttagagcaacaaaggagcaaaaagcgtctgtggtccaatgttacttgatcatgcatatatccatttgcaactaaatgtaaaccaagcaattcaaaaaactaatgaagacaatgaacctttatcactatacatgatgagag

SEQ ID NO: 3445 - DNA, 3089 bp, Zea Mays
aaagaaaaagagaaagacacaaacaatgaacaagtctcatggtcatgggccagcaaaccagcgtcgtgatgcgcgtgcagctgcaggaaaaataaaaataaaaagacaaaatcagtcggcccaatagccatggaagaattgctctcctgaggtgtgctctgctgcttggtgtttttcctcctcccgttcacctcgccgtcgacggggccaggcggccgaacacatccttgacgaccgccgtcgccctactcgcagcttcctgggtttcatcggatcctctgctagcgacgagcaccccctacaccaggccgttacttgggcgccggtgccatgcccggcgggtcttcgggtccagatggtgaagtggatgcaggatttgcgaagctccagggagaggatttcgagtattacatgcaaacgtactccatcatgctgggacgcaacagcaagaaatcaacagtggatgtggatctctcgagcctcggtgggggtatgaacatctcccgccaccacgcccggatattctacgacttccagcgccgcaggttcgcgctcgatgtcattggcaagaacgggtgccttgtcgagggcgtcctgcaccttccagggaacccccctgtcaagcttgactcgcaggatctgctgcagattggggacaagaagttctacttcctactgccaacacggtccatcttcgcttcggctgctgctgctcggcatgctcctattattccacagcagcttcctcctccaccgtatgcacatgcacgggcaggccgccctcgtttgtccgagtttcatgaccgctccttcgaaggtgattatgggcgggaggttgatgagattgggaatggtatcagtgaaactgcgatgaggggaaagctggtaaagaggaacaagaagtcttctggcgacttggatatctatggtgggcatagaatcaatgtggaagcaatagggacgctaggtgaagacagtagatcagaaataagatcaaggggtgacagggatattgacaaccaacaagcccttcaagcagaagagaaggatgttgtatcatctgtggccacagtgttatctgatctctgtggccctggggaatggatgcccatggcaaaactccacaacgagttcggcaacgtgtggcaccccagcagggtccggaagtacctgacacaggacgactggtcgccgacggagacgaagggcaggccttggttcggccttctggcgcttctcaggaagtacccggagcactttgtcatcaacacgaggtccaagggcaggatgacctcggagttcgtctcgctggtctccttgctctcctagagggacggagagggggtggtgttgtgtccagtactccagtccgtgtccagaagggtcggaggtgtactggctctcgtttgcttgccccttgctgtgtttcagcagctgttatatggacccaccatgttgtgctgtagtatctcgtgtggttgaggcagctgcactggtccgtgaccgtctctgtagcgtcggcagcagtgtatggaaagcatgcgttttaagttttaacctatgctagcaattcagcagcagctcggtgattaccgtatccagcatgtatatccaatgccatacttgtaactgttgtgtggtgtcctctttgcagtttcccgactctcgtgaactacgtgagtagaaacgtctcaaaagatgtcacggccactctatataattatttattgggaaaataagtttttcagccgtaattaaccacggcatgtatagtatgccgacaatcttggctgcccacgtgtccgatgcaccgaagcatcgagatcagcataattgctccaagcgtcgctccttcggggtccctctcggtctcgcaagcatcaatgattcctcgcctctcactacacggcagacggcactacaggcctacagcacgcggcgcacgcgcgccttttggtaaacaattccaggagctacagtcacaccaccaaagcaactcggccagcgcgcgggccggggtcgcatgggcgacgccggcgacaagtgtgcgctgcggctggccgccaccgcgaggaagtggctggaggacgtccgcgtcgaccgcgaaggccgcgtccaccccgccgtagccagcggggggcaggcgctcacctggctcgcgactgccggcgcccgcgtctcgctggccgagcccggccgcgtcgtctgctcgctccgcgtgggcgccccgctcaccgacgcggaggggaggtggcacgccggggccatcgcggtggcggcggacaacgtgtgcgcggcggcggtcttcacggctctgggcgcggacgtgctcaccgtccagtacagcctgtcctacttctcgcccgcccatctcgacgaggaggtggagatggaggggcgagtggtgggccggaaggcggcgctggcggccgcgacggtggaggtgcggaagaaagagtccggcgagctggtggcgatctgcaggcagtggatggcacctctctcgacaacaaaggtcagcacaagcacgagcagcaagctctgaagaaatgcagaacgtctctcgccaacacacacaacggttgctgcactcctccggcaggggcggcacggcaacaccactggttgttggtagagagagaatagctgacggtgcagaggatgttgaggcgccgaggcggcgccgcgacggcttgtactctcgaggtagggaatcacttctgtgccgccggcgaggcttgttcagcctgagccttctcctgtttgttaaacgcaaacatcaaatggagaagaaattcatccataaattacatgttgaacataaatatagtgtcaaaaaatcagatcattcgtaagctatttatttccattggttacaaacattatcaattggaaattacctgttacccttctatggatgctcatttattgtccatgacagcaatatgtttagagcaacaaaggagcaaaaagcgtctgtggtccaatgttacttgatcatgcatatatccatttgcaactaaatgtaaaccaagcaattcaaaaaactaatgaagacaatgaacctttatcactatacatgatgagag

SEQ ID NO: 3446 - DNA, 751 bp, Zea Mays
ccggcggttcatataaaccgcctccacgcaacggcctcctccaccaggctagctcccccacccaaaagccccacctcctccccgtgtcaaaacctccaagtcgatcgcccaggtggccggcgaggcggcaaccgccgccgtagagacgatggaggacgcgttgggctccgcggtgggtccccacttcagcggcctccgtctcgactcgcgccgcctctccctctccccttcctcctccccctcccgctccgccagcggcaacggcacgctcgtcgccgcgccggggctcgcgttccccaaggcggaggacgggaccaggaagcccttcgtcataggcgtgtgtggaggcaccgcgtcgggcaagacgacggtgtgcgacgcgatcattcagcagcttcacgaccaccgcgtcgcgctcgtcaaccaggattcattctaccatggtttaactgaggaacagtctgagcatgtgcaagactataattttgatcatcctgatcgacttttggagtgcatgggaaagctaacaagtggacagtccgtgaatattcctatatacgattttaagaatcacaggcgatgctctgaaaaatttaggaaggtagtgaaataaactattggtgcgaggagaataactttgttattatttatttatgatctaatttgcatacccttgtttacaacgattttttgtaagtacattgtctttataatcatcgtttttttttctgttgtgaaagctttttattta

SEQ ID NO: 3447 - DNA, 387 bp, Zea Mays
taatcagtatgtgagatttgtcaagcctgcatttgatgcttttgtcctgccttcgaagaaatatgctgatgtgatcataccaagagggggagataaccttgttgcaattgatctaattgtgcaacatatcaacacaaaacttggccagcataacttgtgcaaagcctacccaaatgtctttgtagttcacacaactttccagataagaggaatgcatactctaattcgtgacaagaacattactacacctgactttgttttctactcagataggctgattcgtctggtggttgagcatggtcttgggcatttgccatttacagagaagcaggtggttacaccaacaggaaccaaacaagacctaaggaatttagcaaagagaaggag

SEQ ID NO: 3448 - DNA, 451 bp, Zea Mays
taatcagtatgtgagatttgtcaagcctgcatttgatgcttttgtcctgccttcgaagaaatatgctgatgtgatcataccaagagggggagataaccttgttgcaattgatctaattgtgcaacatatcaacacaaaacttggccagcataacttgtgcaaagcctacccaaatgtctttgtagttcacacaactttccagataagaggaatgcatactctaattcgtgacaagaacattactacacctgactttgttttctactcagataggctgattcgtctggtggttgagcatggtcttgggcatttgccatttacagagaagcaggtggttacaccaacaggatctctttacatgggagttgacttctgcaagaagctctgtggagtgtctattattcgaaggtgccaaaacaacctactatttgtgaccgatgtggtatgtctt

SEQ ID NO: 3449 - DNA, 1349 bp, Zea Mays
taatcagtatgtgagatttgtcaagcctgcatttgatgcttttgtcctgccttcgaagaaatatgctgatgtgatcataccaagagggggagataaccttgttgcaattgatctaattgtgcaacatatcaacacaaaacttggccagcataacttgtgcaaagcctacccaaatgtctttgtagttcacacaactttccagataagaggaatgcatactctaattcgtgacaagaacattactacacctgactttgttttctactcagataggctgattcgtctggtggttgagcatggtcttgggcatttgccatttacagagaagcaggtggttacaccaacaggatctctttacatgggagttgacttctgcaagaagctctgtggagtgtctattattcgaagtggagaaagcatggaaaatgcactgcgtgcttgttgtaaggggataaaaataggcaaaattctatttcatcgcattggagacaatggacaacaactcatataccataagctgcccgtggatattgctgaacgccatgttttgcttttggaccctgtgcttggtaattcagctaatcaagccattgagcttcttatgagcaaaggagttcctgaggaccgtatcatttttctgactctcgtctcggcccctgaaggcatccattgtgtgtgcaagcgcttccctcatttgaagattgtaacctcagagattgatagtggattgaacgatgaatatcgtgtcataccaggacttggagagtatggtgatcgatacttcggcacagactaaccgatgactgatgctgttgtagttagcagtgtgaaaaggtactcaaattagagctgacattaccgtggcagatatactggtgtttggttgctttatggtatactggaagacaaacgtggataggtttctggtaggtgctgaaaccgtgaccgtgtggtcttgtccattatcatatgttttgataccacaaaccgttggttgtgaggcaaatttgttttttttttgcattttgaggctcctagctgaagtgcctgctcctcgtcacacaatactgttatacagccttgtgaaatgtatgactgaaccctgttcccggcatctaacagttgccgtggggtcacagctgtggttggaatgaaattcaaaggttgtgacaagacttaatgtgtgatgcagagttttgttgctttggagtatctataatgctttttgatgcattagtcgacatggattagtttacatttttcatttcccgtgcgcgcttggtccttctacccaggctcacctgagtaaatgagttcagttaactgtccccgccaaggcgccaagcaac

SEQ ID NO: 3450 - DNA, 1272 bp, Zea Mays
taatcagtatgtgagatttgtcaagcctgcatttgatgcttttgtcctgccttcgaagaaatatgctgatgtgatcataccaagagggggagataaccttgttgcaattgatctaattgtgcaacatatcaacacaaaacttggccagcataacttgtgcaaagcctacccaaatgtctttgtagttcacacaactttccagataagaggaatgcatactctaattcgtgacaagaacattactacacctgactttgttttctactcagataggctgattcgtctggtggttgagcatggtcttgggcatttgccatttacagagaagcaggtggttacaccaacaggatctctttacatgggagttgacttctgcaagaagctctgtggagtgtctattattcgaagtggagaaagcatggaaaatgcactgcgtgcttgttgtaaggggataaaaataggcaaaattctatttcatcgcattggagacaatggacaacaactcatataccataagctgcccgtggatattgctgaacgccatgttttgcttttggaccctgtgcttggtacaggcccctgaaggcatccattgtgtgtgcaagcgcttccctcatttgaagattgtaacctcagagattgatagtggattgaacgatgaatatcgtgtcataccaggacttggagagtatggtgatcgatacttcggcacagactaaccgatgactgatgctgttgtagttagcagtgtgaaaaggtactcaaattagagctgacattaccgtggcagatatactggtgtttggttgctttatggtatactggaagacaaacgtggataggtttctggtaggtgctgaaaccgtgaccgtgtggtcttgtccattatcatatgttttgataccacaaaccgttggttgtgaggcaaatttgttttttttttgcattttgaggctcctagctgaagtgcctgctcctcgtcacacaatactgttatacagccttgtgaaatgtatgactgaaccctgttcccggcatctaacagttgccgtggggtcacagctgtggttggaatgaaattcaaaggttgtgacaagacttaatgtgtgatgcagagttttgttgctttggagtatctataatgctttttgatgcattagtcgacatggattagtttacatttttcatttcccgtgcgcgcttggtccttctacccaggctcacctgagtaaatgagttcagttaactgtccccgccaaggcgccaagcaac

SEQ ID NO: 3451 - DNA, 1880 bp, Zea Mays
cccacatgtcatgtcacggaaatattaggtcggggctcgggcggggccgccggcctcgccctcgtcgccgagtcaccactcaccacacaccaaacaaagcaggggccaggggagcccacttcgaggccgcggcgttggctgtctcggtgtcatcgtctcctctcgtctcgttctcttctcctcacctccttcgtttcgcggagcagagcgagcagccgggaccggacctccagggagcgcaccgcggaggctagcgaagatgcccgggctcacggcaccgtccgactacgcggaggagccgccgcgtcacccggccctcaagatcaactccaaggagccattcaatgctgagcctcaccgatcagagctagtcgcatcttacatcaccccagtggatttcttctacaagaggaatcatggacccatccctaaagtcgaggacctctcaagatacactgtttccatttctggtctcgtcaacaagtccattcagctatcgatggctgacatttggtctcttccaaagtacaatgtcacagcaactttacagtgtgcaggaaacaggaggactgcgatgagtaacgtacggaaagtgagaggtgttgggtgggacatatctgctcttggaactgcaacttggggaggtgccaaactatctgatgtccttgagctagttggaataccaaaactcagttcagtcacgtctctaggagggaaacacgttgagtttgttagcgttgacaagtgtaaagtactcaaccgagaccacggatacccgctccgggttgttgtacctggagttattggtgcacgctctgtaaaatggctggacagtatcaacgtaaaagaggaggaatgccaggggttttttatgcaaaaagattacaaaatgtttccgccaaccgtggactgggacaacattaactggtcaactagaaggccacagatggatttccctgtgcagtctgctatctgtacactggaagatgtagatgttatcaaggaaggacaggctaggattgctggatatgcactttcaggtggtggccgtggcattgagagagtggatgtatcagctgatgggggtaagacctgggtcgaggctcgtagataccagaaagacaatgtggcgtatgtgtcagatggacctcaaagtgataagtgggcttgggttctctttgaggccacattagacgtaccagcgaatcctgagatcgtagttaaggcggtggactcagctgcaaacgttcagcccgagaaggtagaagacatatggaatctgaggggaatcctcaacacgtcttggcatcggatcaaaatccagagatcttcgtgcgttgaaagatctaagctgtgaaattaagtacgcagctgaccacttggagaaagcacactcactttaccattgtccctgaataataattagtcacttcaactttatgcgtctgtggagtaaggttgtacgagtgttgtggctgtgtcattatgggatttgagctcacttggtttctgtgtaaatgtcagctgctgcggtttttttttggttggtcaggtttgatatcgagaaatatccattgcattctgcgtttgaaaatactatcgcagcatagaactgttctttgggcaaatggcagctctgggaagaggtgcgcttcatatcgcagctgagaaataccaataaaagagaaagaaagatgtgaacatatatatccccttcagccgtgggaatggcaatttcagtaggcaatgatatactacctcggttcaaatatttgtagctctctagttcatttttgaatgaactaaaccgcaacaaataaaaataaactaaaccacgataaataaaaaagaacggaggaagtagttagcattaacattct

SEQ ID NO: 3452 - DNA, 1833 bp, Zea Mays
cccacatgtcatgtcacggaaatattaggtcggggctcgggcggggccgccggcctcgccctcgtcgccgagtcaccactcaccacacaccaaacaaagcaggggccaggggagcccacttcgaggccgcggcgttggctgtctcggtgtcatcgtctcctctcgtctcgttctcttctcctcacctccttcgtttcgcggagcagagcgagcagccgggaccggacctccagggagcgcaccgcggaggctagcgaagatgcccgggctcacggcaccgtccgactacgcggaggagccgccgcgtcacccggccctcaagatcaactccaaggagccattcaatgctgagcctcaccgatcagagctagtcgcatcttacatcaccccagtggatttcttctacaagaggaatcatggacccatccctaaagtcgaggacctctcaagatacactgtttccatttctggtctcgtcaacaagtccattcagctatcgatggctgacatttggtctcttccaaagtacaatgtcacagcaactttacagtgtgcaggaaacaggaggactgcgatgagtaacgtacggaaagtgagaggtgttgggtgggacatatctgctcttggaactgcaacttggggaggtgccaaactatctgatgtccttgagctagttggaataccaaaactcagttcagtcacgtctctaggagggaaacacgttgagtttgttagcgttgacaagtgtaaagaggaaaaaggtggtccttatacggcatctattccattaaatcaggcaacaaatcctgatgccgatgtattacttgcatatgaaatgaatggagaggtactcaaccgagaccacggatacccgctccgggttgttgtacctggagttattggtgcacgctctgtaaaatggctggacagtatcaacgtaaaagaggaggaatgccaggggttttttatgcaaaaagattacaaaatgtttccgccaaccgtggactgggacaacattaactggtcaactagaaggccacagatggatttccctgtgcagtctgctatctgtacactggaagatgtagatgttatcaaggaaggacaggctaggattgctggatatgcactttcaggtggtggccgtggcattgagagagtggatgtatcagctgatgggggtaagacctgggtcgaggctcgtagataccagaaagacaatgtggcgtatgtgtcagatggacctcaaagtgataagtgggcttgggttctctttgaggccacattagacgtaccagcgaatcctgagatcgtagttaaggcggtggactcagctgcaaacgttcagcccgagaaggtagaagacatatggaatctgaggggaatcctcaacacgtcttggcatcggatcaaaatccagagatcttcgtgcgttgaaagatctaagctgtgaaattaagtacgcagctgaccacttggagaaagcacactcactttaccattgtccctgaataataattagtcacttcaactttatgcgtctgtggagtaaggttgtacgagtgttgtggctgtgtcattatgggatttgagctcacttggtttctgtgtaaatgtcagctgctgcggtttttttttgaaagaaagatgtgaacatatatatccccttcagccgtgggaatggcaatttcagtaggcaatgatatactacctcggttcaaatatttgtagctctctagttcatttttgaatgaactaaaccgcaacaaataaaaataaactaaaccacgataaataaaaaagaacggaggaagtagttagcattaacattct

SEQ ID NO: 3453 - DNA, 1906 bp, Zea Mays
aaatattaggtcggggctcgggcggggccgccggcctcgccctcgtcgccgagtcaccactcaccacacaccaaacaaagcaggggccaggggagcccacttcgaggccgcggcgttggctgtctcggtgtcatcgtctcctctcgtctcgttctcttctcctcacctccttcgtttcgcggagcagagcgagcagccgggaccggacctccagggagcgcaccgcggaggctagcgaagatgcccgggctcacggcaccgtccgactacgcggaggagccgccgcgtcacccggccctcaagatcaactccaaggagccattcaatgctgagcctcaccgatcagagctagtcgcatcttacatcaccccagtggatttcttctacaagaggaatcatggacccatccctaaagtcgaggacctctcaagatacactgtttccatttctggtctcgtcaacaagtccattcagctatcgatggctgacatttggtctcttccaaagtacaatgtcacagcaactttacagtgtgcaggaaacaggaggactgcgatgagtaacgtacggaaagtgagaggtgttgggtgggacatatctgctcttggaactgcaacttggggaggtgccaaactatctgatgtccttgagctagttggaataccaaaactcagttcagtcacgtctctaggagggaaacacgttgagtttgttagcgttgacaagtgtaaagaggaaaaaggtggtccttatacggcatctattccattaaatcaggtactcaaccgagaccacggatacccgctccgggttgttgtacctggagttattggtgcacgctctgtaaaatggctggacagtatcaacgtaaaagaggaggaatgccaggggttttttatgcaaaaagattacaaaatgtttccgccaaccgtggactgggacaacattaactggtcaactagaaggccacagatggatttccctgtgcagtctgctatctgtacactggaagatgtagatgttatcaaggaaggacaggctaggattgctggatatgcactttcaggtggtggccgtggcattgagagagtggatgtatcagctgatgggggtaagacctgggtcgaggctcgtagataccagaaagacaatgtggcgtatgtgtcagatggacctcaaagtgataagtgggcttgggttctctttgaggccacattagacgtaccagcgaatcctgagatcgtagttaaggcggtggactcagctgcaaacgttcagcccgagaaggtagaagacatatggaatctgaggggaatcctcaacacgtcttggcatcggatcaaaatccagagatcttcgtgcgttgaaagatctaagctgtgaaattaagtacgcagctgaccacttggagaaagcacactcactttaccattgtccctgaataataattagtcacttcaactttatgcgtctgtggagtaaggttgtacgagtgttgtggctgtgtcattatgggatttgagctcacttggtttctgtgtaaatgtcagctgctgcggtttttttttggttggtcaggtttgatatcgagaaatatccattgcattctgcgtttgaaaatactatcgcagcatagaactgttctttgggcaaatggcagctctgggaagaggtgcgcttcatatcgcagctgagaaataccaataaaagagaaagaaagatgtgaacatatatatccccttcagccgtgggaatggcaatttcagtaggcaatgatatactacctcggttcaaatatttgtagctctctagttcatttttgaatgaactaaaccgcaacaaataaaaataaactaaaccacgataaataaaaaagaacggaggaagtagttagcattaacattct

SEQ ID NO: 3454 - DNA, 2935 bp, Zea Mays
ctctcgctgacatgccatcttgccctcgcaacgttgacatgccaacacgaggcacacacagcatgatgctaggatgcccttgtcaccatgcacaagcttgaattcagataagcaacatcgatgccataataataataaaaattaaaataaaaggtaaaaccagattcgaacgccatgctctgagtccagaatattgggatgctctcagtctcgtggttaggaacaagcaagaacacggaagtttcaaagctcacagaggcctgccggcaaccgcctattggcccaaaaaaatggctctgttactttcagatcaaccagctagtggccaaaaaaaaaaggcatgtcgccctccaaagggcgcacatgtccagtaaagctgaacaaaagcggcacccatccattactccagtagcgtgcggcttcagctggagagctcagctcgcgccagaattcaatccgctgaagatgcagcgcagccatcagcgtgatatagcacacccatctttttgtttcagtttcattatcattagtagcacatgaatgagtgaaaaggagaaacgtctcagagagagacgagaccttcccaactttcctccagaattaattattatcgtcactaaggctgctgttactattgattaaaatttcaagatgccaccagatcagctagagtagagagagagagagaggccatgcatgctctcatggcgaacaccaaccacaccacaaatatgctacgtgtcttgcaagcaaaaccagcatctaaagccactagcagcagcagccaccactgtatttcgcagctttcctgtcacatacacatgctaaatccatgccctccacggccaccacctctaagcatgtaacgtaccgcgcgcagctgaactcggccgagcaatttctgctctgagtttgtcaggtccgagagatgggatcactcagtatggctgaaaaagctcccggcgctgcgttgccagagtcttcatgtgcatacttgcttcaagaactcaagatgatatgggatgaagttgggcaagagcagagcgaaagggagagaatactcgaagagctcgagcaggagtgccaggaagtttaccgaagaaaagtaaacagtgccaacatgtccaggatccagctgcaccaagccttagctgaatccgaggctgaatttaccaacctgctgctatccctcggagaaagatcgttcccggcacgagtaaacaccctgatctcgcggcccgagaaaatggcaggcaccctgaaggagcagctcaattccatcacgcccgccctacaagaaatgcagatgagaaaggacgccagagtaaagcagttcgtggaggttcagactgaaacacacagaatcgcttctgaaatcgctggacggttagcgggtggagctgtcgctgtgaatgaagaggacctgtcgctaaagaagctcgaggagttccaaagcgaattgcgaaggctgaagagagaaaagagtgaccgcctctgcaaagtggaagaatacaaagttctaattcacaattttgcgaaagtgatgggaatggatccttcagagatacttgctagtgttcacccaaggttgctagatggaccaaatgagcagcagacgaagaatatcagtgatgacatccttaacaagctcaatatgactgttcagcagctaaaacaagagaagagcaatagaagggaaaagctccaaaaccttgtaaaagcattaacaaacttatggaatactctggatactcatatggaagagcgtcaaccttatgggcaaattaaggtactcgcaatgacttcagtaaacggtatgctaggtcctggaagcctcacacttgagacaattcaacaggttgaaactgaagttcagcggctgagtcagttgaaggcaagcaaaatggaagagctattcgtaaagaagagagcagaagtcgacgaaatttgcaagaaatcacacatgggcatgccttatcaaacagaaatggacaaaataatgaatctgataatgtcaggagatgtggtccatgatgatctattaaagacaatggatgaatatatatacagagcaaaagaggaggccacaagccggaaagacataatggataaggttgacaaatggatggcttcatgggatgaagaacgatggctagaagaatacagcagggatgaccgaaggtactcagtaagcagaggagcgcacaagcacttgaaaagggcagagcgtgctcgaattatagttaacaaaattccaggcttggtagaacagttaatggtcaagacacaattctgggaacaggagagaaacaagatcttctactatgatgagctcccgcttctagcaatgctgaaagactacatgttcacgctcaaagaaaaagaagaagagaaatacaggcaacgggagaataaaaagatacagactctacttgtaaagaggcatgagaattcaataatgttaaggcccaacacaagcttcagccgtccatcaagcagaggcttcaatacgagtcctggctccacatccatctggagcagccaagtttctgcaaaagttcagctgcctgactcagagaactccccagctgaaaaagatatgcgtgcaaaaataattaggaacagaggtacgcagggcattttgggaaataacagaagctgttcaatctctcatgaagataaagcagaagtctccacagtgaagcaaggcatttcaccaatttaattttttctcactttaaatttctacagaaattgtctgcctgacgtgaagttgcaacagcccccttaagctattagataagtgaagaaaagtatgtttgtatgcagcttacaccatattcatatatatatatttatttatgtatgattcattaaaatgttatttcggtgccgaagtactaacagagatcatcgaatgaaaagcacaaaaggg

SEQ ID NO: 3455 - DNA, 2150 bp, Zea Mays
catgctctcatggcgaacaccaaccacaccacaaatatgctacgtgtcttgcaagcaaaaccagcatctaaagccactagcagcagcagccaccactgtatttcgcagctttcctgtcacatacacatgctaaatccatgccctccacggccaccacctctaagcatgtaacgtaccgcgcgcagctgaactcggccgagcaatttctgctctgagtttgtcaggtccgagagatgggatcactcagtatggctgaaaaagctcccggcgctgcgttgccagagtcttcatgtgcatacttgcttcaagaactcaagatgatatgggatgaagttgggcaagagcagagcgaaagggagagaatactcgaagagctcgagcaggagtgccaggaagtttaccgaagaaaagtaaacagtgccaacatgtccaggatccagctgcaccaagccttagctgaatccgaggctgaatttaccaacctgctgctatccctcggagaaagatcgttcccggcacgacccgagaaaatggcaggcaccctgaaggagcagctcaattccatcacgcccgccctacaagaaatgcagatgagaaaggacgccagagtaaagcagttcgtggaggttcagactgaaacacacagaatcgcttctgaaatcgctggacggttagcgggtggagctgtcgctgtgaatgaagaggacctgtcgctaaagaagctcgaggagttccaaagcgaattgcgaaggctgaagagagaaaagagtgaccgcctctgcaaagtggaagaatacaaagttctaattcacaattttgcgaaagtgatgggaatggatccttcagagatacttgctagtgttcacccaaggttgctagatggaccaaatgagcagcagacgaagaatatcagtgatgacatccttaacaagctcaatatgactgttcagcagctaaaacaagagaagagcaatagaagggaaaagctccaaaaccttgtaaaagcattaacaaacttatggaatactctggatactcatatggaagagcgtcaaccttatgggcaaattaaggttgaaactgaagttcagcggctgagtcagttgaaggcaagcaaaatggaagagctattcgtaaagaagagagcagaagtcgacgaaatttgcaagaaatcacacatgggcatgccttatcaaacagaaatggacaaaataatgaatctgataatgtcaggagatgtggtccatgatgatctattaaagacaatggatgaatatatatacagagcaaaagaggaggccacaagccggaaagacataatggataaggttgacaaatggatggcttcatgggatgaagaacgatggctagaagaatacagcagggatgaccgaaggtactcagtaagcagaggagcgcacaagcacttgaaaagggcagagcgtgctcgaattatagttaacaaaattccaggcttggtagaacagttaatggtcaagacacaattctgggaacaggagagaaacaagatcttctactatgatgagctcccgcttctagcaatgctgaaagactacatgttcacgctcaaagaaaaagaagaagagaaatacaggcaacgggagaataaaaagatacagactctacttgtaaagaggcatgagaattcaataatgttaaggcccaacacaagcttcagccgtccatcaagcagaggcttcaatacgagtcctggctccacatccatctggagcagccaagtttctgcaaaagttcagctgcctgactcagagaactccccagctgaaaaagatatgcgtgcaaaaataattaggaacagaggtacgcagggcattttgggaaataacagaagctgttcaatctctcatgaagataaagcagaagtctccacagtgaagcaaggcatttcaccaatttaattttttctcactttaaatttctacagaaattgtctgcctgacgtgaagttgcaacagcccccttaagctattagataagtgaagaaaagtatgtttgtatgcagcttacaccatattcatatatatatatttatttatgtatgattcattaaaatgttatttcggtgccgaagtactaacagagatcatcgaatgaaaagcacaaaaggg

SEQ ID NO: 3456 - DNA, 2047 bp, Zea Mays
gtatttcgcagctttcctgtcacatacacatgctaaatccatgccctccacggccaccacctctaagcatgtaacgtaccgcgcgcagctgaactcggccgagcaatttctgctctgagtttgtcaggtccgagagatgggatcactcagtatggctgaaaaagctcccggcgctgcgttgccagagtcttcatgtgcatacttgcttcaagaactcaagatgatatgggatgaagttgggcaagagcagagcgaaagggagagaatactcgaagagctcgagcaggagtgccaggaagtttaccgaagaaaagtaaacagtgccaacatgtccaggatccagctgcaccaagccttagctgaatccgaggctgaatttaccaacctgctgctatccctcggagaaagatcgttcccggcacgacccgagaaaatggcaggcaccctgaaggagcagctcaattccatcacgcccgccctacaagaaatgcagatgagaaaggacgccagagtaaagcagttcgtggaggttcagactgaaacacacagaatcgcttctgaaatcgctggacggttagcgggtggagctgtcgctgtgaatgaagaggacctgtcgctaaagaagctcgaggagttccaaagcgaattgcgaaggctgaagagagaaaagagtgaccgcctctgcaaagtggaagaatacaaagttctaattcacaattttgcgaaagtgatgggaatggatccttcagagatacttgctagtgttcacccaaggttgctagatggaccaaatgagcagcagacgaagaatatcagtgatgacatccttaacaagctcaatatgactgttcagcagctaaaacaagagaagagcaatagaagggaaaagctccaaaaccttgtaaaagcattaacaaacttatggaatactctggatactcatatggaagagcgtcaaccttatgggcaaattaaggtactcgcaatgacttcagtaaacggtatgctaggtcctggaagcctcacacttgagacaattcaacaggttgaaactgaagttcagcggctgagtcagttgaaggcaagcaaaatggaagagctattcgtaaagaagagagcagaagtcgacgaaatttgcaagaaatcacacatgggcatgccttatcaaacagaaatggacaaaataatgaatctgataatgtcaggagatgtggtccatgatgatctattaaagacaatggatgaatatatatacagagcaaaagaggaggccacaagccggaaagacataatggataaggttgacaaatggatggcttcatgggatgaagaacgatggctagaagaatacagcagggatgaccgaaggtactcagtaagcagaggagcgcacaagcacttgaaaagggcagagcgtgctcgaattatagttaacaaaattccaggcttggtagaacagttaatggtcaagacacaattctgggaacaggagagaaacaagatcttctactatgatgaggagaataaaaagatacagactctacttgtaaagaggcatgagaattcaataatgttaaggcccaacacaagcttcagccgtccatcaagcagaggcttcaatacgagtcctggctccacatccatctggagcagccaagtttctgcaaaagttcagctgcctgactcagagaactccccagctgaaaaagatatgcgtgcaaaaataattaggaacagaggtacgcagggcattttgggaaataacagaagctgttcaatctctcatgaagataaagcagaagtctccacagtgaagcaaggcatttcaccaatttaattttttctcactttaaatttctacagaaattgtctgcctgacgtgaagttgcaacagcccccttaagctattagataagtgaagaaaagtatgtttgtatgcagcttacaccatattcatatatatatatttatttatgtatgattcattaaaatgttatttcggtgccgaagtactaacagagatcatcgaatgaaaagcacaaaaggg

SEQ ID NO: 3457 - DNA, 1998 bp, Zea Mays
gtatttcgcagctttcctgtcacatacacatgctaaatccatgccctccacggccaccacctctaagcatgtaacgtaccgcgcgcagctgaactcggccgagcaatttctgctctgagtttgtcaggtccgagagatgggatcactcagtatggctgaaaaagctcccggcgctgcgttgccagagtcttcatgtgcatacttgcttcaagaactcaagatgatatgggatgaagttgggcaagagcagagcgaaagggagagaatactcgaagagctcgagcaggagtgccaggaagtttaccgaagaaaagtaaacagtgccaacatgtccaggatccagctgcaccaagccttagctgaatccgaggctgaatttaccaacctgctgctatccctcggagaaagatcgttcccggcacgacccgagaaaatggcaggcaccctgaaggagcagctcaattccatcacgcccgccctacaagaaatgcagatgagaaaggacgccagagtaaagcagttcgtggaggttcagactgaaacacacagaatcgcttctgaaatcgctggacggttagcgggtggagctgtcgctgtgaatgaagaggacctgtcgctaaagaagctcgaggagttccaaagcgaattgcgaaggctgaagagagaaaagagtgaccgcctctgcaaagtggaagaatacaaagttctaattcacaattttgcgaaagtgatgggaatggatccttcagagatacttgctagtgttcacccaaggttgctagatggaccaaatgagcagcagacgaagaatatcagtgatgacatccttaacaagctcaatatgactgttcagcagctaaaacaagagaagagcaatagaagggaaaagctccaaaaccttgtaaaagcattaacaaacttatggaatactctggatactcatatggaagagcgtcaaccttatgggcaaattaaggtactcgcaatgacttcagtaaacggtatgctaggtcctggaagcctcacacttgagacaattcaacaggttgaaactgaagttcagcggctgagtcagttgaaggcaagcaaaatggaagagctattcgtaaagaagagagcagaagtcgacgaaatttgcaagaaatcacacatgggcatgccttatcaaacagaaatggacaaaataatgaatctgataatgtcaggagatgtggtccatgatgatctattaaagacaatggatgaatatatatacagagcaaaagaggaggccacaagccggaaagacataatggataaggttgacaaatggatggcttcatgggatgaagaacgatggctagaagaatacagcagggatgaccgaaggtactcagtaagcagaggagcgcacaagcacttgaaaagggcagagcgtgctcgaattatagttaacaaaattccaggcttggtagaacagttaatggtcaagacacaattctgggaacaggagagaaacaagatcttctactatgatgagctcccgcttctagcaatgctgaaagactacatgttcacgctcaaagaaaaagaagaagagaaatacaggcaacgggagaataaaaagatacagactctacttgtaaagaggcatgagaattcaataatgttaaggcccaacacaagcttcagccgtccatcaagcagaggcttcaatacgagtcctggctccacatccatctggagcagccaagtttctgcaaaagttcagctgcctgactcagagaactccccagctgaaaaagatatgcgtgcaaaaataattaggaacagagaaattgtctgcctgacgtgaagttgcaacagcccccttaagctattagataagtgaagaaaagtatgtttgtatgcagcttacaccatattcatatatatatatttatttatgtatgattcattaaaatgttatttcggtgccgaagtactaacagagatcatcgaatgaaaagcacaaaaggg

SEQ ID NO: 3458 - DNA, 2219 bp, Zea Mays
atggaccgtatccagatttttcctcgtcttttcggcccgggaaccgcgcctcgtcgaccgggggtggaaaatatcccgtctgaaccacacgcgaacacgaagggcacgcgacggctgtggatacaacattcttctctccggcgtcgatctgctctggcggccgcttctcaccgattatccctgcaccagttcgagtttggagaagacgaacttccaccgtcttgggaccctatatcctctccttttaggtacttgttatattctaaatgttctttattacaccatgttctatttttgttggtgtttattttctgtcatgaattttgttttagttagcaatggatgtggcactaagagatcaccttagacagaggagagatgatgatgatgatgacatgatgttgttttttctccctatgctacatatattgggttctagttcaaacatagtaacggaaaagaagcgaaggcatacatcaaagttaagtggcgaagaacatgttcaggagttgctccaaggtcatttgaagaactgtcgggtagcgttcaggatggagcctgaaattttcaaatccttggcaagttatcttagaagggaggggttggtccgtgatacaaggattaaggtcgaggaaaagttagcattcttcttatacatgctcagccataatgcctcatttgaagatctaatagaagaatttgggcacagtggtgatacatatcatcgtcacatcaagcatttctttgacctagttgttcctacactctccaagcaattcctgaagccaccaaatcctaatcatgtccatcaaaaaattgaaaggaatcctaggttttatccctacttcaagaattgcattggtgcaatcgatggcactcatgtgcctatatcgatatcacctgacaaagccgctccatttaggaataggaagggcactcttactcaaaatgtaatggtagcgtgtgattttgatctcaatgtaactttcatatccactaggtgggaggggtccgcgacggatgctagagttcttagggctgcaatgaacaatggctttcaagtacctctggggaaattttatttagtagatggcggttatgccaacacaccatctttccttgccccatatcgcggagttaggtatcatttgaaggaatatggggcaggtcgtcgaagaccacaaaactacaaggagatctttaatcatcgccatgcagtgttgaggaatcatattgaaagggccttgggagttataaagaaacgcttccccatacttaaggttgccacgtttcacaaaatagaaaaccaagtgaagataccggtagcagctgccgtgttgcacaacattattcggtctctcaaaggagatgaacaatggttagaagatcaggcagaaaatgttcaaggcaatgttgttgatattccagatggagatcaaagcaatgatcaaggcagtgaacaaggcaacaatctcagagacacaattgcacaacaaatgtggattgattatcaacaatgcaattagtgatgcattataatatgttttattgttattgggattgcaataagttcttaggaaatgtagtttgtactagttatgatgttttaatgttattcgaatatgctttcagttatgctttaaaaattattgttgttcacaattatgctttcatgttctaattatgctcatgttataagttaccatgcttggaagggggtctccaagattaaacatgcttgcaagggggtctcctagatttaacatgctcttatctaaaggtgcacaaaagaaaaaatctcctatagctactgcttcaaagacacatggaggctctccaaaagatctgctatctttcacttatgtccaatctttcacttgtgccggtgaatggtgatgatgcattgctgcttattgctgacggccgcctgctactgcttgctacttgtaccacgacaacaacgattgctgcttgttgttggccatgtgtgcgaggcctggtcatgcataaacaatggtgcatgtcatgaactctttaactgtagggcatttcagtgcattggatggattacttgtcctgtaatgaaacctataataatggtgcttctatgcgactgctgcaagacatcacttgtctgctatttcttgtgtaaactgaggataattatatgctgttgataaaactatatgcatgaatagaagcctgacgattcctggcct

SEQ ID NO: 3459 - DNA, 2089 bp, Zea Mays
gctccttcctccttcctccaacatggaaatatgtttctcaccgattatccctgcaccagttcgagtttggagaagacgaacttccaccgtcttgggaccctatatcctctccttttaggtacttgttatattctaaatgttctttattacaccatgttctatttttgttggtgtttattttctgtcatgaattttgttttagttagcaatggatgtggcactaagagatcaccttagacagaggagagatgatgatgatgatgacatgatgttgttttttctccctatgctacatatattgggttctagttcaaacatagtaacggaaaagaagcgaaggcatacatcaaagttaagtggcgaagaacatgttcaggagttgctccaaggtcatttgaagaactgtcgggtagcgttcaggatggagcctgaaattttcaaatccttggcaagttatcttagaagggaggggttggtccgtgatacaaggattaaggtcgaggaaaagttagcattcttcttatacatgctcagccataatgcctcatttgaagatctaatagaagaatttgggcacagtggtgatacatatcatcgtcacatcaagcatttctttgacctagttgttcctacactctccaagcaattcctgaagccaccaaatcctaatcatgtccatcaaaaaattgaaaggaatcctaggttttatccctacttcaagaattgcattggtgcaatcgatggcactcatgtgcctatatcgatatcacctgacaaagccgctccatttaggaataggaagggcactcttactcaaaatgtaatggtagcgtgtgattttgatctcaatgtaactttcatatccactaggtgggaggggtccgcgacggatgctagagttcttagggctgcaatgaacaatggctttcaagtacctctggggaaattttatttagtagatggcggttatgccaacacaccatctttccttgccccatatcgcggagttaggtatcatttgaaggaatatggggcaggtcgtcgaagaccacaaaactacaaggagatctttaatcatcgccatgcagtgttgaggaatcatattgaaagggccttgggagttataaagaaacgcttccccatacttaaggttgccacgtttcacaaaatagaaaaccaagtgaagataccggtagcagctgccgtgttgcacaacattattcggtctctcaaaggagatgaacaatggttagaagatcaggcagaaaatgttcaaggcaatgttgttgatattccagatggagatcaaagcaatgatcaaggcagtgaacaaggcaacaatctcagagacacaattgcacaacaaatgtggattgattatcaacaatgcaattagtgatgcattataatatgttttattgttattgggattgcaataagttcttaggaaatgtagtttgtactagttatgatgttttaatgttattcgaatatgctttcagttatgctttaaaaattattgttgttcacaattatgctttcatgttctaattatgctcatgttataagttaccatgcttggaagggggtctccaagattaaacatgcttgcaagggggtctcctagatttaacatgctcttatctaaaggtgcacaaaagaaaaaatctcctatagctactgcttcaaagacacatggaggctctccaaaagatctgctatctttcacttatgtccaatctttcacttgtgccggtgaatggtgatgatgcattgctgcttattgctgacggccgcctgctactgcttgctacttgtaccacgacaacaacgattgctgcttgttgttggccatgtgtgcgaggcctggtcatgcataaacaatggtgcatgtcatgaactctttaactgtagggcatttcagtgcattggatggattacttgtcctgtaatgaaacctataataatggtgcttctatgcgactgctgcaagacatcacttgtctgctatttcttgtgtaaactgaggataattatatgctgttgataaaactatatgcatgaatagaagcctgacgattcctggcct

SEQ ID NO: 3460 - DNA, 1611 bp, Zea Mays
gagcatattttccagcccagcagaggacacgagtggaggtgcggtccaggagcgtgagccggcaccaatcatgccgcttgcattgctggtaccgacccgtccccaccagtccagtctataagagcgacgggatcacggaaacctgttcaccgctgcgccgcctcactattgactgtcggattccccactcgccggcgacaaccgccgcgcccgatccgtctgctaggtcttgcacctccgggctctggccatggctgccgaagctggcccaatctccaaggtcctcatcgtcgtagatttcctaaaggtgccccatgggttaggtaccatggcaactacaaaggcctccacattgaccttgtattgcctggaaaggatgctgttttaggagtcgacagtgttggtacggtatcggcagctcttttgactagtttttccattcaaacattgaagccagaccttatcattaatgctggcactgctggtggcttcaaggccaaaggggcaagcattggagatgtattcctggcatcagatgtttcattccatgacaggaggataccaatacctgtttttgacatgtatggaattggagcacggaaaacttctgcagttcctaatatcttgaaggaactcaatttgaagattggcaaattgtcgactggggattctctggatatgtctccccaggatgagaaggtgatactgagcaatgatgctacagtaaaggatatggagggagctgctgtggcatatgtcgccgacatgttttcaacgccagcgatctttgtgaaagccgtgactgatatcgtggatggggagaagccaacatctgaggagtttctgcagaacctgattgccgtgacggcggcactggacctggcagtcaccaaagtggtggatttcatcagcgggaaacgcatctctgatctttgaaggctgtcatgaaatccgacacccccactgctctgatgcacgatgctaggctacgaacaatacaacattgggtcaacgattttttgtgaggtgttttctatgtgaggttaaaccttcttaaccctgtgtacaaaattcctgccaattgctatgggccggccatagcgtggaattttgtagaataatttgcaaaatgtattttgtggtgcaaatatcgatatataataatatgctgggggacgggatccccgtgggattagatgaaagaccgtgtgactgtgcctcactgaaccatgattcccttttttgtccagggcggacctaggtagtgcctagtgaggatacggaggtgtcctactcctaatccagatgttggaacggggatgtttggagcaacgtggactcggggccaagaaaggagcagtgtcagtcttgtcattgttgtctaagggtgtgtttagtttacttttggctttaacttttgcttcgtaaaagccaaaagctaaattaaaaagctggatctagaaagcagttttttctgaaaactgactttctcgtattataaaattgaaagcatgggattttcttttagcagcttttatagatggaattgttcaaatatatatgaaataatttttaacggttttagtggatttcactaaataatttttagct

SEQ ID NO: 3461 - DNA, 2043 bp, Zea Mays
ggcaaagcagacaaaacttggaagccatggtcttgccgtttctggcaaactccctaactcctctaccacaccacactgtgtacatatccaatgctggtgcgaaacgcgtcttcccgccgagctcttcgtctttcgggagagagggccggccgaacactgacgcgacagccggatacaacgagtcagcgagcagcggtgtatcctttacccaccggtatatgtggagcagaagatggaggacacaggactacacgaggcatggagcccaccgctcctgctgccatatccacaaccttcgcaggaagggatccatccatcgcttctgggtcgccggctcgccgtcacccgcctcgtcaagatttgttctgatcctctctttatacccgtccttccgtctagttgctcgcagcagcgaagtgacaaagctcattcacattgcgaggctgttgtttgggggccaggatcggcttgggaaggaggaatggaggcagcggtggggcagccgcagccgaagaaaggcaaggggaagaggaagcgcggcccgagggagctgcggctgatcaaggaccgcaccatccggaaggtgcgcttctccaagcgctagagcgggttgttcaagaaggcctacgagctctccatgttgtgcgacgcctaggtgcgtggcgctcgtcgtcttctcccccgccgaccgcctctaccagttcgcctccaccgactccaggtgatccaaatcttacccttcaaaaacgcgtgagtttcctagcaaatcagctaggagacgtcaccaaaataatctccaccgtcagatcaagctatcttctaaaacacgtgtgtttcctagcaaatcagctaggccacatcaccaaaataatatccatcgttagatcaagctacaaagaaatatgggacgtcccttctaaaacacgtgtgtttcctagcaaatcagctaggccacatcaccaaaataatctcaaccgtcatatcaagctacaaagaaatatggaacatccgattttcatcttatattttatacttgaattcttccattctccaattcttctgttgctttcctctttaatgctctctgacacatacgccatatgaggaagtcaagacgttcatctaatatgatgaacaataataaataggaaaatcaaacaaaatagtacatgtctatttcctgacacaagatgaataaggagtagcatcaatgaattcttccggcgcaagcttcaactgagcgaggaagaaaagaagacctcttgattcttagaaaatgattgtgagatcaggaaagtgtggtgcgacaaggcggtctgggccgaccatattttgatgaagaggcccagtgtcgtggttctttatgatatcgttgctaatgttcttgctgcatcaggtactttggctaaggctctagcttctggtgatcccacgattgatgtccctcctgaaaatgctcctgcattacacattgtaatcatgagaagtggaatattggttggttaagcagggaagtgcttcctcctttgatgaatttacttgataatttaatttgaatctgggatctagaactgctttgcttgtgttttgtaatgtgttttgggcagaaaaaaggaacttagtgtttgtccctgtattttgctttgttttctttggtgggacttagcatgcatcctttctcgcgtataagtgtatgtgtgtgtatgaagcatcgactgaaccatttcctgattcgagccgatgtttttattagtagagaatagtatgcaccctttgtttagtaagcgtgagcatgtgacatcgacttaagtcgttcccgacttatgccggttgctctgttagcagggaataggatacaccctttattttgtaagcgtgagcatgtaacaccgacttaagtcgttcctaacttaagacaattgctctgttagtagggtatagtatgtgttgggggccttcgtcctccgaaggtcctcaaaaacatgatttgacaatgttttccgagtggattatgtgaacaggtattttcggatccagaattat

SEQ ID NO: 3462 - DNA, 639 bp, Zea Mays
ccagccagctgaaggctcgttatctgacctgctaattatgatggatcaatggtctatggaagaaaatctgaatgggctgagcatggctgagatagcaggcttggaggaagcattgacagtcgctctggcagttatcaggaacaagctggcgatgaaggtgactgggtgcgctgggcctaaacctgaagcacacacgctctttcagcggcggtaagaaggaagtaacaaaactgtattatactagcatctagctctggttctacaaatattggtaattctccagtactgcagtacatgaacatataaggccatatattcaaagaggtgatggtttcttactgtcatgtaccgcgtgtttaattcatactggtgactggaaagaggaggaggcagctctctaaagtcacaactctgaacgtatggcttttaattgtctagcagaccagcagtgcctaagcttggtcgtggctttcttgatcacaaagagaaagctctctgaggaataaggagggggggcctcgtagacaggcgttgtgtaactggttctgatggcactacagtatataatttctctcaaacatttccaccactctactgtatgcacagggtgtcattattcctcagcttctgtatgaaaag

SEQ ID NO: 3463 - DNA, 1069 bp, Zea Mays
ttttttttggagaaaccatccattgtcacaagtcaccatgaaacacggtacagggaaagagggagggaacaacgtctcagctggatctatttttttttatgagatagtacagagtagacatgggctagcggaacgcagcacgagaacgaatccacaggagggtaaaaaaaaaccgccgctgctcctttgagaggaggtcggtccatcagaagagtgacgaggcgatcgcggagaccacggcgagcgcgacgccgccgctgaccccagcccggagcttgacgccgctgcccgcggcgctgtcgctcgcagggttgccgccggctgacggcgtgatcttggaggcgttggcgaagagggcgtagtccgcagagcccggcttcaggttcagcagggctgtagcgaaacagacagggggaagggaggcgtcaggtattatgaacggataatattaaaaaaacatccggaattattttacaagatgcgagtcatcagctctttgagtatagttaaatgtctgtctatacccattatttatgatatatatgcttaattgaatctcagcatactcaagtacatctaccttgacactaacccgctatatactagtatttagtatcctcttcgtccctaaatgaacgtgcatcccgtttgactcaattttgatttcgattatatttatgaaaaatatttatatttccatataggtttattacgaagaggaagtatatgattgttgatctactataacggtacagtataaaaattagtagatctgagagagtaggaagctaggagcatgggctgagatccgatccacgcaaagccggcccaaccaaagcacacagcccactgtggtttcatcatttgcaagtgatcagcggctttaatcagagctaacactgccatggtcagtgagggagggagcgggagtcgctagcactcactgatgcagagcgagacgttggagttggggaggttgcaggcggcggggagcgccatgagtcggtcgaagcgcagtccgagcgactgcacctggttgcgccccgtgtgcgtctgctggatgatgtag

SEQ ID NO: 3464 - DNA, 2678 bp, Zea Mays
ttcctccccaaacatctccctttaaaccggtgaagggacaccaaccagacaccactgcctgcccacaaagccacacacattcactgtcgctcacacacagcacccacccaaagaagagagagagagaagaggaggagaaagatgcactcatgcacatactatactcaaatccacgagttggcatgctgtcatgcgggtgctgctggctgctgctgctgctgtcctctctcctcccaaccccacgaggccagagcccagatgccatggccaagatatagtatataactataggagtagctgagagctttgcttcttcagagctgttcagggaacacaacacactggggaacggagagggacaccggcgccatcgcaagtacgcactcggattggggagcgacagaggaggcgcatccctgttgcctcgccagctccgtgactctctctctctcctctcccggtgcaagcaagcaagcaagctaggcttggacaacgacgacgacgatggcgtgcgggtctcgaagccggaccaacgagatggttgacgagtacgagaagctggttctcagaatgaaccctccaagggtcaccgtggacaacgactccgacatgactgccaccttgctcaaggtggacagcgccaacaagtacgggaccttgctggaggtggttcaggtgctgaccgatctgaagcttaccatcaagcgggcctacatttcctccgacggcgagtggttcatggacgtgttccatgtcgtggatcaggatgggaataaactttatgattgccaagtcatcgacagaattgaacagtctctgggagcgggatcgctcagcttccgcgggccgccggagcgggcggtggccgtggaggcggaggcggaggaggcgcagaccaccatcgagctggtggggcgggaccggccgggcctgctgtcggaggtgttcgcggtgctggcggacctcaggtgcaacgtcgtggcgtcggaggtgtggacgcacgacggccgcgtggcagcgctggtgcacgtgacggacgccgacaccctgggcgccatcgaggacccggcgcgcctggacacggcgaggcgcctgctccgccacgtgctgcgcgggagcagccgcgacaagaaggccgcccgcgccgccgtctcggcgcgcgtcgtggagcacgcgccgcgccggctgcaccagatgatgcgggcggaccgcagcgcccgccgcgacggtgagggcgagggcgagggcgatggcgagcgcgagcgcggcggtgccggcatgccggtggtcgcggtggaggactgcgccgagcgcgggtacacgctcgtcaacgtgcggtgccgcgaccgcgccaagctgctgttcgacacggtgtgcacgctcaccgacatgcagtacgtggtcttccacggcaccgtcatcgccgagggctcggaggcgtaccaggtacgtacgcacgtacttggctgccaccatcgaaacacaccgatccacggcacgaccatgagagatggaactgttcgcgtcgctagcgcctgtgcatcgcatcgcgctggtagtacactgtgtgtctgtgtccggcctctcggttttgaccagtgccagagatgcctggctgccaggcagatcttggcatgtgagagggagatccacggactgaggggggaaaaaaaggaaaaacaaaaaaacttgtccatgtactgatgtacagcaacagcaggcgagaaagcttgttttgttcggcaggccgaaaaggacgcaatcacgcaacacgctcgtgttctgctcctcgtggtgagcgagtgactgaccttgcatggcatggcatggcaggagtactacatccggcacctcgacgacagagccgccagctccggcgaggagcgcgagcgcctgcgccgcggcctcgaagccgccatccaacgccgatacaccgaggggctccggctggagctgtgctgcgaggaccgcgtggggctgctgtccgacgtgacgcgcgtgttccgggagcacgggctgtcggtgacgcacgcggaggtgggcacgcgcggggcgcgggcggccaacgtgttctacgtggtggacgcgtcgtcgggggagcccgtgcaggcgcaggcggtggccgccgtgcgcgccgagatcggcgagcagctcctgttcgtccgggagcaccaggacgccgccgccgccgccgccaacgggaccaggtcgaccgtggccggcgggcggcgctcgctcgggaacatgatccggtcccgctccgagaagttcctctacaacttagggctcatcaggtcgtgctcgtagccgccggcgactaattgatcagacagagctcgcatgtacctgaggcaggcacgcaggcaggggaattgtcgtctactagctaagctagcattagaatctctgcatctgctagataaaaaaagggagtccatgctctcatagtctcatcaacgccacgttgttcgatcgatccatgcatgtcaaagctcacgcggacgatagatcgaggtctgatgctgctagtagctgtgtagatacgctcatcttcgaatggttctcgctccttcagcccctcccttattctctagctcgtcgtatgattcgtctcgtctctgtggcagctcgcagctcccaatccatttgaataataataaaaagaatttagacgcata

SEQ ID NO: 3465 - DNA, 1155 bp, Zea Mays
tttgttttgaagatgattcacatgaactagatggtacagaaccaaaactttgaattcttacatgatgtctttctgtcatggtcggtgactcggtgtctctccctgaagcaaaactctcaaaaactagatctgacaaccaccgtgattgcacacgatcgcaagtacacgaaaattttaatttaacaggacaagacttaggtcatccgctgggcagcttccttggcaagcagcttttccctggccttggttttcgcctgtgatttggagcccatgataccaccaccccacttcttcctgacctcatcaaacttgtcgttgaagttagcctagaagtgaaccagagttccagtcagtacacaaaccaatagcacccagactagatgctgagagaaaagatattcatgacatccaaccttgatagcctccaggattttgctgaactcaagcttgtcctcgttcttgacggtggtcaagcaaagaacagatgcagtcttcttgtgaacgatctacatgaagttatttatcagcgcacacttttggcaagccattcgacacatatagcaagcaaaaggaagttggtcgggttaaaataccgatccaaggcgtgcttttcccttgacaatgcagtatggaacctccattttcctgcaaagggccgggagccacacgaccagctcgatcggatcaacatcatgagctatgacaaccagctgggccttgctctgctcgatgaggtaagtcacatggttaaggccgtacttcacaacaattggtttctttgactcaacagttttcccctcgttttcagcctgggccctcttcaagagcctctccttcttggcagctttgtcctcggggcggtacttaagaagcatcttgaacaagatcgtaccaaggttcttgtcgagggtacgtgtgaactggttgagcgccgggggcaccttgaggcgctgcttgaggatgcggcgctggcgctggatgcgcacgaccttgggccacttgacgaagcggtggaggtccttcttgggcggaagggcgccgccgatcccaaactgcttcggcctcttctcgaagagcgggttcggccataccgccttcttcttggcggggaccggcgccctaccgcctctcttcggggcctgcaagattagacga

SEQ ID NO: 3466 - DNA, 2695 bp, Zea Mays
cgtctttccgcgccacgtggtcacgtctgggacgtcggatccggcgtgatggaggcttcgtgggctcttgcccgtccgtcctgcggattagggttttgacaggcacgtctggaactggaagaatgcggtcgtgttagaaaggccgggccggtagtgttactggactaggctgaattaccactcgctccgccaaacaatcaccgtcgcccacgtaacgtgactcgccggctcgccgccggcgtccaagctaacagtaaagacagcgcactgaaatgttagcgatcaatagtataatcagtaatatgacgaacgataaaaaccaaaaaaaaaaaaaacaacgcgcaccggcattccaatgtcattactgaaccgtagcataagtatctaggcgtcgaatcaacatcaggggttctcactttgatatttcacagatgaagcagagtgcagttacatgctgtaggtgattactctaccagatacataaaccaacatcaaattctgaaagggaccggattcagaaaaaaactctccgtttccgtatctatgtttttttggcggaaatgggaccggattcgatgccattcagcgtgccgctcctcgacacctctccgcctccgcgcgacgggcgacagcgccagtcgtgaatcagcgccggcgagcccccatcctggccggcagactccctaggcggctgggccagctctccgcctccgcatccccagtctccgcgctgactgccccgccccatctccagccacgccggcgccgcatccccattcccctcaccgccgtctccggtcacgccggcgcgtccccagcccccgcgtcgtccgcttaccaggtcgctacatcaacatgaggctcaacaaggtggaagtgaaccttataaggctgctggaggctgctccctggcagcaaaatcaggctaaactactctattatgtaaccacagcccgggagcttttggagcagctaggagctgagactacaccagaagggatatcaaggtgtattctcagcaatgtcatatcatcgatttttttttggaatactgatatacagatatagcgatgtggtggttatttgcgggacacctaatattgcataaggttccgtggttttaaggaaaaaggacaataatcttccatatgttagtggcaaaaaaacaggaaactgttaatacataaattttaaaattgatcttgcccaagcaatctgtatcactattcaccttttgcgttttgcatcaatgtaaaatcctgaaacctgtatatggagtactggctgctaattaagaatacattctgataagttttttgcatttcgctgctatttcgatttggctggcattgacattgtgtttcaatattttgttaagtctttaatgacttcacattctgatgtgacaaaatggcctccaaaagacaataattcggtcggtggcctattatcttatcaaaatagccctttttttctatacataagtgctccacagaaaaatcattattctgccatgaaaggccgcatgggtcgccacttgataaatgcatggtttctcattcaggtttactaaaattttggtaatgaagttagggtactctatctgtaccgcatctcaaacccttatataaaaggttcatttcataagttactgcaatctttgctttgatgacctttggtttgatggcaacagtttctggcctattgcttggccttgtttatgaacaatcttatacctggttcagtggtcttagtaattggtctagcaaagcaagcatttattctcagctagactttcctaccgctgcttgttacattttttgcgtcgtcagaagaacatgtttttgatgaatttcttcccttttcagcatttcaaaagctaagctttctgagtattcagaaaagattgaagcactagcttctaggcttgctgcttcactgcctgaaaatgaaaagccaattactgaaagcagagatgaaatctcttacgacgaagccaaggcagaaagtccaatatctttatcatcaggactacgaaggagatcaacatgaaattaaatagagcccatgctgaggttggaccaagtcatcatgagagaaaagaagatattggagcacctataaaattggatgcagaagctcaggctcacattgagaagcataggaagcttcaagaagatttgactgatgaaatggtcgagttagcacggcaactgaaggaaagtagcctaatgatgaaccaatccgtgcaggagacagagaagatccttgattctaccgagagggccgtcgagcacagcctggcaagcgcgggccacgcaacctcgcgagccgcggaggtgtactcactggcttccaagactacgtgcttccagtggctgctaatgtttgtgatggcctgcatgtttgtaatggtggttctactcataaggatcacttgatgaaggatgagggctgtagagggcactcaaatcttttgtcacccttgactttgtttcatagggaattttttgtgttgatggtattttctcgaccaagtgtctccaaccaaacaaggctgtagtatgtgaaactgggagacggctgcctgtacagaggcttggtgattgctgtttttggttacatggggattagaggtaattgagggatatataatcgcttgctatttaattttgatcagcaagaggttatggct

SEQ ID NO: 3467 - DNA, 1245 bp, Zea Mays
gacacttctcttcaactgagcggcggattgaacaggtctacaggcgcgctcccgcacgccccgcgaaggcttttctcgacaagcttcagcagcggcgcagtcgaccagccgaccaccaggcaccagcccaccgccaaacgtaggatggcggcggagactaaaccggctgcggccagcggggttgccggcgagatggaggtggaggcgtaccgccgccttttcccggtggccttccttgagcgccacctcggcgagtccgtccgcatcgatgcccgccgcctcagagaggcccgccccaccaccgtcgccctcggcgccgtctcctccgcgcatggttccgctctcgcccgccttggcgacaccgccatgctcgcgtcggtcaagctcgaggtgatgtcgcccccggcggagcacccagacgaaggatccgtcgctgttgagttccacatgccgcctatctgctccccgctggttaggccaggccgacccactgacgttgcacccgtcatctccaaggcccttgaagacgttttgacgagttctggaatgctaaatttgaaggacctctgtttgatcactgggaaggcttcttggctagcgtacctggatatctattgcttgaatgctgatgggtctctgtttgatgctgcacttatttcagcagtggctgccttcacacatttggagattcctttagtttctgttggtgatgatggtagattatttactgttggaggcaatgatggaaaaaacaaatttgaattagtaaacagagaaaagaggaaactgacacttgattcttcagaccgcctagtgtcattacaaaaacttggaggtgcagtgacatgcatggcgactattaaggagtgcattagcttggcgaaagaaaggagacggagcctaagagaaattctgttagactctatcaaagccatggaagtcgaccaaactgaataattctacaaatagattcagttaatctaaccggactacatcttgatggtttctctctgcctcggctgtactggttgtaacagcagttttgttgatttaggcaaagtatgtagctatttgtactctacagtctacacataattcttcacttaagtagcctggcgattttgtttgacgagcatgtctgcaatgcatctttttcgcgacttggcatctttgtaacaccctaattcacattttgcaatattttattttattttttataatcaattagaactactgcatactccc

SEQ ID NO: 3468 - DNA, 690 bp, Zea Mays
agcacccaggggttttcattgagtcaaaactagtgcaccttgaaagatcaggatatctattgcttgaatgctgatgggtctctgtttgatgctgcacttatttcagcagtggctgccttcacacatttggagattcctttagtttctgttggtgatgatggtagattatttactgttggaggcaatgatggaaaaaacaaatttgaattagtaaacagagaaaagaggaaactgacacttgattcttcagaccgcctagtgtcattacaaaaacttggaggtgcagtgacatgcatggcgactattaaggagtgcattagcttggcgaaagaaaggagacggagcctaagagaaattctgttagactctatcaaagccatggaagtcgaccaaactgaataattctacaaatagattcagttaatctaaccggactacatcttgatggtttctctctgcctcggctgtactggttgtaacagcagttttgttgatttaggcaaagtatgtagctatttgtactctacagtctacacataattcttcacttaagtagcctggcgattttgtttgacgagcatgtctgcaatgcatctttttcgcgacttggcatctttgtaacaccctaattcacattttgcaatattttattttattttttataatcaattagaactactgcatactccc

SEQ ID NO: 3469 - DNA, 813 bp, Zea Mays
cgcagttcacaacatctttctgtaggttcacacgatagtaccaaataggatgtgcatatgatatgggatatctattgcttgaatgctgatgggtctctgtttgatgctgcacttatttcagcagtggctgccttcacacatttggagattcctttagtttctgttggtgatgatggtagattatttactgttggaggcaatgatggaaaaaacaaatttgaattagtaaacagagaaaagaggaaactgacacttggtgccattccattgtcccttacatgtgcacttcataaagatgaaatattagcggacccaacttctgaagaagaatcgataatagagacctatgtgactgttgttgtagattcttcagaccgcctagtgtcattacaaaaacttggaggtgcagtgacatgcatggcgactattaaggagtgcattagcttggcgaaagaaaggagacggagcctaagagaaattctgttagactctatcaaagccatggaagtcgaccaaactgaataattctacaaatagattcagttaatctaaccggactacatcttgatggtttctctctgcctcggctgtactggttgtaacagcagttttgttgatttaggcaaagtatgtagctatttgtactctacagtctacacataattcttcacttaagtagcctggcgattttgtttgacgagcatgtctgcaatgcatctttttcgcgacttggcatctttgtaacaccctaattcacattttgcaatattttattttattttttataatcaattagaactactgcatactccc

SEQ ID NO: 3470 - DNA, 728 bp, Zea Mays
atttgtttaggttggtagtcaaattatcagctctgctgtgctcacctcttcaaataatggagattcctttagtttctgttggtgatgatggtagattatttactgttggaggcaatgatggaaaaaacaaatttgaattagtaaacagagaaaagaggaaactgacacttggtgccattccattgtcccttacatgtgcacttcataaagatgaaatattagcggacccaacttctgaagaagaatcgataatagagacctatgtgactgttgttgtagattcttcagaccgcctagtgtcattacaaaaacttggaggtgcagtgacatgcatggcgactattaaggagtgcattagcttggcgaaagaaaggagacggagcctaagagaaattctgttagactctatcaaagccatggaagtcgaccaaactgaataattctacaaatagattcagttaatctaaccggactacatcttgatggtttctctctgcctcggctgtactggttgtaacagcagttttgttgatttaggcaaagtatgtagctatttgtactctacagtctacacataattcttcacttaagtagcctggcgattttgtttgacgagcatgtctgcaatgcatctttttcgcgacttggcatctttgtaacaccctaattcacattttgcaatattttattttattttttataatcaattagaactactgcatactccc

SEQ ID NO: 3471 - DNA, 686 bp, Zea Mays
gcactcgcactcgcactcgcacctgcacctcgcactagctagtcttgccaattaagctaggtatagaccagcatggcttctgctctcaagatgacggccatctgcatgctgatcctgaccacgggccagctgatggcaactgccggtgcaaaggcgccgctggtgcaggcggacgccgcgcctacggctcgccgtctgctctcggcggaccatgagcgctcagcctccgggaggacgagcaactgcccctgcaccgccatgactccgtggtgttgcttcggtttgcagaggacggcgacggagaactgcccctgcaccgccaggactccgtggtgttgctccggtttgcagaagacggcgctagaggactgcccctgcagcccatttacaccatggtgctgctccggtttgcagaagacggcgctggagaactgcccctgcacccccatgactccattctgttgctttggcgccggcagtgctgccacaaactgaaatcttcatgagaagaacatgcatgcagcgtagtacgtaggctttgtttgctgcagatgctctgcaggcttacgacccgagtacgcgtatagccgtataggcggtgtacgcctgctttgtaatgtaccaagtaatgctgttttgctttcaataaatataagaggccgcgcatgcaacagttaaactttaca

SEQ ID NO: 3472 - DNA, 1738 bp, Zea Mays
gcgagccgtcgctctcgtcgcctggcccgcccggcggcggcggttgcggggtctaaaaatgtttcaaaaaaaagagtattttggaaccagcgctgccaaatcaggaaacgggcacgacgcgggcggggcggggagccaaaatggcgctcccgggcccggcggcgacccgcgcggcggtgaggctctgccggatcgcggcgagcgcttcctcgtatttgccgtctgcggcggccgacggaaggagggagctggagctgccgttcgcgctggtggcggagcgggggatggtggtgggcggccaccgcgggatggggatgaacgcggtgggggcaccgcccggggcgcgcttcggggccgccagggagcgggagaacacgctgctctccttcggccgagccgccgcacatgctgccgtcgccttcgtcgagttcgacgtccaggtcacaaaagatggctgcccaataatcttccatgacgatttcatcctaacacaagggaccggggctgtacatgaaaggcgtgttactgatcttctcttggaagatttcctctcttatgggccacaaagagaatcttgcaaggtctccaagccattacttagacgggcaggagatggtagagtccttaattggactacagaagatgacgattccctttgcacattgcaagaggcctttcaacgtgtcagtcctcgcctgggatttaacattgagctgaagtttgatgacagcattatgtatcacaggaaagaccttcagtgtgctcttaaagctgtattgcaagtacagtcttttcccctacttcgtatagagctcagttgtttttgagcatgctaggaacagaccagtctttttttcatcgttccatcctgatgcagcacagatgatgcgggaactccagagcttgtatcctgtacttttcctaacagaaggagggacatcgaaacaccacgatccaaggaggaactcgtttgacgacgccgtccgggtatgcctagagtacgatctgcacgggatcgtgtcagaagcgagaggcgttctcaagaacccatccgcggtcgccagagcacaagaatctaacctcgcgcttctcacgtacgggcagctcaacaacgtgtgggaggcagtctacatccaatacctgatgggcgtgcacggcgtcatcgttgaccgggtggaggagatctcggacgccgtggccggttttggtctggggaaaccaggccttggccggggcggtgctggcgtggacggagcgaaaacgcatcaggctcaggccttctcgcagcagcagctggggttcctgctccggcttatccctgaactgattgagcagcggcactgaaggacggtacaccaccatatgtaacatcccagtttttgacccccctcgaagcggatggcaagcattcgcctttggggtcaacacttctcctgactgactgactggcaggtccgatttgacagcttaggaggtatacttgtgctgcgtgcacacactcttctgtatagtctgaaaactcgcggttccttgttggttcagtacagttacagccgaccatggaccgtggtcgatctcttgttgtttcaagtaggctcaccagaaaaaggtcagcaatatgtattgttggaaacttgtatgattgtgacgtgtgttgttaacaaccagggatgaaaaccgtaaccgaagtctattgtttccattaaagagaatattcttcgtatagattttggatcct

SEQ ID NO: 3473 - DNA, 1675 bp, Zea Mays
aaaaagagtattttggaaccagcgctgccaaatcaggaaacgggcacgacgcgggcggggcggggagccaaaatggcgctcccgggcccggcggcgacccgcgcggcggtgaggctctgccggatcgcggcgagcgcttcctcgtatttgccgtctgcggcggccgacggaaggagggagctggagctgccgttcgcgctggtggcggagcgggggatggtggtgggcggccaccgcgggatggggatgaacgcggtgggggcaccgcccggggcgcgcttcggggccgccagggagcgggagaacacgctgctctccttcggccgagccgccgcacatgctgccgtcgccttcgtcgagttcgacgtccaggtcacaaaagatggctgcccaataatcttccatgacgatttcatcctaacacaagggaccggggctgtacatgaaaggcgtgttactgatcttctcttggaagatttcctctcttatgggccacaaagagaatcttgcaaggtctccaagccattacttagacgggcaggagatggtagagtccttaattggactacagaagatgacgattccctttgcacattgcaagaggcctttcaacgtgtcagtcctcgcctgggatttaacattgagctgaagtttgatgacagcattatgtatcacaggaaagaccttcagtgtgctcttaaagctgtattgcaagtacagtcttttcccctacttcgtatagagctcagtaaagttgtttttgagcatgctaggaacagaccagtctttttttcatcgttccatcctgatgcagcacagatgatgcgggaactccagagcttgtatcctgtacttttcctaacagaaggagggacatcgaaacaccacgatccaaggaggaactcgtttgacgacgccgtccgggtatgcctagagtacgatctgcacgggatcgtgtcagaagcgagaggcgttctcaagaacccatccgcggtcgccagagcacaagaatctaacctcgcgcttctcacgtacgggcagctcaacaacgtgtgggaggcagtctacatccaatacctgatgggcgtgcacggcgtcatcgttgaccgggtggaggagatctcggacgccgtggccggttttggtctggggaaaccaggccttggccggggcggtgctggcgtggacggagcgaaaacgcatcaggctcaggccttctcgcagcagcagctggggttcctgctccggcttatccctgaactgattgagcagcggcactgaaggacggtacaccaccatatgtaacatcccagtttttgacccccctcgaagcggatggcaagcattcgcctttggggtcaacacttctcctgactgactgactggcaggtccgatttgacagcttaggaggtatacttgtgctgcgtgcacacactcttctgtatagtctgaaaactcgcggttccttgttggttcagtacagttacagccgaccatggaccgtggtcgatctcttgttgtttcaagtaggctcaccagaaaaaggtcagcaatatgtattgttggaaacttgtatgattgtgacgtgtgttgttaacaaccagggatgaaaaccgtaaccgaagtctattgtttccattaaagagaatattcttcgtatagattttggatcct

SEQ ID NO: 3474 - DNA, 1534 bp, Zea Mays
aaaaagagtattttggaaccagcgctgccaaatcaggaaacgggcacgacgcgggcggggcggggagccaaaatggcgctcccgggcccggcggcgacccgcgcggcggtgaggctctgccggatcgcggcgagcgcttcctcgtatttgccgtctgcggcggccgacggaaggagggagctggagctgccgttcgcgctggtggcggagcgggggatggtggtgggcggccaccgcgggatggggatgaacgcggtgggggcaccgcccggggcgcgcttcggggccgccagggagcgggagaacacgctgctctccttcggccgagccgccgcacatgctgccgtcgccttcgtcgagttcgacgtccaggtcacaaaagatggctgcccaataatcttccatgacgatttcatcctaacacaagggaccggggctgtacatgaaaggcgtgttactgatcttctcttggaagatttcctctcttatgggccacaaagagaatcttgcaaggtctccaagccattacttagacgggcaggagatggtagagtccttaattggactacagaagatgacgattccctttgcacattgcaagaggcctttcaacgtgtcagtcctcgcctgggatttaacattgagctgaagtttgatgacagcattatgtatcacaggaaagaccttcagtgtgctcttaaagctgtattgcaagttgtttttgagcatgctaggaacagaccagtctttttttcatcgttccatcctgatgcagcacagatgatgcgggaactccagagcttgtatcctgtacttttcctaacagaaggagggacatcgaaacaccacgatccaaggaggaactcgtttgacgacgccgtccgggtatgcctagagtacgatctgcacgggatcgtgtcagaagcgagaggcgttctcaagaacccatccgcggtcgccagagcacaagaatctaacctcgcgcttctcacgtacgggcagctcaacaacgtgtgggaggcagtctacatccaatacctgatgggcgtgcacggcgtcatcgttgaccgggtggaggagatctcggacgccgtggccggttttggtctggggaaaccaggccttggccggggcggtgctggcgtggacggagcgaaaacgcatcaggctcaggccttctcgcagcagcagctggggttcctgctccggcttatccctgaactgattgagcagcggcactgaaggacggtccgatttgacagcttaggaggtatacttgtgctgcgtgcacacactcttctgtatagtctgaaaactcgcggttccttgttggttcagtacagttacagccgaccatggaccgtggtcgatctcttgttgtttcaagtaggctcaccagaaaaaggtcagcaatatgtattgttggaaacttgtatgattgtgacgtgtgttgttaacaaccagggatgaaaaccgtaaccgaagtctattgtttccattaaagagaatattcttcgtatagattttggatcct

SEQ ID NO: 3475 - DNA, 1488 bp, Zea Mays
cgtcatgctcttattcctcatagcttacaactagaaccagttttttaggaacatacaactgaaccaaaaagatccttagtagcacatcaggtcatggattcacggatttgttggtctaatcttcaaagatgctcataagggtcacaaaagatggctgcccaataatcttccatgacgatttcatcctaacacaagggaccggggctgtacatgaaaggcgtgttactgatcttctcttggaagatttcctctcttatgggccacaaagagaatcttgcaaggtgtcataccttcttgctatatattttttttcatgcgaagtccatgaatgcatgctgaaggcactgatatattcactctcctttgcactggcctttcaggtctccaagccattacttagacgggcaggagatggtagagtccttaattggactacagaagatgacgattccctttgcacattgcaagaggcctttcaacgtgtcagtcctcgcctgggatttaacattgagctgaagtttgatgacagcattatgtatcacaggaaagaccttcagtgtgctcttaaagctgtattgcaagttgtttttgagcatgctaggaacagaccagtctttttttcatcgttccatcctgatgcagcacagatgatgcgggaactccagagcttgtatcctgtacttttcctaacagaaggagggacatcgaaacaccacgatccaaggaggaactcgtttgacgacgccgtccgggtatgcctagagtacgatctgcacgggatcgtgtcagaagcgagaggcgttctcaagaacccatccgcggtcgccagagcacaagaatctaacctcgcgcttctcaccaacgtgtgggaggcagtctacatccaatacctgatgggcgtgcacggcgtcatcgttgaccgggtggaggagatctcggacgccgtggccggttttggtctggggaaaccaggccttggccggggcggtgctggcgtggacggagcgaaaacgcatcaggctcaggccttctcgcagcagcagctggggttcctgctccggcttatccctgaactgattgagcagcggcactgaaggacggtacaccaccatatgtaacatcccagtttttgacccccctcgaagcggatggcaagcattcgcctttggggtcaacacttctcctgactgactgactggcaggtccgatttgacagcttaggaggtatacttgtgctgcgtgcacacactcttctgtatagtctgaaaactcgcggttccttgttggttcagtacagttacagccgaccatggaccgtggtcgatctcttgttgtttcaagtaggctcaccagaaaaaggtcagcaatatgtattgttggaaacttgtatgattgtgacgtgtgttgttaacaaccagggatgaaaaccgtaaccgaagtctattgtttccattaaagagaatattcttcgtatagattttggatcct

SEQ ID NO: 3476 - DNA, 1252 bp, Zea Mays
ccctcctcaccctggaaaacacacgcacgcagacctcccccaaccgctctcagtctctccctccctgtctctctgttcaatctctcggctcgccatggacgctccgagcaactgcacgcgtcctgcgcgcgccaagtgaccgaacaagctcgagctctgctgctacagttgcttgcccctgtgccaaactggcaggaggtaggtagcttatagcagctagagctaagctgtggtgcgtagcggcagctagagctagctagcagtgcacgcgcaggtgcgtgctagctagctcgttagctgtgtactagctgtgtagcagcagcagcagcacagtagcagtagtcggtgataaaaggaatttctttggggacatgtcggcggagagagccccggtgctggtgaggcacggcggcggcggcgtggaggcgctccggcagctcccgccggggttccggttccgccccacggacgaggagctcgtggtgcagtacctccggcgcaaggccatcggcgtgccgctccccgccgccgtcatccccgtcttccgcgacctctacagccgcgacccctgggacgtcgtcgccgtctctgcccctgcagatacgaggagcgagggggagaaatacttcttcgcggtgcggccggcgagcggcggcaagagcagcggcgctggtactggtagcagggcggccgcgggcgggcggtggaagccgtcggggaaggagaagccggtggtgctgccccgcccgtgtggcggagggagcctcctggtgggcgtgaagagggcgatgacgttcgtgccccgccgccggaagaagacggcggcgttgccgtcggcggccctgaagaccggctgggtcatgcacgagtaccgcctcgccgcgccgctgcacaagaacgtgagtgactcttctcttctccatatacgccgcgtgcatgcttcaacctctttgcctctctctctctctctctctctctccctccctccctccccctcagaagtcatacgtaacaagtcatgcatgtagatcttttgatgactgatctggttacagtggcaaagttcagggactcagtaatagagtattatatatagggtatattaagccctcaaagttacgctaattaggtcagtaactgcaaacatctagctagctagctagctagtgacatgataccagcagtacctgactacctgagatcgattgtgagattacgagaagggatgattttttttgagggatacgagaag

SEQ ID NO: 3477 - DNA, 1249 bp, Zea Mays
ccctcctcaccctggaaaacacacgcacgcagacctcccccaaccgctctcagtctctccctccctgtctctctgttcaatctctcggctcgccatggacgctccgagcaactgcacgcgtcctgcgcgcgccaagtgaccgaacaagctcgagctctgctgctacagttgcttgcccctgtgccaaactggcaggaggtaggtagcttatagcagctagagctaagctgtggtgcgtagcggcagctagagctagctagcagtgcacgcgcaggtgcgtgctagctagctcgttagctgtgtactagctgtgtagcagcagcagcagcacagtagcagtagtcggtgataaaaggaatttctttggggacatgtcggcggagagagccccggtgctggtgaggcacggcggcggcggcgtggaggcgctccggcagctcccgccggggttccggttccgccccacggacgaggagctcgtggtgcagtacctccggcgcaaggccatcggcgtgccgctccccgccgccgtcatccccgtcttccgcgacctctacagccgcgacccctgggacgtcgtcgccgtctctgcccctgatacgaggagcgagggggagaaatacttcttcgcggtgcggccggcgagcggcggcaagagcagcggcgctggtactggtagcagggcggccgcgggcgggcggtggaagccgtcggggaaggagaagccggtggtgctgccccgcccgtgtggcggagggagcctcctggtgggcgtgaagagggcgatgacgttcgtgccccgccgccggaagaagacggcggcgttgccgtcggcggccctgaagaccggctgggtcatgcacgagtaccgcctcgccgcgccgctgcacaagaacgtgagtgactcttctcttctccatatacgccgcgtgcatgcttcaacctctttgcctctctctctctctctctctctctccctccctccctccccctcagaagtcatacgtaacaagtcatgcatgtagatcttttgatgactgatctggttacagtggcaaagttcagggactcagtaatagagtattatatatagggtatattaagccctcaaagttacgctaattaggtcagtaactgcaaacatctagctagctagctagctagtgacatgataccagcagtacctgactacctgagatcgattgtgagattacgagaagggatgattttttttgagggatacgagaag

SEQ ID NO: 3478 - DNA, 1849 bp, Zea Mays
cctcaatccactgctaaccgaacagggcctaaccattcccggctcccggcagagacggccgctcgcctccagaagagcaacccaagtcgccgagagcgactcccacacgacccacctaccccgccgccgccgccgccgcatccccctcgatcccgtctggcgatcgggggctcccagacacatcacagatacacaccacgctaagccaaatcgagcaacgcctatcatcatattataatttcccctcattcatctcacagtcccaggcctcccctccctcctccccgtcgccaaccaacctccaacccccagccgatcgcgtcggagatgctgggcgtcgcgcggaggcggctcggatccggatgcgtgctcgcccagctggcgcaggccctccgccccgccgccgctcccgccaggacctactccgccgcggccaaggagataactgtacgggaagcattgaataccgcattagatgaagaaatgtcggcagacccttctgttttcttgatgggagaagaggttggcgagtaccaaggtgcatacaagatatccaagggtttgcttgacaagtatggccccgatagggttctcgatactccgatcactgaggcgggcttcactggcattggtgttggtgccgcttaccatggtcttcgacctattgtagagttcatgacatttaacttttcgatgcaggcaattgatcacataattaattcagctgccaagtcgaactacatgtctgctgggcagatatctgttcctattgtctttaggggtccaaatggtgctgctgctggagttggtgcccaacactcacagtgctatgcagcttggtatgcacatgttcccggattgaaagttctagctccatattctgcagaagatgctcgaggtttgctgaaagcagcaatcagggatccagatcctgttgtgttccttgaaaatgaacttctttatggtgaatcatttcctgtatctgctgaggtacttgattctagcttctgccttccgattggaaaggctaagatagagcgacaagggaaagatgtcactatcactgcattctccaaaatggtgggatatgcccttcaggccgctgatatactggccaaggaaggtatcagtgccgaggtaatcaatcttcgctcaattagaccgctggatagagctactattaatgcatctgtgaggaaaaccaatagattggtaaccgtagaagaaggcttccctcaacatgggattggtgcggaaatatgcatgtctgttgtagaggacagctttgagtatcttgatgcaccagtcgagaggattgctggagctgatgtgcccatgccgtacgctgccaaccttgagaggatggctgttccacaggtcgatgacatcgtccgggcagccaagcgtgcttgctacagggcagcagtaccgatggcagcaaccgcctagtccagcagaaccctgcatgttgcatttctttgtctaattttaatgtccgtgctgcagaaagacgtgtcacataatggtgtgacgagtacccactgccgctgcaactcaactatagcatgagctgagtttttgtagagccaccgagagatttgcagcagagcctctggagatgagaattttacttgtggcgagatgttgtgagtaacttgtattcagaagggggaactctcaagagatcctcaagtcgtgattccagttgcggctttcttgatagtaacgtactccctctgttttttagttgtcgctggatagtttaattttgcattattcagtgataactaaaacaaaacggatggagtacgtatttaccatgctagtgctagaggatcttttgttcctc

SEQ ID NO: 3479 - DNA, 1762 bp, Zea Mays
gcctaaccattcccggctcccggcagagacggccgctcgcctccagaagagcaacccaagtcgccgagagcgactcccacacgacccacctaccccgccgccgccgccgccgcatccccctcgatcccgtctggcgatcgggggctcccagacacatcacagatacacaccacgctaagccaaatcgagcaacgcctatcatcatattataatttcccctcattcatctcacagtcccaggcctcccctccctcctccccgtcgccaaccaacctccaacccccagccgatcgcgtcggagatgctgggcgtcgcgcggaggcggctcggatccggatgcgtgctcgcccagctggcgcaggccctccgccccgccgccgctcccgccaggacctactccgccgcggccaaggagataactgtacgggaagcattgaataccgcattagatgaagaaatgtcggcagacccttctgttttcttgatgggagaagaggttggcgagtaccaaggtgcatacaagatatccaagggtttgcttgacaagtatggccccgatagggttctcgatactccgatcactgaggcgggcttcactggcattggtgttggtgccgcttaccatggtcttcgacctattgtagagttcatgacatttaacttttcgatgcaggcaattgatcacataattaattcagctgccaagtcgaactacatgtctgctgggcagatatctgttcctattgtctttaggggtccaaatggtgctgctgctggagttggtgcccaacactcacagaagatgctcgaggtttgctgaaagcagcaatcagggatccagatcctgttgtgttccttgaaaatgaacttctttatggtgaatcatttcctgtatctgctgaggtacttgattctagcttctgccttccgattggaaaggctaagatagagcgacaagggaaagatgtcactatcactgcattctccaaaatggtgggatatgcccttcaggccgctgatatactggccaaggaaggtatcagtgccgaggtaatcaatcttcgctcaattagaccgctggatagagctactattaatgcatctgtgaggaaaaccaatagattggtaaccgtagaagaaggcttccctcaacatgggattggtgcggaaatatgcatgtctgttgtagaggacagctttgagtatcttgatgcaccagtcgagaggattgctggagctgatgtgcccatgccgtacgctgccaaccttgagaggatggctgttccacaggtcgatgacatcgtccgggcagccaagcgtgcttgctacagggcagcagtaccgatggcagcaaccgcctagtccagcagaaccctgcatgttgcatttctttgtctaattttaatgtccgtgctgcagaaagacgtgtcacataatggtgtgacgagtacccactgccgctgcaactcaactatagcatgagctgagtttttgtagagccaccgagagatttgcagcagagcctctggagatgagaattttacttgtggcgagatgttgtgagtaacttgtattcagaagggggaactctcaagagatcctcaagtcgtgattccagttgcggctttcttgatagtaacgtactccctctgttttttagttgtcgctggatagtttaattttgcattattcagtgataactaaaacaaaacggatggagtacgtatttaccatgctagtgctagaggatcttttgttcctc

SEQ ID NO: 3480 - DNA, 1462 bp, Zea Mays
gttgtcgaccttgatcggaaacagatggatggcagtagctgtacagggaagcggataactgtacgggaagcattgaataccgcattagatgaagaaatgtcggcagacccttctgttttcttgatgggagaagaggttggcgagtaccaaggtgcatacaagatatccaagggtttgcttgacaagtatggccccgatagggttctcgatactccgatcactgaggcgggcttcactggcattggtgttggtgccgcttaccatggtcttcgacctattgtagagttcatgacatttaacttttcgatgcaggcaattgatcacataattaattcagctgccaagtcgaactacatgtctgctgggcagatatctgttcctattgtctttaggggtccaaatggtgctgctgctggagttggtgcccaacactcacagtgctatgcagcttggtatgcacatgttcccggattgaaagttctagctccatattctgcagaagatgctcgaggtttgctgaaagcagcaatcagggatccagatcctgttgtgttccttgaaaatgaacttctttatggtgaatcatttcctgtatctgctgaggtacttgattctagcttctgccttccgattggaaaggctaagatagagcgacaagggaaagatgtcactatcactgcattctccaaaatggtgggatatgcccttcaggccgctgatatactggccaaggaaggtatcagtgccgaggtaatcaatcttcgctcaattagaccgctggatagagctactattaatgcatctgtgaggaaaaccaatagattggtaaccgtagaagaaggcttccctcaacatgggattggtgcggaaatatgcatgtctgttgtagaggacagctttgagtatcttgatgcaccagtcgagaggattgctggagctgatgtgcccatgccgtacgctgccaaccttgagaggatggctgttccacaggtcgatgacatcgtccgggcagccaagcgtgcttgctacagggcagcagtaccgatggcagcaaccgcctagtccagcagaaccctgcatgttgcatttctttgtctaattttaatgtccgtgctgcagaaagacgtgtcacataatggtgtgacgagtacccactgccgctgcaactcaactatagcatgagctgagtttttgtagagccaccgagagatttgcagcagagcctctggagatgagaattttacttgtggcgagatgttgtgagtaacttgtattcagaagggggaactctcaagagatcctcaagtcgtgattccagttgcggctttcttgatagtaacgtactccctctgttttttagttgtcgctggatagtttaattttgcattattcagtgataactaaaacaaaacggatggagtacgtatttaccatgctagtgctagaggatcttttgttcctc

SEQ ID NO: 3481 - DNA, 2950 bp, Zea Mays
ggcgtgttcggctggctacaagccgacactgttgcagctgtttggactgctgcagctgcaatccatagagagaaaaatactgtagaagccgcagccgcagccggattgcagccgcagcaagccgcagcgaacaagctgtttatccatgggcgtcgaacaacagagacacaagcctgccaaaccaaaccagccttccgccggattggaaactaccagatgctaccagcgctactaatccagcgtctcccaccgtaggaatctctcaattagcgacccgtgtcctgttgcacaattatatagccaccatttgagaagataggggggaggtggagcagagcgcaaggagaggggacaaggagggacgggaaggggaataagctgaggggaaggcaaggcaagcaggaatcggctgggttgcgcgccgacttcctggccgagtttttctagccatcggatcgaggcagtcccatcggcgaagacccggttccgttcggcggccatgcggttggtttctctgcttggtctgtcaggactctgatgggcatggttcatcctaggtttctggttgcttgctcggggtccaagctgtgcttcatctccagttgccgcggtagcagcgcaaagatgatgatgtcctttctccggaggcgtccggagcgtcgttccacgcttcctatattgattgagttcggtagatgattcttggacatcggtttggtgttcggtggggctcaaatacggattctgaaggacttcaaaggtgcttgaatcagtacatcttaggtgctatcccagactaggctgcgatgggtttaccccaaccttcaacagtcgaggatgatgcgccaacagcactgcgcacctctatttcttgccctccacattctggaggagttagtgcctgtgatttggatgggcttcctgcgggaagctctagcagaagggtgctttcgtacccattgatatgtgattttgatagaaaggccacattagatgctcctaatgaatcaaatgggtattctaaagacggatgtgaatttggcgaacccgcagacctccatggactaaacattgattcaagaaatacaaattcttggtcttctcctaaattagtgccttctgtccatatgccggcaaggagggttgtgggctttgattctggttgtattggaggttctgatggggcagaaacggatatggtcgattcatctttggtcgacagaaattctcatttgccatttgatcagcatgaacttcaagcaaggaaaagactgttctctccattgaaaaatgtgctcgttaaacagttcaatggtgatatgctcaaccttccttctggtgattctagatttaggcattctgattcagccgataaactatacagtactggtttccaagataataaaaaagccaacacgggatgcatcaatttttttgaaacgcgggatactccagcctctaggtgctccagccggagcccagaatgggatgttactaggagcaattctaattcattcactgatggtcctttacttgggagcaaggattatatatcctattatgatcatctagcagctagtgcaaaattagcgcactctccgctttctctgtctcctctcagccctaaatatatgaacaaaattaaagtgacaggatctcaaagatatataatgaaagatcttgaggatgacttcctagatttaaaggaaactggaggttctggcggagctaggatgccggaggtatcaaaaggatctaacttgttacatgatgaacttgatgttatgacacctaaatggggttcattgagaagatatcaaaattggggccctgaatcttcccctacatctcccagaattggttatggtcggagtttgtctttgcatgtaaggaggtcacttgttggctcctttgaggagtctcttttatctggtcgatactcgtatggaaaagacagtcagacaattgatggtttcttagctgttctaaatgtcactggtggtagtttcttccccacaactcagaaacttccattctcagtaacaagcatcgatgaggatagctccttactatactattcttctattgatcttgctgggaggttgccttcgaataacaccaaaagcccaaagctccaaagaagctacagtaataatgattcgcggtcagcaaagagtcgtttacgcatccctgttaagggtcgcatacagctggtggtaagcaacccagagaagactccacttcatactttcttctgcaactatgacttgagtgacatgcctcctggaaccaaggctgcaacggtggacagaactgcaactcaaatgatgaatcagaaaaaggagatctgaaaacaagatgtcgatcattggatagtgattctaatgaatcaaataagtctagttctccaggaaataagaaagaccagtctgattctgatggttgctgctgtcaaatggataagtttggcatgggagaaaagaaatcatgctgctcaccttctaagatcaatgatagttcaggtggagctgtgcttcgttatgctttgcacctgcgatttctgtgcccctccaagaaaaaatcctcgaaatcaatgcttcgttgcaaatctgatctatcaacggcaccatatagcagcaatacgctacctgaggaagaacggaggttctatctctacaatgatcttagagttgtatttcctcaaaggcactcagatgcagatgaaggcgaggagtgtagcccttctcgttgcaggagaatgaaggggatgactcaagatgccaccgaacaaaaggtgttagagcagcagatggtggccgatccttaccagcgtctcattgctctagcaccttcgttcagtggcactgagtcacccctcatcctcttgcaaagagaagctacctcgttcggcgttgacttgattaaatctttagggtttgatgcttgttaa

SEQ ID NO: 3482 - DNA, 3249 bp, Zea Mays
ggcgtgttcggctggctacaagccgacactgttgcagctgtttggactgctgcagctgcaatccatagagagaaaaatactgtagaagccgcagccgcagccggattgcagccgcagcaagccgcagcgaacaagctgtttatccatgggcgtcgaacaacagagacacaagcctgccaaaccaaaccagccttccgccggattggaaactaccagatgctaccagcgctactaatccagcgtctcccaccgtaggaatctctcaattagcgacccgtgtcctgttgcacaattatatagccaccatttgagaagataggggggaggtggagcagagcgcaaggagaggggacaaggagggacgggaaggggaataagctgaggggaaggcaaggcaagcaggaatcggctgggttgcgcgccgacttcctggccgagtttttctagccatcggatcgaggcagtcccatcggcgaagacccggttccgttcggcggccatgcggttggtttctctgcttggtctgtcaggactctgatgggcatggttcatcctaggtttctggttgcttgctcggggtccaagctgtgcttcatctccagttgccgcggtagcagcgcaaagatgatgatgtcctttctccggaggcgtccggagcgtcgttccacgcttcctatattgattgagttcggtagatgattcttggacatcggtttggtgttcggtggggctcaaatacggattctgaaggacttcaaaggtgcttgaatcagtacatcttaggtgctatcccagactaggctgcgatgggtttaccccaaccttcaacagtcgaggatgatgcgccaacagcactgcgcacctctatttcttgccctccacattctggaggagttagtgcctgtgatttggatgggcttcctgcgggaagctctagcagaagggtgctttcgtacccattgatatgtgattttgatagaaaggccacattagatgctcctaatgaatcaaatgggtattctaaagacggatgtgaatttggcgaacccgcagacctccatggactaaacattgattcaagaaatacaaattcttggtcttctcctaaattagtgccttctgtccatatgccggcaaggagggttgtgggctttgattctggttgtattggaggttctgatggggcagaaacggatatggtcgattcatctttggtcgacagaaattctcatttgccatttgatcagcatgaacttcaagcaaggaaaagactgttctctccattgaaaaatgtgctcgttaaacagttcaatggtgatatgctcaaccttccttctggtgattctagatttaggcattctgattcagccgataaactatacagtactggtttccaagataataaaaaagccaacacgggatgcatcaatttttttgaaacgcgggatactccagcctctaggtgctccagccggagcccagaatgggatgttactaggagcaattctaattcattcactgatggtcctttacttgggagcaaggattatatatcctattatgatcatctagcagctagtgcaaaattagcgcactctccgctttctctgtctcctctcagccctaaatatatgaacaaaattaaagtgacaggatctcaaagatatataatgaaagatcttgaggatgacttcctagatttaaaggaaactggaggttctggcggagctaggatgccggaggtatcaaaaggatctaacttgttacatgatgaacttgatgttatgacacctaaatggggttcattgagaagatatcaaaattggggccctgaatcttcccctacatctcccagaattggttatggtcggagtttgtctttgcatgtaaggaggtcacttgttggctcctttgaggagtctcttttatctggtcgatactcgtatggaaaagacagtcagacaattgatggtttcttagctgttctaaatgtcactggttgccttcgaataacaccaaaagcccaaagctccaaagaagctacagtaataatgattcgcggtcagcaaagagtcgtttacgcatccctgttaagggtcgcatacagctggtggtaagcaacccagagaagactccacttcatactttcttctgcaactatgacttgagtgacatgcctcctggaaccaagactttcgtgcggcaaaaggtcactctctccccctctgccttgccttctaatccagtggaagaaggaagcaagacttgtgatgttaattctggtcacaaatcttctcagtcagtttcatgtggaaatgaacctagcgaacggggagctcgttctgaatgctgcaacggtggacagaactgcaactcaaatgatgaatcagaaaaaggagatctgaaaacaagatgtcgatcattggatagtgattctaatgaatcaaataagtctagttctccaggaaataagaaagaccagtctgattctgatggttgctgctgtcaaatggataagtttggcatgggagaaaagaaatcatgctgctcaccttctaagatcaatgatagttcaggtggagctgtgcttcgttatgctttgcacctgcgatttctgtgcccctccaagaaaaaatcctcgaaatcaatgcttcgttgcaaatctgatctatcaacggcaccatatagcagcaatacgctacctgaggaagaacggaggttctatctctacaatgatcttagagttgtatttcctcaaaggcactcagatgcagatgaaggcgagctgcgagtggagcatgatttccccgccgatcccaagtactttgacataagcaactgatggttgcgctgctgcaccggacaataataatctgtaaatatgttatcatgactaacttggtcaccagccgtttcatcttttcaccaacaaatgtacaggtactgggatcgccattgggtcctcgatcctcgttggggttaggcacggagaaaattccttctctgtggtagggaacaaggacaagggtgcatggattttcttcaaaggtcttgtttagatactctagtatgcatcacaatccacaggtcttgtttagatactctagtatgcatcacaatccacatatgttgaggtgcattggaatgtaaaattaaattaatttatactccaatccatatcaatacatatggatttgggtggatactagagtacccaaacaaagcataaatggggcggttacgaggaga

SEQ ID NO: 3483 - DNA, 2205 bp, Zea Mays
ctcgtcgaatttctcactccgatgtgctaacctagtgggatttctttctcctcaaatcacacgctgccgccggctgatcagatccagcgcctaacccggcggctccggcgacggtgagtcgccggcgtccatgacaccggccgcggcgtggtgcgcgcagcaccgcctccggttcctcctaccgtccctcttcctcgcgcccgtcctcttcttcctcctgtcgccgccgtcctctccgcccttcgtcagcctccccgcctccggcggtggttggtggagtggcgcccgtgcgggtggtggcggacggcgccattgcaagctccgtccaggaggaacgggtacatccgaatagattgctacggcggtctcaaccagctgcgacgtgatttatgtgacggaattggggttgcacgacttctgaacgcaacaatggttctacccaagtttgaggttgccgcctattggaatgaatctagtggctttgcagatgtttttgatgttgattacttcattgagcagactagaggatatgtggaagttgttaaggacttgcctgcagagatagcgtccagagaaccatttaaggttgactgcagtaaacggaaaggacattttgattacgttgaaacggtacttccagctctcttggagcatcaatacatctcattgacacctgccatgaatcaaagaagggatagaaaccccgcatatgcaaaagcttcatactgtcaaggctgttacagcgctctcaggttgaataagaatgtggaatccaaagctgttgagctcctccaagccataccaaaacccttcttatcccttcacctgagattcgaaccagatatggtcgcttacagtcggtgttcatacactggcctttcttccaaatcaatggactccattgaagctgcacgcagggagggtaggaaggtattgaccggtgacgctgcccgcctgtggaggaaccgtggcaagtgccctctgacaccaagcgaaacagcattcatcctccaggcgctaggcattcctacaaacacaaacatttatttagctgctggtgacgggctaatggaactcgagggtttcacgtccgtttacaagaacacgtacaccaaatcgtctctcctgacccatgaagctttcgagaacatgcatggcaacacaaaggctgctctcgactactatgtttcggtcaacagcgacgcctatgtcgccacattctttggaaatatggacaagatggtaactgcgatgagaacaatgcaaggtctccagaggacactggtcttgagcaggagggccttcgcaaactacactgccgctgggctagcagggcagcaactggctaaggctatgtgggacgctcatcgagaggagtatgtcagaggcagggggtcggctctgcccgagtactgcttttgtgagttcaaattgtagcgctagtggctaagtgatatgaggtttacctagacggacacctgttggcttggcgcaactgttagatctcgctgtgattgtgtagacatgaatgagctgttactgcaaacgagatttcagtcagatgagcttcaactgggtacagctgagagacattgatgtgttatgacctggccttctgtgcgagtcagctgcgctgtagtatctagaccaagtggaaatgctcttgtcatatcccataacagagatgcagttcaggtgctgccggacgtgaaacagtagtgtgtgtctgtgagctacaacacgcgggaaggttcgagtatgatgatccatcagccgagctaagaggaaaggggtacttaactggtttggaggacaagcgggcgacagttttggaaattctgttactcttctctaacaaactgtattcttctcccttccagtctcttcatctgttttcgttgtaattctgtatgctgttgaacttgtggagaaagaagaggaacaattttcttctgagatttgtgtgtgcgtttgcaccgttttatcactggtgatcctgtcagagctctctggttggcttcattggaattggctgcctttgggtttgggggacatgttctgccgcacacaccggccagaacattttccgacgtctgggtttttgccaaactctttgatttttttttattttagctcatccctccatcctaaaatagttgacatttctctgttctgaaatagtttttaatcttaccttctaacgac

SEQ ID NO: 3484 - DNA, 2252 bp, Zea Mays
ctcgtcgaatttctcactccgatgtgctaacctagtgggatttctttctcctcaaatcacacgctgccgccggctgatcagatccagcgcctaacccggcggctccggcgacggtgagtcgccggcgtccatgacaccggccgcggcgtggtgcgcgcagcaccgcctccggttcctcctaccgtccctcttcctcgcgcccgtcctcttcttcctcctgtcgccgccgtcctctccgcccttcgtcagcctccccgcctccggagagctgcctcctttaagctcgcggctcatatgggcgcagcggtggttggtggagtggcgcccgtgcgggtggtggcggacggcgccattgcaagctccgtccaggaggaacgggtacatccgaatagattgctacggcggtctcaaccagctgcgacgtgatgtacgttaagagacctcgttatgtgacggaattggggttgcacgacttctgaacgcaacaatggttctacccaagtttgaggttgccgcctattggaatgaatctagatgtttttgatgttgattacttcattgagcagactagaggatatgtggaagttgttaaggacttgcctgcagagatagcgtccagagaaccatttaaggttgactgcagtaaacggaaaggacattttgattacgttgaaacggtacttccagctctcttggagcatcaatacatctcattgacacctgccatgaatcaaagaagggatagaaaccccgcatatgcaaaagcttcatactgtcaaggctgttacagcgctctcaggttgaataagaatgtggaatccaaagctgttgagctcctccaagccataccaaaacccttcttatcccttcacctgagattcgaaccagatatggtcgcttacagtcggtgttcatacactggcctttcttccaaatcaatggactccattgaagctgcacgcagggagggtaggaaggtattgaccggtgacgctgcccgcctgtggaggaaccgtggcaagtgccctctgacaccaagcgaaacagcattcatcctccaggcgctaggcattcctacaaacacaaacatttatttagctgctggtgacgggctaatggaactcgagggtttcacgtccgtttacaagaacacgtacaccaaatcgtctctcctgacccatgaagctttcgagaacatgcatggcaacacaaaggctgctctcgactactatgtttcggtcaacagcgacgcctatgtcgccacattctttggaaatatggacaagatggtaactgcgatgagaacaatgcaaggtctccagaggacactggtcttgagcaggagggccttcgcaaactacactgccgctgggctagcagggcagcaactggctaaggctatgtgggacgctcatcgagaggagtatgtcagaggcagggggtcggctctgcccgagtactgcttttgtgagttcaaattgtagcgctagtggctaagtgatatgaggtttacctagacggacacctgttggcttggcgcaactgttagatctcgctgtgattgtgtagacatgaatgagctgttactgcaaacgagatttcagtcagatgagcttcaactgggtacagctgagagacattgatgtgttatgacctggccttctgtgcgagtcagctgcgctgtagtatctagaccaagtggaaatgctcttgtcatatcccataacagagatgcagttcaggtgctgccggacgtgaaacagtagtgtgtgtctgtgagctacaacacgcgggaaggttcgagtatgatgatccatcagccgagctaagaggaaaggggtacttaactggtttggaggacaagcgggcgacagttttggaaattctgttactcttctctaacaaactgtattcttctcccttccagtctcttcatctgttttcgttgtaattctgtatgctgttgaacttgtggagaaagaagaggaacaattttcttctgagatttgtgtgtgcgtttgcaccgttttatcactggtgatcctgtcagagctctctggttggcttcattggaattggctgcctttgggtttgggggacatgttctgccgcacacaccggccagaacattttccgacgtctgggtttttgccaaactctttgatttttttttattttagctcatccctccatcctaaaatagttgacatttctctgttctgaaatagtttttaatcttaccttctaacgac

SEQ ID NO: 3485 - DNA, 2260 bp, Zea Mays
gtcgaatttctcactccgatgtgctaacctagtgggatttctttctcctcaaatcacacgctgccgccggctgatcagatccagcgcctaacccggcggctccggcgacggtgagtcgccggcgtccatgacaccggccgcggcgtggtgcgcgcagcaccgcctccggttcctcctaccgtccctcttcctcgcgcccgtcctcttcttcctcctgtcgccgccgtcctctccgcccttcgtcagcctccccgcctccggagagctgcctcctttaagctcgcggctcatatgggcgcagcggtggttggtggagtggcgcccgtgcgggtggtggcggacggcgccattgcaagctccgtccaggaggaacgggtacatccgaatagattgctacggcggtctcaaccagctgcgacgtgatgtacgttaagagacctcgttatgtgacggaattggggttgcacgacttctgaacgcaacaatggttctacccaagtttgaggttgccgcctattggaatgaatctagtggctttgcagatgtttttgatgttgattacttcattgagcagactagaggatatgtggaagttgttaaggacttgcctgcagagatagcgtccagagaaccatttaaggttgactgcagtaaacggaaaggacattttgattacgttgaaacggtacttccagctctcttggagcatcaatacatctcattgacacctgccatgaatcaaagaagggatagaaaccccgcatatgcaaaagcttcatactgtcaaggctgttacagcgctctcaggttgaataagaatgtggaatccaaagctgttgagctcctccaagccataccaaaacccttcttatcccttcacctgagattcgaaccagatatggtcgcttacagtcggtgttcatacactggcctttcttccaaatcaatggactccattgaagctgcacgcagggagggtaggaaggtattgaccggtgacgctgcccgcctgtggaggaaccgtggcaagtgccctctgacaccaagcgaaacagcattcatcctccaggcgctaggcattcctacaaacacaaacatttatttagctgctggtgacgggctaatggaactcgagggtttcacgtccgtttacaagaacacgtacaccaaatcgtctctcctgacccatgaagctttcgagaacatgcatggcaacacaaaggctgctctcgactactatgtttcggtcaacagcgacgcctatgtcgccacattctttggaaatatggacaagatggtaactgcgatgagaacaatgcaaggtctccagaggacactggtcttgagcaggagggccttcgcaaactacactgccgctgggctagcagggcagcaactggctaaggctatgtgggacgctcatcgagaggagtatgtcagaggcagggggtcggctctgcccgagtactgcttttgtgagttcaaattgtagcgctagtggctaagtgatatgaggtttacctagacggacacctgttggcttggcgcaactgttagatctcgctgtgattgtgtagacatgaatgagctgttactgcaaacgagatttcagtcagatgagcttcaactgggtacagctgagagacattgatgtgttatgacctggccttctgtgcgagtcagctgcgctgtagtatctagaccaagtggaaatgctcttgtcatatcccataacagagatgcagttcaggtgctgccggacgtgaaacagtagtgtgtgtctgtgagctacaacacgcgggaaggttcgagtatgatgatccatcagccgagctaagaggaaaggggtacttaactggtttggaggacaagcgggcgacagttttggaaattctgttactcttctctaacaaactgtattcttctcccttccagtctcttcatctgttttcgttgtaattctgtatgctgttgaacttgtggagaaagaagaggaacaattttcttctgagatttgtgtgtgcgtttgcaccgttttatcactggtgatcctgtcagagctctctggttggcttcattggaattggctgcctttgggtttgggggacatgttctgccgcacacaccggccagaacattttccgacgtctgggtttttgccaaactctttgatttttttttattttagctcatccctccatcctaaaatagttgacatttctctgttctgaaatagtttttaatcttaccttctaacgac

SEQ ID NO: 3486 - DNA, 2217 bp, Zea Mays
gtcgaatttctcactccgatgtgctaacctagtgggatttctttctcctcaaatcacacgctgccgccggctgatcagatccagcgcctaacccggcggctccggcgacggtgagtcgccggcgtccatgacaccggccgcggcgtggtgcgcgcagcaccgcctccggttcctcctaccgtccctcttcctcgcgcccgtcctcttcttcctcctgtcgccgccgtcctctccgcccttcgtcagcctccccgcctccggagagctgcctcctttaagctcgcggctcatatgggcgcagcggtggttggtggagtggcgcccgtgcgggtggtggcggacggcgccattgcaagctccgtccaggaggaacgggtacatccgaatagattgctacggcggtctcaaccagctgcgacgtgatgtacgttaagagacctcgttatgtgacggaattggggttgcacgacttctgaacgcaacaatggttctacccaagtttgaggttgccgcctattggaatgaatctagactagaggatatgtggaagttgttaaggacttgcctgcagagatagcgtccagagaaccatttaaggttgactgcagtaaacggaaaggacattttgattacgttgaaacggtacttccagctctcttggagcatcaatacatctcattgacacctgccatgaatcaaagaagggatagaaaccccgcatatgcaaaagcttcatactgtcaaggctgttacagcgctctcaggttgaataagaatgtggaatccaaagctgttgagctcctccaagccataccaaaacccttcttatcccttcacctgagattcgaaccagatatggtcgcttacagtcggtgttcatacactggcctttcttccaaatcaatggactccattgaagctgcacgcagggagggtaggaaggtattgaccggtgacgctgcccgcctgtggaggaaccgtggcaagtgccctctgacaccaagcgaaacagcattcatcctccaggcgctaggcattcctacaaacacaaacatttatttagctgctggtgacgggctaatggaactcgagggtttcacgtccgtttacaagaacacgtacaccaaatcgtctctcctgacccatgaagctttcgagaacatgcatggcaacacaaaggctgctctcgactactatgtttcggtcaacagcgacgcctatgtcgccacattctttggaaatatggacaagatggtaactgcgatgagaacaatgcaaggtctccagaggacactggtcttgagcaggagggccttcgcaaactacactgccgctgggctagcagggcagcaactggctaaggctatgtgggacgctcatcgagaggagtatgtcagaggcagggggtcggctctgcccgagtactgcttttgtgagttcaaattgtagcgctagtggctaagtgatatgaggtttacctagacggacacctgttggcttggcgcaactgttagatctcgctgtgattgtgtagacatgaatgagctgttactgcaaacgagatttcagtcagatgagcttcaactgggtacagctgagagacattgatgtgttatgacctggccttctgtgcgagtcagctgcgctgtagtatctagaccaagtggaaatgctcttgtcatatcccataacagagatgcagttcaggtgctgccggacgtgaaacagtagtgtgtgtctgtgagctacaacacgcgggaaggttcgagtatgatgatccatcagccgagctaagaggaaaggggtacttaactggtttggaggacaagcgggcgacagttttggaaattctgttactcttctctaacaaactgtattcttctcccttccagtctcttcatctgttttcgttgtaattctgtatgctgttgaacttgtggagaaagaagaggaacaattttcttctgagatttgtgtgtgcgtttgcaccgttttatcactggtgatcctgtcagagctctctggttggcttcattggaattggctgcctttgggtttgggggacatgttctgccgcacacaccggccagaacattttccgacgtctgggtttttgccaaactctttgatttttttttattttagctcatccctccatcctaaaatagttgacatttctctgttctgaaatagtttttaatcttaccttctaacgac

SEQ ID NO: 3487 - DNA, 2191 bp, Zea Mays
gtcgaatttctcactccgatgtgctaacctagtgggatttctttctcctcaaatcacacgctgccgccggctgatcagatccagcgcctaacccggcggctccggcgacggtgagtcgccggcgtccatgacaccggccgcggcgtggtgcgcgcagcaccgcctccggttcctcctaccgtccctcttcctcgcgcccgtcctcttcttcctcctgtcgccgccgtcctctccgcccttcgtcagcctccccgcctccggcggtggttggtggagtggcgcccgtgcgggtggtggcggacggcgccattgcaagctccgtccaggaggaacgggtacatccgaatagattgctacggcggtctcaaccagctgcgacgtgatttatgtgacggaattggggttgcacgacttctgaacgcaacaatggttctacccaagtttgaggttgccgcctattggaatgaatctagatgtttttgatgttgattacttcattgagcagactagaggatatgtggaagttgttaaggacttgcctgcagagatagcgtccagagaaccatttaaggttgactgcagtaaacggaaaggacattttgattacgttgaaacggtacttccagctctcttggagcatcaatacatctcattgacacctgccatgaatcaaagaagggatagaaaccccgcatatgcaaaagcttcatactgtcaaggctgttacagcgctctcaggttgaataagaatgtggaatccaaagctgttgagctcctccaagccataccaaaacccttcttatcccttcacctgagattcgaaccagatatggtcgcttacagtcggtgttcatacactggcctttcttccaaatcaatggactccattgaagctgcacgcagggagggtaggaaggtattgaccggtgacgctgcccgcctgtggaggaaccgtggcaagtgccctctgacaccaagcgaaacagcattcatcctccaggcgctaggcattcctacaaacacaaacatttatttagctgctggtgacgggctaatggaactcgagggtttcacgtccgtttacaagaacacgtacaccaaatcgtctctcctgacccatgaagctttcgagaacatgcatggcaacacaaaggctgctctcgactactatgtttcggtcaacagcgacgcctatgtcgccacattctttggaaatatggacaagatggtaactgcgatgagaacaatgcaaggtctccagaggacactggtcttgagcaggagggccttcgcaaactacactgccgctgggctagcagggcagcaactggctaaggctatgtgggacgctcatcgagaggagtatgtcagaggcagggggtcggctctgcccgagtactgcttttgtgagttcaaattgtagcgctagtggctaagtgatatgaggtttacctagacggacacctgttggcttggcgcaactgttagatctcgctgtgattgtgtagacatgaatgagctgttactgcaaacgagatttcagtcagatgagcttcaactgggtacagctgagagacattgatgtgttatgacctggccttctgtgcgagtcagctgcgctgtagtatctagaccaagtggaaatgctcttgtcatatcccataacagagatgcagttcaggtgctgccggacgtgaaacagtagtgtgtgtctgtgagctacaacacgcgggaaggttcgagtatgatgatccatcagccgagctaagaggaaaggggtacttaactggtttggaggacaagcgggcgacagttttggaaattctgttactcttctctaacaaactgtattcttctcccttccagtctcttcatctgttttcgttgtaattctgtatgctgttgaacttgtggagaaagaagaggaacaattttcttctgagatttgtgtgtgcgtttgcaccgttttatcactggtgatcctgtcagagctctctggttggcttcattggaattggctgcctttgggtttgggggacatgttctgccgcacacaccggccagaacattttccgacgtctgggtttttgccaaactctttgatttttttttattttagctcatccctccatcctaaaatagttgacatttctctgttctgaaatagtttttaatcttaccttctaacgac

SEQ ID NO: 3488 - DNA, 1209 bp, Zea Mays
caaaattctgacactcaaacaaaacataacaaaacttcattttatttaacgaaatgtttatgactcgacgacggcaccaaatcgaagatttggtcgtattactttatacatactttggacctgtgagcaaaaagaattattggcacaacgtgtcagccgttctgaaataaaatgtctttgtgataataacaagcacaagtaaagatatagccgctttaatcggtgacagtaactagcctaggcgcgtgctgtcgggaggcagttggttataaagggatggagcctgatcgagtcagtcccgtccttatcgcctctctctgttcgcacgcgactaacagccagcccccgacacgtgaacaagcacaagggcgtcgcctcgcctcgcgcgcgctggcgccgcgcacagacacgcaagcgtggatcgcgccgccgctcatcggggcatcgtccgtcgcgacaggggtccgtcgccgccgccgccggccggtagtagcggcgtgccacaggcggcgggaggcggcggtgtctcttggggcggcccccggttgcgcgccgaggacgagcacgccgtcatcgtcgcggcgctggctcacgtcgtcggcgccgggacgcggagctcgccaccggccgggctcggccagcaaggccgacacgctcccctctcctgcgtggattcagtgacgcaccgcagggccgtccacgcgccggcgacggagccacagcggcggcctcggtaccgcggcgtgcggcagcggccgtggggcaagtgggcggcggagatccgggacccggtgaaggcggcgcgcgtgtggctcggcaccttcgccaccgccgaggacgccgcgcgcgcctacgacgacgccgcgctccgcttccggggcgccaaggccaaactcaacttccccgctaacgcgggccacggcaccgctgccgccttccagccccgctaccgcggccagcatcggccggggacgccgagcgctgctgctgctcctgttggctgtcacgaggagccgtcgtcgtcgttccccgacctcggccagtacgcgcgcatcctgcagagcggcggcggcgacttggacctgcaggccgccttcgcgggcggggtggcgccggcggggcggtcctcgacttccgcggcgtcggcgtcggcgtcgtcgccgtggcaaggtgctacttgacattgtatcgcgcgacgatcagcacaca

SEQ ID NO: 3489 - DNA, 2592 bp, Zea Mays
atggtctttatgcgattccgccccccagttcattttcttctcactccccggctccactcctaaacccagaacccagcccgccgcaaccctagccgccgccgccggcaccacaccaccgccatagtcacctccatggccgcggcgtcggaggacgcgttgcggcgctcgctcgcggagcgccaggccgccgtggacgcgcaggccgaggccgtgcgcgcgctcaaggccggcggcggcgcgtccaaggccgacgtggacgccgcggtcgaggcgctcaaggcgctcaaggtcgaggccggcgccgccgcgcgccggctgcagcaggcggtcggggcgggcgcgggtggcgccgcgagggaggagctgcgccaggcggtggtcaacacgctggagcggaagctgttttacataccctccttcaagatctaccgcggtgtcgcggggctctacgactacgggccgcccgggtgccgcgttaaggccaacgtgctttccttctggcgccagcactttgttttggaagagaatatgttggaggttgactgcccctgtgtgacgcctgaggttgtcttgaaggcatcgggccatgtcgagaagtttactgacctcatggttaaagacgagaagacaggcacatgctaccgtgctgaccacttgttgaaagatttttgcaaggagaagcttgagaaagaccttgccttgccccaagagaaggctgatgaatttaagcgtattcttgccattttggatgacctctcagcagaggaacttggtgcaaagattaaggaatacgacattgttgcccctgatacaaaaaatccgctttctgatccctacccattcaatcttatgttccagacatctattggccccactggtcttagcgtggggtatatgcgaccagagacagcacagggtatttttgtaaatttcaaggatctatactattacaatggccaaaagctcccctttgcagctgctcaaattgggcaagcttttagaaatgagatctcgccacgacaaggtcttctccgagtgcgtgaattcacattggcagagattgagcattttgtggacccagaggacaaatcacatccaaaatttgttgatgttgctgatttggagttcctgatgtttccaagagagctacaactctcaggggagtcggccaaactattgaagctcggggaagcagttgcaaagggaactgttaataacgagacacttggttacttcattggaagggtctatcttttcctgacatgcttgggaattgataagggtcggttgcgcttcaggcagcatttacctaatgagatggctcattatgctgctgattgttgggatgctgagatagagtgctcttatgggtggatagagtgtgtgggtattgctgatagatctgcatatgatttgaaagctcacagtgagaaaagcggtgtcccacttgttgctcatgaaaaattctccaaacctagagaggttgagaaacttgtcatagttccctcgaagaaagacctggggctggcttttaagggcaaccaaaagatggtccttgaagctttggaggctatgagtgagaaagaagcatttgagatgaaagctgaactagaaaccaagggggagacaaattttaaagtctgcacgcttggaaaagatgtggtgattacaaagaagatggtatcaatcagcatggaaaagaagctggaacatcagcgagtcttcaccccttcagttattgagccgtcatttggaataggccggatcatctactgcttgtttgagcactcattttgcacaaggcctagcaaatcagaagaggaacaactgaatgtcttccggtttcctcctcttgtggctcctatcaagtgcaccgtgttccccctcgtcaagaatcaagagtttgatgctgctgccaaggaaatcgccaaggcattaacaactgctggtatctcacacattattgatactactgcaatttctattgggaggagatacgcgaggaccgatgagattggtgttccatttgccgtgacagtggattcggcaacaaacgtgactatccgagagagggacagcaaggagcagatccgtgtggacataaacgaggtggcgtccgtggtgaagcagctgacagaaggacaaagcacctgggcagatgtttctgcaaagtatcctgcccatgttggaccccaaggtgaccaggagtgaaaaatcctgccacccttatgtctagccatggaccgagaaggagccaggatggatttcattctccgattgccgagaagattgactagcctaaacataaccgcatttggtatttgacacgatccagcgcggtcaaaccgagaattgaactgggatccacagtggaattggaatataaagagtttggttgtttgcccataaaaggcccgtatccaggctccaacaccaaaaggagggcctctccgtagcctgactccctatcccactctttatttttaaatttcactatgtaaacggtatactctataatgtattcccttgtcttagaatataaaaaggcataaccatttttttattgtcccacaatataatatgtgttctttt

SEQ ID NO: 3490 - DNA, 2876 bp, Zea Mays
aacatccgcgaatgggacagcatcccgtgggcgcgcttggcgactggcccagcgtccagggctgcccgaattattgcagacccctttgacgggttgaccacggcggcgccgccgttgctggccccgtcgctgccgacttcgccccggcgcctccccggaacgacctcccacgtggtgggccctcccccgcgttccacctgttttctccgttgacagcgcatcgagccttgcactgcccccactttccagtgtcacttgcgtaactcacctcgctgggtggggcccaccgggagccccgtgcgccgcgcgcgcgcgaggggtcaaactaccgccgcgttgtcgcgctcatcgtcgccgcgtgctgtggtctgctgctcctgctgctacccctcaatctccccgcaccgcacctcacctcccccagctcctcctcttcctctaattgctacacgctttcgaggctagggttgcctcgtcctcctcgctgtccacatggcgcgaatcctcatgcggctcctcctcctcgccgcggcggcggcggtggcggcgggggacggctgcctcaactccggctgcgtcgcgctgggctcctacctcgtcgcccggaaccagaacctcacctacatcgccagcctcttcggcatcggcgactaccacgcgctggcgcgctacaaccccggcaccacaaacctggactacatccaggccggccagagcgtcaacatctccttcacctgcggctgccacacgttccccaactcggacgccacctacctcggcggctccttcccgcacaaggttgtcaccggcgacacctacggcggcatcgcccagaactacaacaacctcacctccgccgcctggcttgccgtcaccaacccgtatcccacgaacaacatccccgacaccaacaccgtggtgaacgtcacggtcaactgcacctgcggggacccgaagatctcgtcggactacgggttcttcctcacctacccgctcatgggccagaccctcgccgccgtcgccgccaactacagcttcaactcgtcgtcgcagttggacctgctccgcaagtataaccccggcatggacaccgctacatccgggctcgttttcatccccgtcaaagatggcaatggaagttaccatcctttaaaaccaccagggcagattctgtccttttgcaagctaattatgcttccacattaagttttttgcaagaaaaactggacaccagctattcttgtgagataaaaagggtggcttgtttacactttgtcaatctcatcatcgattcgggccaggaaacggaggttctataggagctatagtaggaggagttgttggtggtgttgctattctggtcctgggcgtcttgttatatatcatgttctataggcgaaaaaaggcaaacaaggctgccttacttccatcttctgaagattctacccaacttgctactacatccatggataaatctgccttgtcaaccagtcaagctgatagtagctctggagttccaggaattactgttgataaatcagtagagttctcgtatgaagaactttttaatgccacagagggatttagcatgagtaacaaaatcgggcaaggtggttttggtgctgtctattatgctgagctcaggggcgagaaagctgccataaagaaaatggatatgcaggcttctcacgagttccttgctgagttaaaagttttgacacatgttcatcatttgaatctggtgcgcttgattggtttttgcaccgaaagttccttgtttcttgtctatgagttcatcgagaatgggaacttaagccagcatttgcgtggaactggttatgagcctctgtcttgggctgccagggttcagattgcactagattcagcaagaggtcttgagtacattcatgaacatactgtcccagtgtacatacatcgggacatcaaatcagcaaatatcttgatagacaagaactaccgtgcaaaggtcgcagattttggtttaacaaaacttacagaagttggtaatacatcactacccacacgtggaatcgtgggcacatttggttacatgcctcctgaatatgctcggtacggtgatgtttctccaaaggtcgatgtttatgcctttggcgttgtcctctacgaacttatttcggccaaagacgccattgtcagatcaaccgagtcttccagtgattcaaagggattggtttatctgtttgaggaggctctcaacacaccggatcccaaggaaggccttcaaagactgattgatccggcgctcggcgaggattaccccatcgactcgatcctcaagatgacggtcctggcaagggcgtgcacgcaggaagaccccaaggcaaggcccacgatgagatccatagtggtggcgctgatgacgctgtcgtcaaccagcgagttctgggacatgaacgcgatccaggagaaccaaggtgtcgtgaacctcatgtccgggagatgactcctgtccctgtgggctgtggtatatattattgtacgtcctacctgccttcccctgggcaattgtacattagggctcatttgtacggcccgttgacggccagagaggagggccactgtaggtatttacaatgtaatatcttgtcactcaagggttttctcccgtgtttaggctccctttggaacaaaaaggaaatttcctgaacctgtgttttttgctgtattttttaactaatttctatgaaattcttatagcattcatgtgaaattcctgcattctaaaggatcggaaggtcgttgagagccgcgtgtgagttactggggttatgtacaactctgaagatacttataaaagttattaatatttacttatttattatagtgtatctgcg

SEQ ID NO: 3491 - DNA, 3323 bp, Zea Mays
gccgttgctggccccgtcgctgccgacttcgccccggcgcctccccggaacgacctcccacgtggtgggccctcccccgcgttccacctgttttctccgttgacagcgcatcgagccttgcactgcccccactttccagtgtcacttgcgtaactcacctcgctgggtggggcccaccgggagccccgtgcgccgcgcgcgcgcgaggggtcaaactaccgccgcgttgtcgcgctcatcgtcgccgcgtgctgtggtctgctgctcctgctgctacccctcaatctccccgcaccgcacctcacctcccccagctcctcctcttcctctaattgctacacgctttcgaggctagggttgcctcgtcctcctcgctgtccacatggcgcgaatcctcatgcggctcctcctcctcgccgcggcggcggcggtggcggcgggggacggctgcctcaactccggctgcgtcgcgctgggctcctacctcgtcgcccggaaccagaacctcacctacatcgccagcctcttcggcatcggcgactaccacgcgctggcgcgctacaaccccggcaccacaaacctggactacatccaggccggccagagcgtcaacatctccttcacctgcggctgccacacgttccccaactcggacgccacctacctcggcggctccttcccgcacaaggttgtcaccggcgacacctacggcggcatcgcccagaactacaacaacctcacctccgccgcctggcttgccgtcaccaacccgtatcccacgaacaacatccccgacaccaacaccgtggtgaacgtcacggtcaactgcacctgcggggacccgaagatctcgtcggactacgggttcttcctcacctacccgctcatgggccagaccctcgccgccgtcgccgccaactacagcttcaactcgtcgtcgcagttggacctgctccgcaagtataaccccggcatggacaccgctacatccgggctcgttttcatccccgtcaaagatggcaatggaagttaccatcctttaaaaccaccagggcagattctgtccttttgcaagctaattatgcttccacattaagttttttgcaagaaaaactggacaccagctattcttgtgagataaaaagggtggcttgtttacactttgtcaatctcatcatcgattcgggccaggaaacggaggttctataggagctatagtaggaggagttgttggtggtgttgctattctggtcctgggcgtcttgttatatatcatgttctataggcgaaaaaaggcaaacaaggctgccttacttccatcttctgaagattctacccaacttgctactacatccatggataaatctgccttgtcaaccagtcaagctgatagtagctctggagttccaggaattactgttgataaatcagtagagttctcgtatgaagaactttttaatgccacagagggatttagcatgagtaacaaaatcgggcaaggtggttttggtgctgtctattatgctgagctcaggggcgagaaagctgccataaagaaaatggatatgcaggcttctcacgagttccttgctgagttaaaagttttgacacatgttcatcatttgaatctggtgcgcttgattggtttttgcaccgaaagttccttgtttcttgtctatgagttcatcgagaatgggaacttaagccagcatttgcgtggaactggttatgagcctctgtcttgggctgccagggttcagattgcactagattcagcaagaggtcttgagtacattcatgaacatactgtcccagtgtacatacatcgggacatcaaatcagcaaatatcttgatagacaagaactaccgtgcaaaggtcgcagattttggtttaacaaaacttacagaagttggtaatacatcactacccacacgtggaatcgtgggcacatttggttacatgcctcctgaatatgctcggtacggtgatgtttctccaaaggtcgatgtttatgcctttggcgttgtcctctacgaacttatttcggccaaagacgccattgtcagatcaaccgagtcttccagtgattcaaagggattggtttatctggtaatcaactcttttactttctgttcatggggaaaagaccagtggtctagttaagcacacgggtgctagttctggtattggtttggcttccattgtcatttctcttagatgctggagtttgtggccaatttatttgtgaaaaggggaaaaaaactttcaggtcttgtgcttcactaccatgagggtatttgttacttcccagtgtaaaatttgcataagtagtttaggtggtgtttgaatgcgctaaagctaatagttagccgctaaaattagctgaagactttcaaacagtctagctaatagttcagctattagctacttttagcaaattagctaatagttgctagctaattccactagtaatttttttgtcaactaactattaggtctagtgccttcaaacacccccttagtacatcctgttttgaataattgttttcacctgatcatcttttattctttctctcgtttgttgtcatatgtgttcgtgaatgattaggctgtagacaatggagcaaactcttttcttcttcttcttgccagcaatatttgtaacatttgaggaggctctcaacacaccggatcccaaggaaggccttcaaagactgattgatccggcgctcggcgaggattaccccatcgactcgatcctcaagatgacggtcctggcaagggcgtgcacgcaggaagaccccaaggcaaggcccacgatgagatccatagtggtggcgctgatgacgctgtcgtcaaccagcgagttctgggacatgaacgcgatccaggagaaccaaggtgtcgtgaacctcatgtccgggagatgactcctgtccctgtgggctgtggtatatattattgtacgtcctacctgccttcccctgggcaattgtacattagggctcatttgtacggcccgttgacggccagagaggagggccactgtaggtatttacaatgtaatatcttgtcactcaagggttttctcccgtgtttaggctccctttggaacaaaaaggaaatttcctgaacctgtgttttttgctgtattttttaactaatttctatgaaattcttatagcattcatgtgaaattcctgcattctaaaggatcggaaggtcgttgagagccgcgtgtgagttactggggttatgtacaactctgaagatacttataaaagttattaatatttacttatttattatagtgtatctgcg

SEQ ID NO: 3492 - DNA, 3184 bp, Zea Mays
gccgttgctggccccgtcgctgccgacttcgccccggcgcctccccggaacgacctcccacgtggtgggccctcccccgcgttccacctgttttctccgttgacagcgcatcgagccttgcactgcccccactttccagtgtcacttgcgtaactcacctcgctgggtggggcccaccgggagccccgtgcgccgcgcgcgcgcgaggggtcaaactaccgccgcgttgtcgcgctcatcgtcgccgcgtgctgtggtctgctgctcctgctgctacccctcaatctccccgcaccgcacctcacctcccccagctcctcctcttcctctaattgctacacgctttcgaggctagggttgcctcgtcctcctcgctgtccacatggcgcgaatcctcatgcggctcctcctcctcgccgcggcggcggcggtggcggcgggggacggctgcctcaactccggctgcgtcgcgctgggctcctacctcgtcgcccggaaccagaacctcacctacatcgccagcctcttcggcatcggcgactaccacgcgctggcgcgctacaaccccggcaccacaaacctggactacatccaggccggccagagcgtcaacatctccttcacctgcggctgccacacgttccccaactcggacgccacctacctcggcggctccttcccgcacaaggttgtcaccggcgacacctacggcggcatcgcccagaactacaacaacctcacctccgccgcctggcttgccgtcaccaacccgtatcccacgaacaacatccccgacaccaacaccgtggtgaacgtcacggtcaactgcacctgcggggacccgaagatctcgtcggactacgggttcttcctcacctacccgctcatgggccagaccctcgccgccgtcgccgccaactacagcttcaactcgtcgtcgcagttggacctgctccgcaagtataaccccggcatggacaccgctacatccgggctcgttttcatccccgtcaaagatggcaatggaagttaccatcctttaaaaccaccaggaaacggaggttctataggagctatagtaggaggagttgttggtggtgttgctattctggtcctgggcgtcttgttatatatcatgttctataggcgaaaaaaggcaaacaaggctgccttacttccatcttctgaagattctacccaacttgctactacatccatggataaatctgccttgtcaaccagtcaagctgatagtagctctggagttccaggaattactgttgataaatcagtagagttctcgtatgaagaactttttaatgccacagagggatttagcatgagtaacaaaatcgggcaaggtggttttggtgctgtctattatgctgagctcaggggcgagaaagctgccataaagaaaatggatatgcaggcttctcacgagttccttgctgagttaaaagttttgacacatgttcatcatttgaatctggtgcgcttgattggtttttgcaccgaaagttccttgtttcttgtctatgagttcatcgagaatgggaacttaagccagcatttgcgtggaactggttatgagcctctgtcttgggctgccagggttcagattgcactagattcagcaagaggtcttgagtacattcatgaacatactgtcccagtgtacatacatcgggacatcaaatcagcaaatatcttgatagacaagaactaccgtgcaaaggtcgcagattttggtttaacaaaacttacagaagttggtaatacatcactacccacacgtggaatcgtgggcacatttggttacatgcctcctgaatatgctcggtacggtgatgtttctccaaaggtcgatgtttatgcctttggcgttgtcctctacgaacttatttcggccaaagacgccattgtcagatcaaccgagtcttccagtgattcaaagggattggtttatctggtaatcaactcttttactttctgttcatggggaaaagaccagtggtctagttaagcacacgggtgctagttctggtattggtttggcttccattgtcatttctcttagatgctggagtttgtggccaatttatttgtgaaaaggggaaaaaaactttcaggtcttgtgcttcactaccatgagggtatttgttacttcccagtgtaaaatttgcataagtagtttaggtggtgtttgaatgcgctaaagctaatagttagccgctaaaattagctgaagactttcaaacagtctagctaatagttcagctattagctacttttagcaaattagctaatagttgctagctaattccactagtaatttttttgtcaactaactattaggtctagtgccttcaaacacccccttagtacatcctgttttgaataattgttttcacctgatcatcttttattctttctctcgtttgttgtcatatgtgttcgtgaatgattaggctgtagacaatggagcaaactcttttcttcttcttcttgccagcaatatttgtaacatttgaggaggctctcaacacaccggatcccaaggaaggccttcaaagactgattgatccggcgctcggcgaggattaccccatcgactcgatcctcaagatgacggtcctggcaagggcgtgcacgcaggaagaccccaaggcaaggcccacgatgagatccatagtggtggcgctgatgacgctgtcgtcaaccagcgagttctgggacatgaacgcgatccaggagaaccaaggtgtcgtgaacctcatgtccgggagatgactcctgtccctgtgggctgtggtatatattattgtacgtcctacctgccttcccctgggcaattgtacattagggctcatttgtacggcccgttgacggccagagaggagggccactgtaggtatttacaatgtaatatcttgtcactcaagggttttctcccgtgtttaggctccctttggaacaaaaaggaaatttcctgaacctgtgttttttgctgtattttttaactaatttctatgaaattcttatagcattcatgtgaaattcctgcattctaaaggatcggaaggtcgttgagagccgcgtgtgagttactggggttatgtacaactctgaagatacttataaaagttattaatatttacttatttattatagtgtatctgcg

SEQ ID NO: 3493 - DNA, 2852 bp, Zea Mays
cgccccggcgcctccccggaacgacctcccacgtggtgggccctcccccgcgttccacctgttttctccgttgacagcgcatcgagccttgcactgcccccactttccagtgtcacttgcgtaactcacctcgctgggtggggcccaccgggagccccgtgcgccgcgcgcgcgcgaggggtcaaactaccgccgcgttgtcgcgctcatcgtcgccgcgtgctgtggtctgctgctcctgctgctacccctcaatctccccgcaccgcacctcacctcccccagctcctcctcttcctctaattgctacacgctttcgaggctagggttgcctcgtcctcctcgctgtccacatggcgcgaatcctcatgcggctcctcctcctcgccgcggcggcggcggtggcggcgggggacggctgcctcaactccggctgcgtcgcgctgggctcctacctcgtcgcccggaaccagaacctcacctacatcgccagcctcttcggcatcggcgactaccacgcgctggcgcgctacaaccccggcaccacaaacctggactacatccaggccggccagagcgtcaacatctccttcacctgcggctgccacacgttccccaactcggacgccacctacctcggcggctccttcccgcacaaggttgtcaccggcgacacctacggcggcatcgcccagaactacaacaacctcacctccgccgcctggcttgccgtcaccaacccgtatcccacgaacaacatccccgacaccaacaccgtggtgaacgtcacggtcaactgcacctgcggggacccgaagatctcgtcggactacgggttcttcctcacctacccgctcatgggccagaccctcgccgccgtcgccgccaactacagcttcaactcgtcgtcgcagttggacctgctccgcaagtataaccccggcatggacaccgctacatccgggctcgttttcatccccgtcaaagatggcaatggaagttaccatcctttaaaaccaccagggcagattctgtccttttgcaagctaattatgcttccacattaagttttttgcaagaaaaactggacaccagctattcttgtgagataaaaagggtggcttgtttacactttgtcaatctcatcatcgattcgggccaggaaacggaggttctataggagctatagtaggaggagttgttggtggtgttgctattctggtcctgggcgtcttgttatatatcatgttctataggcgaaaaaaggcaaacaaggctgccttacttccatcttctgaagattctacccaacttggttttacaaaatgggggggagtggcccactttgcccccctatggatccgcctctggctaagcaggagcttctgtattggtctatggccggcgctaaagctctctcctatcttcagctactacatccatggataaatctgccttgtcaaccagtcaagctgatagtagctctggagttccaggaattactgttgataaatcagtagagttctcgtatgaagaactttttaatgccacagagggatttagcatgagtaacaaaatcgggcaaggtggttttggtgctgtctattatgctgagctcaggggcgagaaagctgccataaagaaaatggatatgcaggcttctcacgagttccttgctgagttaaaagttttgacacatgttcatcatttgaatctggtgcgcttgattggtttttgcaccgaaagttccttgtttcttgtctatgagttcatcgagaatgggaacttaagccagcatttgcgtggaactggttatgagcctctgtcttgggctgccagggttcagattgcactagattcagcaagaggtcttgagtacattcatgaacatactgtcccagtgtacatacatcgggacatcaaatcagcaaatatcttgatagacaagaactaccgtgcaaaggtcgcagattttggtttaacaaaacttacagaagttggtaatacatcactacccacacgtggaatcgtgggcacatttggttacatgcctcctgaatatgctcggtacggtgatgtttctccaaaggtcgatgtttatgcctttggcgttgtcctctacgaacttatttcggccaaagacgccattgtcagatcaaccgagtcttccagtgattcaaagggattggtttatctgtttgaggaggctctcaacacaccggatcccaaggaaggccttcaaagactgattgatccggcgctcggcgaggattaccccatcgactcgatcctcaagatgacggtcctggcaagggcgtgcacgcaggaagaccccaaggcaaggcccacgatgagatccatagtggtggcgctgatgacgctgtcgtcaaccagcgagttctgggacatgaacgcgatccaggagaaccaaggtgtcgtgaacctcatgtccgggagatgactcctgtccctgtgggctgtggtatatattattgtacgtcctacctgccttcccctgggcaattgtacattagggctcatttgtacggcccgttgacggccagagaggagggccactgtaggtatttacaatgtaatatcttgtcactcaagggttttctcccgtgtttaggctccctttggaacaaaaaggaaatttcctgaacctgtgttttttgctgtattttttaactaatttctatgaaattcttatagcattcatgtgaaattcctgcattctaaaggatcggaaggtcgttgagagccgcgtgtgagttactggggttatgtacaactctgaagatacttataaaagttattaatatttacttatttattatagtgtatctgcg

SEQ ID NO: 3494 - DNA, 2742 bp, Zea Mays
cgccccggcgcctccccggaacgacctcccacgtggtgggccctcccccgcgttccacctgttttctccgttgacagcgcatcgagccttgcactgcccccactttccagtgtcacttgcgtaactcacctcgctgggtggggcccaccgggagccccgtgcgccgcgcgcgcgcgaggggtcaaactaccgccgcgttgtcgcgctcatcgtcgccgcgtgctgtggtctgctgctcctgctgctacccctcaatctccccgcaccgcacctcacctcccccagctcctcctcttcctctaattgctacacgctttcgaggctagggttgcctcgtcctcctcgctgtccacatggcgcgaatcctcatgcggctcctcctcctcgccgcggcggcggcggtggcggcgggggacggctgcctcaactccggctgcgtcgcgctgggctcctacctcgtcgcccggaaccagaacctcacctacatcgccagcctcttcggcatcggcgactaccacgcgctggcgcgctacaaccccggcaccacaaacctggactacatccaggccggccagagcgtcaacatctccttcacctgcggctgccacacgttccccaactcggacgccacctacctcggcggctccttcccgcacaaggttgtcaccggcgacacctacggcggcatcgcccagaactacaacaacctcacctccgccgcctggcttgccgtcaccaacccgtatcccacgaacaacatccccgacaccaacaccgtggtgaacgtcacggtcaactgcacctgcggggacccgaagatctcgtcggactacgggttcttcctcacctacccgctcatgggccagaccctcgccgccgtcgccgccaactacagcttcaactcgtcgtcgcagttggacctgctccgcaagtataaccccggcatggacaccgctacatccgggctcgttttcatccccgtcaaagatggcaatggaagttaccatcctttaaaaccaccagggcagattctgtccttttgcaagctaattatgcttccacattaagttttttgcaagaaaaactggacaccagctattcttgtgagataaaaagggtggcttgtttacactttgtcaatctcatcatcgattcgggccaggaaacggaggttctataggagctatagtaggaggagttgttggtggtgttgctattctggtcctgggcgtcttgttatatatcatgttctataggcgaaaaaaggcaaacaaggctgccttacttccatcttctgaagattctacccaacttgctactacatccatggataaatctgccttgtcaaccagtcaagctgatagtagctctggagttccaggaattactgttgataaatcagtagagttctcgtatgaagaactttttaatgccacagagggatttagcatgagtaacaaaatcgggcaaggtggttttggtgctgtctattatgctgagctcaggggcgagaaagctgccataaagaaaatggatatgcaggcttctcacgagttccttgctgagttaaaagttttgacacatgttcatcatttgaatctggtgcgcttgattggtttttgcaccgaaagttccttgtttcttgtctatgagttcatcgagaatgggaacttaagccagcatttgcgtggaactggttatgagcctctgtcttgggctgccagggttcagattgcactagattcagcaagaggtcttgagtacattcatgaacatactgtcccagtgtacatacatcgggacatcaaatcagcaaatatcttgatagacaagaactaccgtgcaaaggtcgcagattttggtttaacaaaacttacagaagttggtaatacatcactacccacacgtggaatcgtgggcacatttggttacatgcctcctgaatatgctcggtacggtgatgtttctccaaaggtcgatgtttatgcctttggcgttgtcctctacgaacttatttcggccaaagacgccattgtcagatcaaccgagtcttccagtgattcaaagggattggtttatctgtgcagtttgaggaggctctcaacacaccggatcccaaggaaggccttcaaagactgattgatccggcgctcggcgaggattaccccatcgactcgatcctcaagatgacggtcctggcaagggcgtgcacgcaggaagaccccaaggcaaggcccacgatgagatccatagtggtggcgctgatgacgctgtcgtcaaccagcgagttctgggacatgaacgcgatccaggagaaccaaggtgtcgtgaacctcatgtccgggagatgactcctgtccctgtgggctgtggtatatattattgtacgtcctacctgccttcccctgggcaattgtacattagggctcatttgtacggcccgttgacggccagagaggagggccactgtaggtatttacaatgtaatatcttgtcactcaagggttttctcccgtgtttaggctccctttggaacaaaaaggaaatttcctgaacctgtgttttttgctgtattttttaactaatttctatgaaattcttatagcattcatgtgaaattcctgcattctaaaggatcggaaggtcgttgagagccgcgtgtgagttactggggttatgtacaactctgaagatacttataaaagttattaatatttacttatttattatagtgtatctgcg

SEQ ID NO: 3495 - DNA, 2741 bp, Zea Mays
cgccccggcgcctccccggaacgacctcccacgtggtgggccctcccccgcgttccacctgttttctccgttgacagcgcatcgagccttgcactgcccccactttccagtgtcacttgcgtaactcacctcgctgggtggggcccaccgggagccccgtgcgccgcgcgcgcgcgaggggtcaaactaccgccgcgttgtcgcgctcatcgtcgccgcgtgctgtggtctgctgctcctgctgctacccctcaatctccccgcaccgcacctcacctcccccagctcctcctcttcctctaattgctacacgctttcgaggctagggttgcctcgtcctcctcgctgtccacatggcgcgaatcctcatgcggctcctcctcctcgccgcggcggcggcggtggcggcgggggacggctgcctcaactccggctgcgtcgcgctgggctcctacctcgtcgcccggaaccagaacctcacctacatcgccagcctcttcggcatcggcgactaccacgcgctggcgcgctacaaccccggcaccacaaacctggactacatccaggccggccagagcgtcaacatctccttcacctgcggctgccacacgttccccaactcggacgccacctacctcggcggctccttcccgcacaaggttgtcaccggcgacacctacggcggcatcgcccagaactacaacaacctcacctccgccgcctggcttgccgtcaccaacccgtatcccacgaacaacatccccgacaccaacaccgtggtgaacgtcacggtcaactgcacctgcggggacccgaagatctcgtcggactacgggttcttcctcacctacccgctcatgggccagaccctcgccgccgtcgccgccaactacagcttcaactcgtcgtcgcagttggacctgctccgcaagtataaccccggcatggacaccgctacatccgggctcgttttcatccccgtcaaagatggcaatggaagttaccatcctttaaaaccaccaggacaggcagattctgtccttttgcaagctaattatgcttccacattaagttttttgcaagaaaaactggacaccagctattcttgtgagataaaaagggtggcttgtttacactttgtcaatctcatcatcgattcgggccaggaaacggaggttctataggagctatagtaggaggagttgttggtggtgttgctattctggtcctgggcgtcttgttatatatcatgttctataggcgaaaaaaggcaaacaaggctgccttacttccatcttctgaagattctacccaacttgctactacatccatggataaatctgccttgtcaaccagtcaagctgatagtagctctggagttccaggaattactgttgataaatcagtagagttctcgtatgaagaactttttaatgccacagagggatttagcatgagtaacaaaatcgggcaaggtggttttggtgctgtctattatgctgagctcaggggcgagaaagctgccataaagaaaatggatatgcaggcttctcacgagttccttgctgagttaaaagttttgacacatgttcatcatttgaatctggtgcgcttgattggtttttgcaccgaaagttccttgtttcttgtctatgagttcatcgagaatgggaacttaagccagcatttgcgtggaactggttatgagcctctgtcttgggctgccagggttcagattgcactagattcagcaagaggtcttgagtacattcatgaacatactgtcccagtgtacatacatcgggacatcaaatcagcaaatatcttgatagacaagaactaccgtgcaaaggtcgcagattttggtttaacaaaacttacagaagttggtaatacatcactacccacacgtggaatcgtgggcacatttggttacatgcctcctgaatatgctcggtacggtgatgtttctccaaaggtcgatgtttatgcctttggcgttgtcctctacgaacttatttcggccaaagacgccattgtcagatcaaccgagtcttccagtgattcaaagggattggtttatctgtttgaggaggctctcaacacaccggatcccaaggaaggccttcaaagactgattgatccggcgctcggcgaggattaccccatcgactcgatcctcaagatgacggtcctggcaagggcgtgcacgcaggaagaccccaaggcaaggcccacgatgagatccatagtggtggcgctgatgacgctgtcgtcaaccagcgagttctgggacatgaacgcgatccaggagaaccaaggtgtcgtgaacctcatgtccgggagatgactcctgtccctgtgggctgtggtatatattattgtacgtcctacctgccttcccctgggcaattgtacattagggctcatttgtacggcccgttgacggccagagaggagggccactgtaggtatttacaatgtaatatcttgtcactcaagggttttctcccgtgtttaggctccctttggaacaaaaaggaaatttcctgaacctgtgttttttgctgtattttttaactaatttctatgaaattcttatagcattcatgtgaaattcctgcattctaaaggatcggaaggtcgttgagagccgcgtgtgagttactggggttatgtacaactctgaagatacttataaaagttattaatatttacttatttattatagtgtatctgcg

SEQ ID NO: 3496 - DNA, 2742 bp, Zea Mays
cgccccggcgcctccccggaacgacctcccacgtggtgggccctcccccgcgttccacctgttttctccgttgacagcgcatcgagccttgcactgcccccactttccagtgtcacttgcgtaactcacctcgctgggtggggcccaccgggagccccgtgcgccgcgcgcgcgcgaggggtcaaactaccgccgcgttgtcgcgctcatcgtcgccgcgtgctgtggtctgctgctcctgctgctacccctcaatctccccgcaccgcacctcacctcccccagctcctcctcttcctctaattgctacacgctttcgaggctagggttgcctcgtcctcctcgctgtccacatggcgcgaatcctcatgcggctcctcctcctcgccgcggcggcggcggtggcggcgggggacggctgcctcaactccggctgcgtcgcgctgggctcctacctcgtcgcccggaaccagaacctcacctacatcgccagcctcttcggcatcggcgactaccacgcgctggcgcgctacaaccccggcaccacaaacctggactacatccaggccggccagagcgtcaacatctccttcacctgcggctgccacacgttccccaactcggacgccacctacctcggcggctccttcccgcacaaggttgtcaccggcgacacctacggcggcatcgcccagaactacaacaacctcacctccgccgcctggcttgccgtcaccaacccgtatcccacgaacaacatccccgacaccaacaccgtggtgaacgtcacggtcaactgcacctgcggggacccgaagatctcgtcggactacgggttcttcctcacctacccgctcatgggccagaccctcgccgccgtcgccgccaactacagcttcaactcgtcgtcgcagttggacctgctccgcaagtataaccccggcatggacaccgctacatccgggctcgttttcatccccgtcaaagatggcaatggaagttaccatcctttaaaaccaccaggtacaggcagattctgtccttttgcaagctaattatgcttccacattaagttttttgcaagaaaaactggacaccagctattcttgtgagataaaaagggtggcttgtttacactttgtcaatctcatcatcgattcgggccaggaaacggaggttctataggagctatagtaggaggagttgttggtggtgttgctattctggtcctgggcgtcttgttatatatcatgttctataggcgaaaaaaggcaaacaaggctgccttacttccatcttctgaagattctacccaacttgctactacatccatggataaatctgccttgtcaaccagtcaagctgatagtagctctggagttccaggaattactgttgataaatcagtagagttctcgtatgaagaactttttaatgccacagagggatttagcatgagtaacaaaatcgggcaaggtggttttggtgctgtctattatgctgagctcaggggcgagaaagctgccataaagaaaatggatatgcaggcttctcacgagttccttgctgagttaaaagttttgacacatgttcatcatttgaatctggtgcgcttgattggtttttgcaccgaaagttccttgtttcttgtctatgagttcatcgagaatgggaacttaagccagcatttgcgtggaactggttatgagcctctgtcttgggctgccagggttcagattgcactagattcagcaagaggtcttgagtacattcatgaacatactgtcccagtgtacatacatcgggacatcaaatcagcaaatatcttgatagacaagaactaccgtgcaaaggtcgcagattttggtttaacaaaacttacagaagttggtaatacatcactacccacacgtggaatcgtgggcacatttggttacatgcctcctgaatatgctcggtacggtgatgtttctccaaaggtcgatgtttatgcctttggcgttgtcctctacgaacttatttcggccaaagacgccattgtcagatcaaccgagtcttccagtgattcaaagggattggtttatctgtttgaggaggctctcaacacaccggatcccaaggaaggccttcaaagactgattgatccggcgctcggcgaggattaccccatcgactcgatcctcaagatgacggtcctggcaagggcgtgcacgcaggaagaccccaaggcaaggcccacgatgagatccatagtggtggcgctgatgacgctgtcgtcaaccagcgagttctgggacatgaacgcgatccaggagaaccaaggtgtcgtgaacctcatgtccgggagatgactcctgtccctgtgggctgtggtatatattattgtacgtcctacctgccttcccctgggcaattgtacattagggctcatttgtacggcccgttgacggccagagaggagggccactgtaggtatttacaatgtaatatcttgtcactcaagggttttctcccgtgtttaggctccctttggaacaaaaaggaaatttcctgaacctgtgttttttgctgtattttttaactaatttctatgaaattcttatagcattcatgtgaaattcctgcattctaaaggatcggaaggtcgttgagagccgcgtgtgagttactggggttatgtacaactctgaagatacttataaaagttattaatatttacttatttattatagtgtatctgcg

SEQ ID NO: 3497 - DNA, 2603 bp, Zea Mays
cgccccggcgcctccccggaacgacctcccacgtggtgggccctcccccgcgttccacctgttttctccgttgacagcgcatcgagccttgcactgcccccactttccagtgtcacttgcgtaactcacctcgctgggtggggcccaccgggagccccgtgcgccgcgcgcgcgcgaggggtcaaactaccgccgcgttgtcgcgctcatcgtcgccgcgtgctgtggtctgctgctcctgctgctacccctcaatctccccgcaccgcacctcacctcccccagctcctcctcttcctctaattgctacacgctttcgaggctagggttgcctcgtcctcctcgctgtccacatggcgcgaatcctcatgcggctcctcctcctcgccgcggcggcggcggtggcggcgggggacggctgcctcaactccggctgcgtcgcgctgggctcctacctcgtcgcccggaaccagaacctcacctacatcgccagcctcttcggcatcggcgactaccacgcgctggcgcgctacaaccccggcaccacaaacctggactacatccaggccggccagagcgtcaacatctccttcacctgcggctgccacacgttccccaactcggacgccacctacctcggcggctccttcccgcacaaggttgtcaccggcgacacctacggcggcatcgcccagaactacaacaacctcacctccgccgcctggcttgccgtcaccaacccgtatcccacgaacaacatccccgacaccaacaccgtggtgaacgtcacggtcaactgcacctgcggggacccgaagatctcgtcggactacgggttcttcctcacctacccgctcatgggccagaccctcgccgccgtcgccgccaactacagcttcaactcgtcgtcgcagttggacctgctccgcaagtataaccccggcatggacaccgctacatccgggctcgttttcatccccgtcaaagatggcaatggaagttaccatcctttaaaaccaccaggaaacggaggttctataggagctatagtaggaggagttgttggtggtgttgctattctggtcctgggcgtcttgttatatatcatgttctataggcgaaaaaaggcaaacaaggctgccttacttccatcttctgaagattctacccaacttgctactacatccatggataaatctgccttgtcaaccagtcaagctgatagtagctctggagttccaggaattactgttgataaatcagtagagttctcgtatgaagaactttttaatgccacagagggatttagcatgagtaacaaaatcgggcaaggtggttttggtgctgtctattatgctgagctcaggggcgagaaagctgccataaagaaaatggatatgcaggcttctcacgagttccttgctgagttaaaagttttgacacatgttcatcatttgaatctggtgcgcttgattggtttttgcaccgaaagttccttgtttcttgtctatgagttcatcgagaatgggaacttaagccagcatttgcgtggaactggttatgagcctctgtcttgggctgccagggttcagattgcactagattcagcaagaggtcttgagtacattcatgaacatactgtcccagtgtacatacatcgggacatcaaatcagcaaatatcttgatagacaagaactaccgtgcaaaggtcgcagattttggtttaacaaaacttacagaagttggtaatacatcactacccacacgtggaatcgtgggcacatttggttacatgcctcctgaatatgctcggtacggtgatgtttctccaaaggtcgatgtttatgcctttggcgttgtcctctacgaacttatttcggccaaagacgccattgtcagatcaaccgagtcttccagtgattcaaagggattggtttatctgtgcagtttgaggaggctctcaacacaccggatcccaaggaaggccttcaaagactgattgatccggcgctcggcgaggattaccccatcgactcgatcctcaagatgacggtcctggcaagggcgtgcacgcaggaagaccccaaggcaaggcccacgatgagatccatagtggtggcgctgatgacgctgtcgtcaaccagcgagttctgggacatgaacgcgatccaggagaaccaaggtgtcgtgaacctcatgtccgggagatgactcctgtccctgtgggctgtggtatatattattgtacgtcctacctgccttcccctgggcaattgtacattagggctcatttgtacggcccgttgacggccagagaggagggccactgtaggtatttacaatgtaatatcttgtcactcaagggttttctcccgtgtttaggctccctttggaacaaaaaggaaatttcctgaacctgtgttttttgctgtattttttaactaatttctatgaaattcttatagcattcatgtgaaattcctgcattctaaaggatcggaaggtcgttgagagccgcgtgtgagttactggggttatgtacaactctgaagatacttataaaagttattaatatttacttatttattatagtgtatctgcg

SEQ ID NO: 3498 - DNA, 1773 bp, Zea Mays
agtagacgccagcactgtcgtcagcaagccccatccgcccacccgcttttatttatatctacgagaacaacaaacacatagcggcgaccggcgacgagcggaagccttcctccatcttcaggctgctagtactcagtagtcagtacagtacagtggtgccgacgacatgacgaagatctcccgctcgttgctcgtcgtcatcgcgctggtcctcctcggccctcacctcccgccatccgaggcgctgacgcccaagcagggcgtcaggtccaagaccttcctgtccccgcccatcctgcttcgcccgggcgacgtggccgacaagttctactacgacatccccttcccccggggccacctggcgctcaagagcttcaacggcgaggtggtggacgagcgcggcgcccccgtgccgctccacgagacgtacctccaccactgggtcgtgcagccctactacgccctggtagtatcggcggagggcggcagcagccggccgcggaccatcccggcgcgcaacgccggcgtgtgcagcggccacacgctgggccagtactacgggctggggtccgagacccggcgcacggccacgtgggtgcccgacccgtacggcatcgagatcggcgacccggccgcggcgcccgccgagggctacgagcagcgctggctgctcaacgtgcacgccatcgacacgcgcggcgccgccgaccggacgatggcgtgcaccgagtgccgctgcgacgtgtacaacgtgacggcggactggcgcgggcacgccatcgagcccgggtacgccggcggcctgcgctgctgctacgacggcacgcggtgcggcgccgcggcggagggggctgaggggaaggccaggactgtgttcctgcgctacacggtgatgtggcgcgactggagccccgcggcggtgctgcccgtgcggatctacatcttcgacgtggccggctgcggcgtggagtacgacgtggaggagcagtgcagcggcggcgcgggcggggagtgcgtgcacgtgaagacggccacgcaggcgctgccgcggggcggcgacgtggtgttcggcgtggcgcaccagcacgcgggcggcgccggcgcgtcgctgcacggcgccgacggccgcctgctgtgcgagtccgcggccacgtacgggggcgggcgggaggccggggacgaggcgggctacatcgtcggcatgtccacgtgctacccgcgcccgggcgccgtcacggtgcgcgacggcgagccgctcaccgtcgtgtccaggtacagcagcgaccggcgccacacgggcgtcatgggcctcttctacatcctcgtggccgaccacgcccggcagctgccgccgcaggagggcctgtgcttcagcttcccggtcccatgtgcctaccgtcatggctgtcgagcaacctgtgagatcttttggtgttgaaagctggtgctatgttctaattagctgcttggttagggttcggttcggggctggtgatggtagggcaaagcaaggaaggccgcgtgggtccttgcgttactcatacagtagtagtaatgtaaaaatatagaagcagcggtcagtctactctgctgttgctgtattatacaataaccacgtcgctccctccgtttgacttctccacgtgctgccgttgttgctcaggagtcaggagtctggacatgttcggttacatcggaactattctgaaactattctaaatgatcaattattatataaactaaattatcattctgaatcgctgtcggtcaaac

SEQ ID NO: 3499 - DNA, 1039 bp, Zea Mays
gtaaaccaaagtccaataatcatcgtccatttttctcgctctctcgatcactactatcatttgccgtcttccaccctccttccattccgttcggatacaccgtctcgtttctctctcctcccctcgcccgtcttccctcctgtgcgagctcagctcacggtcctcccacccccacgagcgcctccgcggcgaggaagagataatcagcaggcggagcggggggcgcgccgatggatctggagaggccgccgccggcgtcggcggcggaggcggccggggccgcggcgtgctccatctgcctggatccggtgctcgcctgcgtcgcgggccggtccgtcgccaagctgcaatgcggacacgagttccacctagattgtattgggtctgcattcaatgcaaaaggagcgatgcaatgccctaactgtcggaagattgagaaaggtcgctggctttatgcaagtggacgtcacccccctgctgatattgatatgggtggatgggtgactagcgacaactatgatatcacctccgagcttccttttggatttcaatggtgtccctttagtggattcacccagctagcatcaatgttaggggtgcgtgaagctgagccaacttaccacacaactggagatcactcaagtgctgcaagcagttcacttgtttgcccatatcttgccctgcgtggttttctccatcctgttaatgtgccttctacttctaattctggtgctgaaagcacttcatttcatcggcactcaactggcttggaaggacatgtcactcctgatttgaacaatgctccagttttccatgctaccgagtcaagaaatcatgacagtgagcacagacatttgagtaatcttcctgtatcaggaactcctgaatattctatgactccatttgggataggagtaccaagatatgacagtggcagccaacagggattccgatcatatgcacatcatcatcccctaatccataggctgttgttgaaaaagctgcatattatgctcttgtatggatcaataggttgttg

SEQ ID NO: 3500 - DNA, 2449 bp, Zea Mays
ccaaagtccaataatcatcgtccatttttctcgctctctcgatcactactatcatttgccgtcttccaccctccttccattccgttcggatacaccgtctcgtttctctctcctcccctcgcccgtcttccctcctgtgcgagctcagctcacggtcctcccacccccacgagcgcctccgcggcgaggaagagataatcagcaggcggccggggccgcggcgtgctccatctgcctggatccggtgctcgcctgcgtcgcgggccggtccgtcgccaagctgcaatgcggacacgagttccacctagattgtattgggtctgcattcaatgcaaaaggagcgatgcaatgccctaactgtcggaagattgagaaaggtcgctggctttatgcaagtggacgtcacccccctgctgatattgatatgggtggatgggtgactagcgacaactatgatatcacctccgagcttccttttggatttcaatggtgtccctttagtggattcacccagctagcatcaatgttaggggtgcgtgaagctgagccaacttaccacacaactggagatcactcaagtgctgcaagcagttcacttgtttgcccatatcttgccctgcgtggttttctccatcctgttaatgtgccttctacttctaattctggtgctgaaagcacttcatttcatcggcactcaactggcttggaaggacatgtcactcctgatttgaacaatgctccagttttccatgctaccgagtcaagaaatcatgacagtgagcacagacatttgagtaatcttcctgtatcaggaactcctgaatattctatgactccatttgggataggagtaccaagatatgacagtggcagccaacagggattccgatcatatgcacatcatcatcccctaatccataggctgacccctcgcagcggaagcaatctggtggcaccattagggtcagttccagccgtcgtggcagagactagaggccatggccatggtgcaccgggccatatgtaccagcactcatctgtgcagggcagcccgttccctcctaccaccagaagggttaggcccagagccttgacgattacgtctttcatcgcagcgacttcctcagctgagattgcagggccccttggccacgggtttcccgctcctggagccgtgaacaggagcgtttctgatgccgagggcatcgaccgagcgtacacatggggccgggagggatatgatctgttcccttggacccctgctgaatggggcaccttcaatcccatgcagaaccatgcgcatggaagctttaccagaaggcctgctggggagcggatgccgcagagtcgccccgagaacggataccagccgcctgtgcccacttcacagaggatgccaccgttcttgtgatcagacgaggctgcctctccaattgctgtgtataaaattatttgattcggggtttggcagagaacaacgagcgaatatcgaccgcacggcagcatcgaaactggtcggctatgagacctgtgtgtgtgtgatgtttatgatgatgccgctcgtatttttagcgctttcggtccagcggcgctcaggtttcgtcgagcgctgtcgtttgtcctgactgatatggtgttgcgttgagaaggactgtttgagctaaactgcatctctggtcccgggattcgaaagcaccgcgtgcagctatggatttgttcgtcacatcacgttcgtgtatggctggccctggccgtttcatgaccgctcgattcctctgccagcgcagcagcgccgctattgtttttttttaaaaaacgtgctgcctcgcccactgccagtttcgcaccatgtttgttgtgacttttatccggctgatgttgccctctataatattctacaatattttgtctctatatattagagctgcagtagttcgaacagcagctgcgggtgtaagcaaccaaataggatgtcgaagattaacacccagatgttcgtcacgtgctaaatagcggtcgtgaacctaagctggagtttattgaagtataataaactctatgtcgtatttatctttatctatctagatgatatcagagatcttgtgtgacttgaattatgttgtcacactaaataatgtgtccgggttttgtccgactttatcgtaaaataaattagaaactcaacctcttttcacgacttttctcccaaaccgagttaattgtcgaccacttcggatctctgtttcgaagattgaaaggattgttgcactttggaacacgtactttactggaccaactcatgtacatgattaataattagtgttcggataacgagcagttgaaaatattgataatacatacttaatcaaacgtagataaaaataaattaacaaagcccgtttgaattttgggcccagcctattaagcccactcaaaatcctaaccctag

SEQ ID NO: 3501 - DNA, 940 bp, Zea Mays
ttccaccctccttccattccgttcggatacaccgtctcgtttctctctcctcccctcgcccgtcttccctcctgtgcgagctcagctcacggtcctcccacccccacgagcgcctccgcggcgaggaagagataatcagcaggcggagcggggggcgcgccgatggatctggagaggccgccgccggcgtcggcggcggaggcggccggggccgcggcgtgctccatctgcctggatccggtgctcgcctgcgtcgcgggccggtccgtcgccaagctgcaatgcggacacgagttccacctagattgtattgggtctgcattcaatgcaaaaggagcgatgcaatgccctaactgtcggaagattgagaaaggtcgctggctttatgcaagtggacgtcacccccctgctgatattgatatgggtggatgggtgactagcgacaactatgatatcacctccgagcttccttttggatttcaatggtgtccctttagtggattcacccagctagcatcaatgttaggggtgcgtgaagctgagccaacttaccacacaactggagatcactcaagtgctgcaagcagttcacttgtttgcccatatcttgccctgcgtggttttctccatcctgttaatgtgccttctacttctaattctggtgctgaaagcacttcatttcatcggcactcaactggcttggaaggacatgtcactcctgatttgaacaatgctccagttttccatgctaccgagtcaagaaatcatgacagtgagcacagacatttgagtaatcttcctgtatcaggaactcctgaatattctatgactccatttgggataggagtaccaagatatgacagtggcagccaacagggattccgatcatatgcacatcatcatcccctaatccatagaattggagcgcattagaagaaag

SEQ ID NO: 3502 - DNA, 970 bp, Zea Mays
ttccaccctccttccattccgttcggatacaccgtctcgtttctctctcctcccctcgcccgtcttccctcctgtgcgagctcagctcacggtcctcccacccccacgagcgcctccgcggcgaggaagagataatcagcaggcggagcggggggcgcgccgatggatctggagaggccgccgccggcgtcggcggcggaggcggccggggccgcggcgtgctccatctgcctggatccggtgctcgcctgcgtcgcgggccggtccgtcgccaagctgcaatgcggacacgagttccacctagattgtattgggtctgcattcaatgcaaaaggagcgatgcaatgccctaactgtcggaagattgagaaaggtcgctggctttatgcaagtggacgtcacccccctgctgatattgatatgggtggatgggtgactagcgacaactatgatatcacctccgagcttccttttggatttcaatggtgtccctttagtggattcacccagctagcatcaatgttaggggtgcgtgaagctgagccaacttaccacacaactggagatcactcaagtgctgcaagcagttcacttgtttgcccatatcttgccctgcgtggttttctccatcctgttaatgtgccttctacttctaattctggtgctgaaagcacttcatttcatcggcactcaactggcttggaaggacatgtcactcctgatttgaacaatgctccagttttccatgctaccgagtcaagaaatcatgacagtgagcacagacatttgagtaatcttcctgtatcaggaactcctgaatattctatgactccatttgggataggagtaccaagatatgacagtggcagccaacagggattccgatcatatgcacatcatcatcccctaatccatagttgttgaaaaagctgcatattatgctcttgtatggatcaataggctgttgtct

SEQ ID NO: 3503 - DNA, 1456 bp, Zea Mays
atggccgatggggaggacatcggccacgcgagacctcaacaccccatgaagcagtcacgcttcgacttcaccaagctgagggccctttcctccgcctgcgacactcacccaccagagcatcttatctctggatgtgagtgccatgaaagtgatacccaacagacaactaactctggaacacctttgcttttctctgcggtaaattgctggcttaaatgcatgctgcttgaaccctataatcagacagaccatcccgaatgcaagtcaaggcctgatagtggtctttctgcaattacagagctggaccctggttatataacagctaaaaggactattgtaactgccagtacacaaattatagaaggagcatacccaacagaagggtgtactaataaagctgtgcgaggtgatcaatgtgacaattgcagacacatgttgaatccaactgaactaattgatccaaagtgtaaggttcggaatgagaaagcaagaaggtacttgagcagcatgaggaagaaggaccctgttccattttcccagaagtttcccagtgcagatcctttggcacttaaactgttagaaaaactattagcgtttgatccaaaggatcgtctgacagcagaagaggcattgcgtgatccatacttcaaaggtcttgccggggttgaaagagaaccatcctatcagccaatcagaaaagtggaatttgactttgagcacaaaagaatgtcaaagtaagagataagagagttgatattctgggagatactggaatatcacctaagtagctaaattaatggcacagagaggacaacctttgtctacccaaggttttagcttttctgtgtttgcacattgctgttgatcaatttaagaagcagttttctcatcttgaagagagtggtggtaacgacccatcagttccaacagacaggaaacatgcatcccttctcaggaccactgtggttcaatcgaatccaattcctgccaaggaacaacctcttgctgtgtcatcaagggttagaccagtctctgatgattcgtgtaagaatccttgggagaaagcaagtggtcctagaaatgttaccaggacatctctgactccacaagggctgcaagcacaagcaggatcagtaagagttaatggcccagtgacggattcaaggtatcctgctcaccaacagatcccacaagcatacggttaccgccaaatgcctgcaaggttggacagtaccaacccatcgcaggccatgggaggttacacgctgcagtcacagaaggaaacattatttgaagagttgccattttgaagagttactcgaatccaatattttgctcttttgaattccttggtgtacactggcaaatattagcatatttgaagagttgccattttgatcatcatcttcatttgtactttttgggtcagatctaataaagcatcaacattaaattt

SEQ ID NO: 3504 - DNA, 1430 bp, Zea Mays
atggccgatggggaggacatcggccacgcgagacctcaacaccccatgaagcagtcacgcttcgacttcaccaagctgagggccctttcctccgcctgcgacactcacccaccagagcatcttatctctggatgtgagtgccatgaaagtgatacccaacagacaactaactctggaacacctttgcttttctctgcggtaaattgctggcttaaatgcatgctgcttgaaccctataatcagacagaccatcccgaatgcaagtcaaggcctgatagtggtctttctgcaattacagagctggaccctggttatataacagctaaaaggactattgtaactgccagtacacaaattatagaaggagcatacccaacagaagggtgtactaataaagctgtgcgaggtgatcaatgtgacaattgcagacacatgttgaatccaactgaactaattgatccaaagtgtaaggttcggaatgagaaagcaagaaggtacttgagcagcatgaggaagaaggaccctgttccattttcccagaagtttcccagtgcagatcctttggcacttaaactgttagaaaaactattagcgtttgatccaaaggatcgtctgacagcagaagaggcattgcgtgatccatacttcaaaggtcttgccggggttgaaagagaaccatcctatcagccaatcagaaaagtggaatttgactttgagcacaaaagaatgtcaaagtaagagataagagagttgatattctgggagatactggaatatcacctaagtagctaaattaatggcacagagaggacaacctttgtctacccaagtgctgttgatcaatttaagaagcagttttctcatcttgaagagagtggtggtaacgacccatcagttccaacagacaggaaacatgcatcccttctcaggaccactgtggttcaatcgaatccaattcctgccaaggaacaacctcttgctgtgtcatcaagggttagaccagtctctgatgattcgtgtaagaatccttgggagaaagcaagtggtcctagaaatgttaccaggacatctctgactccacaagggctgcaagcacaagcaggatcagtaagagttaatggcccagtgacggattcaaggtatcctgctcaccaacagatcccacaagcatacggttaccgccaaatgcctgcaaggttggacagtaccaacccatcgcaggccatgggaggttacacgctgcagtcacagaaggaaacattatttgaagagttgccattttgaagagttactcgaatccaatattttgctcttttgaattccttggtgtacactggcaaatattagcatatttgaagagttgccattttgatcatcatcttcatttgtactttttgggtcagatctaataaagcatcaacattaaattt

SEQ ID NO: 3505 - DNA, 1089 bp, Zea Mays
cttacctattcctgttctccatagtacaaaagatgataatgattttgtggctggtttcatttgttggaatgctcttcaactttcttacgcttgtttacattgtacacaaattatagaaggagcatacccaacagaagggtgtactaataaagctgtgcgaggtgatcaatgtgacaattgcagacacatgttgaatccaactgaactaattgatccaaagtgtaaggttcggaatgagaaagcaagaaggtacttgagcagcatgaggaagaaggaccctgttccattttcccagaagtttcccagtgcagatcctttggcacttaaactgttagaaaaactattagcgtttgatccaaaggatcgtctgacagcagaagaggcattgcgtgatccatacttcaaaggtcttgccggggttgaaagagaaccatcctatcagccaatcagaaaagtggaatttgactttgagcacaaaagaatgtcaaatgctgttgatcaatttaagaagcagttttctcatcttgaagagagtggtggtaacgacccatcagttccaacagacaggaaacatgcatcccttctcaggaccactgtggttcaatcgaatccaattcctgccaaggaacaacctcttgctgtgtcatcaagggttagaccagtctctgatgattcgtgtaagaatccttgggagaaagcaagtggtcctagaaatgttaccaggacatctctgactccacaagggctgcaagcacaagcaggatcagtaagagttaatggcccagtgacggattcaaggtatcctgctcaccaacagatcccacaagcatacggttaccgccaaatgcctgcaaggttggacagtaccaacccatcgcaggccatgggaggttacacgctgcagtcacagaaggaaacattatttgaagagttgccattttgaagagttactcgaatccaatattttgctcttttgaattccttggtgtacactggcaaatattagcatatttgaagagttgccattttgatcatcatcttcatttgtactttttgggtcagatctaataaagcatcaacattaaattt

SEQ ID NO: 3506 - DNA, 998 bp, Zea Mays
aactttcttacgcttgtttacattgaaggagcatacccaacagaagggtgtactaataaagctgtgcgaggtgatcaatgtgacaattgcagacacatgttgaatccaactgaactaattgatccaaagtgtaaggttcggaatgagaaagcaagaaggtacttgagcagcatgaggaagaaggaccctgttccattttcccagaagtttcccagtgcagatcctttggcacttaaactgttagaaaaactattagcgtttgatccaaaggatcgtctgacagcagaagaggcattgcgtgatccatacttcaaaggtcttgccggggttgaaagagaaccatcctatcagccaatcagaaaagtggaatttgactttgagcacaaaagaatgtcaaatgctgttgatcaatttaagaagcagttttctcatcttgaagagagtggtggtaacgacccatcagttccaacagacaggaaacatgcatcccttctcaggaccactgtggttcaatcgaatccaattcctgccaaggaacaacctcttgctgtgtcatcaagggttagaccagtctctgatgattcgtgtaagaatccttgggagaaagcaagtggtcctagaaatgttaccaggacatctctgactccacaagggctgcaagcacaagcaggatcagtaagagttaatggcccagtgacggattcaaggtatcctgctcaccaacagatcccacaagcatacggttaccgccaaatgcctgcaaggttggacagtaccaacccatcgcaggccatgggaggttacacgctgcagtcacagaaggaaacattatttgaagagttgccattttgaagagttactcgaatccaatattttgctcttttgaattccttggtgtacactggcaaatattagcatatttgaagagttgccattttgatcatcatcttcatttgtactttttgggtcagatctaataaagcatcaacattaaattt

SEQ ID NO: 3507 - DNA, 1278 bp, Zea Mays
gcggcgacgatttcccccgggttttatttgaatttttcgggcaatgctacgtgaagcgtaactctatttcttgatcaacatcaacatgtcgcgggaggataatgtttacatggccaagctggctgagcaagcagaacggtacgaggaaatggttgagtacatggagaaggtggctaagaccgtagatgtggaagagctcaccgttgaggagcggaacctcttatctgttgcctacaagaacgtaattggggcccgccgtgcctcatggcgcattatctcctccatcgagcataaggaggagtcccgtaagaatgaggaacatgttattcagatcaaggagtaccgtggcaagattgaggctgaattgagcaacatttgtgatggtatcctgaagttgatcgactctcaccttgtgccttcctccactgctgcagagtcgaaggtgttttacctcaagatgaagggagattatcacaggtaccttgctgagtttaagactggtgctgagaggaaggaagctgcagagagtacaatgatagcttataaggcagctcaggatattgcgttggcggaactggcatctactcatcccataagacttggacttgcacttaacttctcagttttctattacgagattctgaactctccagacaaagcttgcaaccttgccaggcaggcgtttgatgaggctatttctcagttggatacgcttggcgaggattcatacaaagatagcaccttgatcatgcagctcctgagggacaacctaaccctatggaccgctgacagcacaacggaggacggcatcgaggagggcaatgaggcctcgaagggtgatgctggtgagggtcagtagtctggtaaaacctcgattgatggttcggcatgtttttgaagtctactgtgttggaaaccatgttctaatagaaggcgtctcccgctccatgcattccaagattctgtcctccccctccctccccccatgttgtaggctggtagtggtcaaattagttggccctgggtccatttggactgatgtattgtttactgctattgaagtcattcgttctcgttttgctcttgcagtggatcgctatagccttgtgttttcaatcttttagggcctgtttgggaatgcagtttcaaaatactgtaattttgagataccatagtttataattgtacatgacataaatactacggtattgctttaccacaataaaactatagtattgctcaaaaccgagatctgtttggttctattggaaaaacaaa

SEQ ID NO: 3508 - DNA, 1327 bp, Zea Mays
gtcgctggtgtagtaggggtttctcgttcggttccgatccgcgagatctgtgaacccgaccgtgtcggggcgcatagatccgcccgattaggctggcattgttgcgctaactctatttcttgatcaacatcaacatgtcgcgggaggataatgtttacatggccaagctggctgagcaagcagaacggtacgaggaaatggttgagtacatggagaaggtggctaagaccgtagatgtggaagagctcaccgttgaggagcggaacctcttatctgttgcctacaagaacgtaattggggcccgccgtgcctcatggcgcattatctcctccatcgagcataaggaggagtcccgtaagaatgaggaacatgttattcagatcaaggagtaccgtggcaagattgaggctgaattgagcaacatttgtgatggtatcctgaagttgatcgactctcaccttgtgccttcctccactgctgcagagtcgaaggtgttttacctcaagatgaagggagattatcacaggtaccttgctgagtttaagactggtgctgagaggaaggaagctgcagagagtacaatgatagcttataaggcagctcaggatattgcgttggcggaactggcatctactcatcccataagacttggacttgcacttaacttctcagttttctattacgagattctgaactctccagacaaagcttgcaaccttgccaggcaggcgtttgatgaggctatttctcagttggatacgcttggcgaggattcatacaaagatagcaccttgatcatgcagctcctgagggacaacctaaccctatggaccgctgacagcacaacggaggacggcatcgaggagggcaatgaggcctcgaagggtgatgctggtgagggtcagtagtctggtaaaacctcgattgatggttcggcatgtttttgaagtctactgtgttggaaaccatgttctaatagaaggcgtctcccgctccatgcattccaagattctgtcctccccctccctccccccatgttgtaggctggtagtggtcaaattagttggccctgggtccatttggactgatgtattgtttactgctattgaagtcattcgttctcgttttgctcttgcagtggatcgctatagccttgtgttttcaatcttttagggcctgtttgggaatgcagtttcaaaatactgtaattttgagataccatagtttataattgtacatgacataaatactacggtattgctttaccacaataaaactatagtattgctcaaaaccgagatctgtttggttctattggaaaaacaaa

SEQ ID NO: 3509 - DNA, 2122 bp, Zea Mays
caataatagggatgatcaccaaacgcattatttagaaaaccgccgggagctggaaagggcgaggcgagcggtgccggcggaggtcgacaggggggctacaggtagaaaggcgactccgccgctccagctgaaaatggcgaaatgatttgccttccccagaacccagctcagacagacgccgccctccgctgctctgctctgttcctcttcctccttgccccctgagcaggcgagttgccagcccggaaaccattcgaacaggccgagcccgcccgcctccattgctcgcgtgcgtcaggaaacggtttaaatgcaaacagtgatcctgcaaaaccgccttctattgaagtacctgcattgtcattagatgaattgagggaaaagacggatgattttgggtccaaggctttggttggtgaggggtcatatggaagagtatattatgctgttctggaaaacgaacaacatgtggctgtcaagaagcttgatacttcagcagatcctgagcctgataatgaatttctagcacaggtgtccgttgtttcaagattgaagcatgaaaactttgtggacatgcttggttattgtatccaaggagatcaacgtctactggcttacgaattcgctacgatgggctctctacatgatattttgcacggaagaaaaggtgttgcaggtgcacaacctggacctgctcttgattggatgcaaagagtcaaaattgctgttgatgctgcaaaaggtcttgaatatcttcatgagaaggttcaaccttccatagtccatcgagatatacggtccagcaatgttcttttatttgaggattacaaggccaaaattgcagacttcaatctttcaagccaatctccagatatggctgctcgtctacattctactcgtgtccttggaaccttcggatatcatgctccagagtatgctatgactggccaactgactcaaaaaagtgatgtatatagttttggggttgtccttttagagcttcttactggaaggaaacctgtagatcatacaatgccaaggggccagcagagtcttgttacttgggcaacaccaaggcttggtgaggacaaggtgaaacaatgtgttgatccaagattgaatggagagtaccctccaaagggagtagcaaagctagcggcagtggcggctctctgtgtccaatacgaatctgagttcagaccaagcatgagcattgtagtcaaggcgttgtctcctcttcttgtgaatgcaccgtatcagccggctgctgctcctgatgtatcttcagatgcctgacagcatgagcaactgaaaacccatgtaaagaaacaccatttactgtcggtatgccattttttccacgaattattcatctttcgtaaaatcagaattgtgtgtgtgtttattggagaggaagggaagaggaaagagcaacgcatttgttttgaacccatgtacttcgtgcttgagagctgctgcagttgaaattaattacttaatgtacacacttgtgcatccgttgcccttcccctgtttcagtttcttttttttttcttttgaaatggtcatccttgtaatctacccctgctttgctgttgggtggccgcagaaccaaactttttgaatcggagtaattgggtttgaattgtccagtccaatgcaacacggttacacaaagctcttagagagagagagaaaaaaaatccacttttaatcatccactgccccttctataagcataagcagttctggcaacatgttgccatggtgtgtctttgtcagcatggtctattctctaccatcctctgcaaatggcaacactgtcgtcggcgtggacgatcagcctcgtgatgtcctgcccgacggcttcagccgacgtgtagcggttcagacgctcggcgttccgcgggttcctggatggatcatgcatggttcatggatggtacccgtcgaggaaaagcaaccatgcagatcggtttgtatcaaatttcatgcaggatggaagaatcccactgcacgtcattgtttgtttagtttggaattggagcaatgcagcaggttgagaagttactgagagtgcacacaggaacgaaggaagaagcaggacgccggtaggagaaag

SEQ ID NO: 3510 - DNA, 1963 bp, Zea Mays
gaaaattaagccccgtaaaaccaatccaatcgggtggcagtttttaaggaaaccagggaccgcagcagcaagccgccccagccgacgaggcgaggagcgtgcaattccgtagctgcaacgaactccctcgaccgtatcgcccgctgctcctctatccctttcctgctgctgctactaccttaagctatcactatcatggccttgatgctgctagcgcgcaacctgcgctcccgcctccgcccaccgctcgccgccgccgcggcgttctcgtcggccgcggcggaggcggagagggcgatacgggacgggccgcggaacgactggagccggcccgagatccaggccgtctacgactcaccgctcctcgacctcctctttcacggggctcaggtccacagaaatgtccataaattcagagaagtgcagcaatgcacacttctttcaatcaagactggtggatgcagtgaagattgttcttactgtcctcagtcatcaagatacaacactggattgaaggcccaaaaattgatgaacaaatatgctgtcttggaagcagcaaaaaaggcaaaagagtctgggagcacccgtttttgcatgggagctgcatggagagaaaccattggcaggaaatcaaacttcaaccagattcttgaatatgtcaaggaaataaggtattcattggaatcttttgtttacccgatagaggtattgtatatggcgcatgttttgcataaccatgtgcaagttttcggcttttcgcctatgtcaatgttctgttgtcacgcctatgttcacctactttgtactccctccatttttttatttgacgtttgttagtgtatatttgtactatccggcgtcaaataaagaaaatggaggtagaattttttttcttgaaacaaactaactttgtctaatcacctatgatatacaggttattgacttaaagttcttaattgtatgggatatgatgatatattcaatcagcagaagttttatacattattattattagtttatttcaacattttagcatgcattggataattgaatttgcaggggtatgggcatggaggtctgttgcacactaggcatgatagagaaacaacaagctgaagaactcaagaaggctggacttacagcatataatcataacctagatacatcaagagagtattatcccaacattattaccacaagatcatatgatgatagactgcagactcttgagcatgtccgtgaagctggaataagcatctgctcaggtggaatcattggtcttggtgaagcagaggaggaccgggtagggttgttgcataccctagctaccttgcctacacacccagagagcgttcctattaatgcattggttgctgtaaaaggcacacctcttgaggaccagaagcctgtagagatctgggaaatgatccgcatgatcgccactgctcggatcacgatgccaaaggcaatggtgaggctttcagcaggccgagtacggttctcgatgccagaacaagcgctgtgcttcctcgctgggggccaactccatctttgccggcgagaaacttctcacaaccgcaaacaacgactttgatgcggaccaggcgatgttcaagatccttggcctgatccccaaggctccaagctttggcgaggaagaggcgtctgcggcggctcccacagaatccgagaggtctgagcaagctgcttcgatgtagaatatatacatatcattaccgattatccgtatcacggttggggcgaaactagaactaccgttgtagctagagcattggattgtagaaaccacaacatttcattattttgtaattgcttgagactgaatgggggatacccatgtcgggctagatcaatggacaacttccacacaaccaaatccaaacattgaaactcatttttcatcacagttttaataaacttctcccacttatcttgagagccc

SEQ ID NO: 3511 - DNA, 1919 bp, Zea Mays
atccgacatccggtagttccgcaccatggcttatagagtcgagcgaatggttcaaaatccacagcttgccggaaccctagcctcatcgcccctcccctcccggcccgatctccctatcgccggattcgtgctgcgggatggactccgacgtggagatgaacgccgccagcgacgaggaggtgatggacgatgaggattactacgactactgctacagcgacgtgggtgacgacggcgacggcgggagcgaggaggagctggtgcccgtggactacgacgagggccttgaggccgagggtaccgacgaggtggtgtccagacgcgagcagacatttgtggttctaaatgaagaagttatatctgagcgtcaagaggaagatgtaagcaaggtatcagccgtgttactgattacaagggaagaggcatgtgccctcctgcatcactataaatggaacatcagcaagttgagtgatgaatggtttgcagatgaagaaaaagtccgccatactgttggcttacttttgaatggaaatcatgagcccggctctaggaagctaacctgtggaatatgttttgaagggtattcttctgatacgatgagctctgctggttgtgctcatttttattgccatgaatgttgggaaggctacattagcgctgcaataggtggtggtccaggatgtttgtctttgcgatgtcctgatccatcatgcagtgctatggttcttcaagggatggttaatgaattagctaaagatgaggacaaagcaaagtacgcacgatttctcttacgtgcatacgttgaaggtagcaagaagactaaatggtgtccagctcctgactgtacatgtgctgtggagtttcttggtgatgaaaactatgatgtctcatgcaattgcaagttcagcttttgctggaattgcactgaggaagctcatcgaccagtgaactgcgagactgtttctaagtggatattaaagaatagtgcagaatctgaaaatatgaactggtttgtcgcaggctcaggactagcgtttgatatgtggtcttcaagtttctgtttttgttgataccatctttagttaagacatggcatataaataaggagttccttgattttattttggatgattcaacctattcaactttataccttctgattttgattattttttgtaatgtttcgtttatcagttcagactaagcacaatgataactaattcttgtgtggttggatcttcatatcctatttcaccgaccttttagcggtttattgaacaatgtaaatgtcacaatcctggaactattcgccttgactgctgacaataagtgagatggtgaaacaaatctgcctaaagctagttgtttagggcctttaggctcacaggcttttgataccatttctctaaggcatttaagctgaattggaaatgggtggggaagccacggcaaatatttatgtgaggttgaatcataggtgttgtgactgttgtcaactatgaaaaatatcctagtaatttaattattttaacataattttaagatagcatttttgtttactgcaagttgcttgggatcaataggcattgtcgttactgctgctatagattgacgatagctaccttttctctgaacatgtaggagagctgcatatcattatattaagaaggtgatgagtatagctagtttgactttatgtggcttgtaaatgtttgggattgatttaattttcatttatttgtcttgttgtttcttaaaaaaatccctcactaggcagtaggcacaagcaactaaggcactgttcaacttaaacttcgcattacctgcattatataaacatgttattgaggtaatgtgccaatgattgtttttattagctggtaatcatgattttttattctattccttgtggcactcca

SEQ ID NO: 3512 - DNA, 2051 bp, Zea Mays
tccgacatccggtagttccgcaccatggcttatagagtcgagcgaatggttcaaaatccacagtacgttgttaaggaaagtgattttttttttggaaaacaaatcggtcacgcggcacatagaaacccaaaagaaacgccattgaaaacgcgactggggcacgcaactctatcgatctccgcccacctcgtccctcacttgccctctccctgccaggcttgccggaaccctagcctcatcgcccctcccctcccggcccgatctccctatcgccggattcgtgctgcgggatggactccgacgtggagatgaacgccgccagcgacgaggaggtgatggacgatgaggattactacgactactgctacagcgacgtgggtgacgacggcgacggcgggagcgaggaggagctggtgcccgtggactacgacgagggccttgaggccgagggtaccgacgagacatttgtggttctaaatgaagaagttatatctgagcgtcaagaggaagatgtaagcaaggtatcagccgtgttactgattacaagggaagaggcatgtgccctcctgcatcactataaatggaacatcagcaagttgagtgatgaatggtttgcagatgaagaaaaagtccgccatactgttggcttacttttgaatggaaatcatgagcccggctctaggaagctaacctgtggaatatgttttgaagggtattcttctgatacgatgagctctgctggttgtgctcatttttattgccatgaatgttgggaaggctacattagcgctgcaataggtggtggtccaggatgtttgtctttgcgatgtcctgatccatcatgcagtgctatggttcttcaagggatggttaatgaattagctaaagatgaggacaaagcaaagtacgcacgatttctcttacgtgcatacgttgaaggtagcaagaagactaaatggtgtccagctcctgactgtacatgtgctgtggagtttcttggtgatgaaaactatgatgtctcatgcaattgcaagttcagcttttgctggaattgcactgaggaagctcatcgaccagtgaactgcgagactgtttctaagtggatattaaagaatagtgcagaatctgaaaatatgaactggtttgtcgcaggctcaggactagcgtttgatatgtggtcttcaagtttctgtttttgttgataccatctttagttaagacatggcatataaataaggagttccttgattttattttggatgattcaacctattcaactttataccttctgattttgattattttttgtaatgtttcgtttatcagttcagactaagcacaatgataactaattcttgtgtggttggatcttcatatcctatttcaccgaccttttagcggtttattgaacaatgtaaatgtcacaatcctggaactattcgccttgactgctgacaataagtgagatggtgaaacaaatctgcctaaagctagttgtttagggcctttaggctcacaggcttttgataccatttctctaaggcatttaagctgaattggaaatgggtggggaagccacggcaaatatttatgtgaggttgaatcataggtgttgtgactgttgtcaactatgaaaaatatcctagtaatttaattattttaacataattttaagatagcatttttgtttactgcaagttgcttgggatcaataggcattgtcgttactgctgctatagattgacgatagctaccttttctctgaacatgtaggagagctgcatatcattatattaagaaggtgatgagtatagctagtttgactttatgtggcttgtaaatgtttgggattgatttaattttcatttatttgtcttgttgtttcttaaaaaaatccctcactaggcagtaggcacaagcaactaaggcactgttcaacttaaacttcgcattacctgcattatataaacatgttattgaggtaatgtgccaatgattgtttttattagctggtaatcatgattttttattctattccttgtggcactcca

SEQ ID NO: 3513 - DNA, 1974 bp, Zea Mays
aggaaagtgattttttttttggaaaacaaatcggtcacgcggcacatagaaacccaaaagaaacgccattgaaaacgcgactggggcacgcaactctatcgatctccgcccacctcgtccctcacttgccctctccctgccaggcttgccggaaccctagcctcatcgcccctcccctcccggcccgatctccctatcgccggattcgtgctgcgggatggactccgacgtggagatgaacgccgccagcgacgaggaggtgatggacgatgaggattactacgactactgctacagcgacgtgggtgacgacggcgacggcgggagcgaggaggagctggtgcccgtggactacgacgagggccttgaggccgagggtaccgacgaggtggtgtccagacgcgagcagacatttgtggttctaaatgaagaagttatatctgagcgtcaagaggaagatgtaagcaaggtatcagccgtgttactgattacaagggaagaggcatgtgccctcctgcatcactataaatggaacatcagcaagttgagtgatgaatggtttgcagatgaagaaaaagtccgccatactgttggcttacttttgaatggaaatcatgagcccggctctaggaagggtattcttctgatacgatgagctctgctggttgtgctcatttttattgccatgaatgttgggaaggctacattagcgctgcaataggtggtggtccaggatgtttgtctttgcgatgtcctgatccatcatgcagtgctatggttcttcaagggatggttaatgaattagctaaagatgaggacaaagcaaagtacgcacgatttctcttacgtgcatacgttgaaggtagcaagaagactaaatggtgtccagctcctgactgtacatgtgctgtggagtttcttggtgatgaaaactatgatgtctcatgcaattgcaagttcagcttttgctggaattgcactgaggaagctcatcgaccagtgaactgcgagactgtttctaagtggatattaaagaatagtgcagaatctgaaaatatgaactggtttgtcgcaggctcaggactagcgtttgatatgtggtcttcaagtttctgtttttgttgataccatctttagttaagacatggcatataaataaggagttccttgattttattttggatgattcaacctattcaactttataccttctgattttgattattttttgtaatgtttcgtttatcagttcagactaagcacaatgataactaattcttgtgtggttggatcttcatatcctatttcaccgaccttttagcggtttattgaacaatgtaaatgtcacaatcctggaactattcgccttgactgctgacaataagtgagatggtgaaacaaatctgcctaaagctagttgtttagggcctttaggctcacaggcttttgataccatttctctaaggcatttaagctgaattggaaatgggtggggaagccacggcaaatatttatgtgaggttgaatcataggtgttgtgactgttgtcaactatgaaaaatatcctagtaatttaattattttaacataattttaagatagcatttttgtttactgcaagttgcttgggatcaataggcattgtcgttactgctgctatagattgacgatagctaccttttctctgaacatgtaggagagctgcatatcattatattaagaaggtgatgagtatagctagtttgactttatgtggcttgtaaatgtttgggattgatttaattttcatttatttgtcttgttgtttcttaaaaaaatccctcactaggcagtaggcacaagcaactaaggcactgttcaacttaaacttcgcattacctgcattatataaacatgttattgaggtaatgtgccaatgattgtttttattagctggtaatcatgattttttattctattccttgtggcactcca

SEQ ID NO: 3514 - DNA, 1231 bp, Zea Mays
aggaaagtgattttttttttggaaaacaaatcggtcacgcggcacatagaaacccaaaagaaacgccattgaaaacgcgactggggcacgcaactctatcgatctccgcccacctcgtccctcacttgccctctccctgccaggcttgccggaaccctagcctcatcgcccctcccctcccggcccgatctccctatcgccggattcgtgctgcgggatggactccgacgtggagatgaacgccgccagcgacgaggaggtgatggacgatgaggattactacgactactgctacagcgacgtgggtgacgacggcgacggcgggagcgaggaggagctggtgcccgtggactacgacgagggccttgaggccgagggtaccgacgaggtggtgtccagacgcgagcagacatttgtggttctaaatgaagaagttatatctgagcgtcaagaggaagatgtaagcaaggtatcagccgtgttactgattacaagggaagaggcatgtgccctcctgcatcactataaatggaacatcagcaagttgagtgatgaatggtttgcagatgaagaaaaagtccgccatactgttggcttacttttgaatggaaatcatgagcccggctctaggaagctaacctgtggaatatgttttgaagggtattcttctgatacgatgagctctgctggttgtgctcatttttattgccatgaatgttgggaaggctacattagcgctgcaataggtggtggtccaggatgtttgtctttgcgatgtcctgatccatcatgcagtgctatggttcttcaagggatggttaatgaattagctaaagatgaggacaaagcaaagtacgcacgatttctcttacgtgcatacgttgaaggtagcaagaagactaaatggtgtccagctcctgactgtacatgtgctgtggagtttcttggtgatgaaaactatgatgtctcatgcaattgcaagttcagcttttgctggaattgcactgaggaagctcatcgaccagtgaactgcgagactgtttctaagtggatattaaagaatagtgcagaatctgaaaatatgaactgtaggcacaagcaactaaggcactgttcaacttaaacttcgcattacctgcattatataaacatgttattgaggtaatgtgccaatgattgtttttattagctggtaatcatgattttttattctattccttgtggcactcca

SEQ ID NO: 3515 - DNA, 1210 bp, Zea Mays
aggaaagtgattttttttttggaaaacaaatcggtcacgcggcacatagaaacccaaaagaaacgccattgaaaacgcgactggggcacgcaactctatcgatctccgcccacctcgtccctcacttgccctctccctgccaggcttgccggaaccctagcctcatcgcccctcccctcccggcccgatctccctatcgccggattcgtgctgcgggatggactccgacgtggagatgaacgccgccagcgacgaggaggtgatggacgatgaggattactacgactactgctacagcgacgtgggtgacgacggcgacggcgggagcgaggaggagctggtgcccgtggactacgacgagggccttgaggccgagggtaccgacgaggtggtgtccagacgcgagcagacatttgtggttctaaatgaagaagttatatctgagcgtcaagaggaagatgtaagcaaggtatcagccgtgttactgattacaagggaagaggcatgtgccctcctgcatcactataaatggaacatcagcaagttgagtgatgaatggtttgcagatgaagaaaaagtccgccatactgttggcttacttttgaatggaaatcatgagcccggctctaggaagggtattcttctgatacgatgagctctgctggttgtgctcatttttattgccatgaatgttgggaaggctacattagcgctgcaataggtggtggtccaggatgtttgtctttgcgatgtcctgatccatcatgcagtgctatggttcttcaagggatggttaatgaattagctaaagatgaggacaaagcaaagtacgcacgatttctcttacgtgcatacgttgaaggtagcaagaagactaaatggtgtccagctcctgactgtacatgtgctgtggagtttcttggtgatgaaaactatgatgtctcatgcaattgcaagttcagcttttgctggaattgcactgaggaagctcatcgaccagtgaactgcgagactgtttctaagtggatattaaagaatagtgcagaatctgaaaatatgaactggcagtaggcacaagcaactaaggcactgttcaacttaaacttcgcattacctgcattatataaacatgttattgaggtaatgtgccaatgattgtttttattagctggtaatcatgattttttattctattccttgtggcactcca

SEQ ID NO: 3516 - DNA, 1235 bp, Zea Mays
aggaaagtgattttttttttggaaaacaaatcggtcacgcggcacatagaaacccaaaagaaacgccattgaaaacgcgactggggcacgcaactctatcgatctccgcccacctcgtccctcacttgccctctccctgccaggcttgccggaaccctagcctcatcgcccctcccctcccggcccgatctccctatcgccggattcgtgctgcgggatggactccgacgtggagatgaacgccgccagcgacgaggaggtgatggacgatgaggattactacgactactgctacagcgacgtgggtgacgacggcgacggcgggagcgaggaggagctggtgcccgtggactacgacgagggccttgaggccgagggtaccgacgaggtggtgtccagacgcgagcagacatttgtggttctaaatgaagaagttatatctgagcgtcaagaggaagatgtaagcaaggtatcagccgtgttactgattacaagggaagaggcatgtgccctcctgcatcactataaatggaacatcagcaagttgagtgatgaatggtttgcagatgaagaaaaagtccgccatactgttggcttacttttgaatggaaatcatgagcccggctctaggaagctaacctgtggaatatgttttgaagggtattcttctgatacgatgagctctgctggttgtgctcatttttattgccatgaatgttgggaaggctacattagcgctgcaataggtggtggtccaggatgtttgtctttgcgatgtcctgatccatcatgcagtgctatggttcttcaagggatggttaatgaattagctaaagatgaggacaaagcaaagtacgcacgatttctcttacgtgcatacgttgaaggtagcaagaagactaaatggtgtccagctcctgactgtacatgtgctgtggagtttcttggtgatgaaaactatgatgtctcatgcaattgcaagttcagcttttgctggaattgcactgaggaagctcatcgaccagtgaactgcgagactgtttctaagtggatattaaagaatagtgcagaatctgaaaatatgaactggcagtaggcacaagcaactaaggcactgttcaacttaaacttcgcattacctgcattatataaacatgttattgaggtaatgtgccaatgattgtttttattagctggtaatcatgattttttattctattccttgtggcactcca

SEQ ID NO: 3517 - DNA, 1403 bp, Zea Mays
caagatttacatttcacatttctatgcttttcttatcaaagcagaagcagcatgtgtaatctgggtattcttctgatacgatgagctctgctggttgtgctcatttttattgccatgaatgttgggaaggctacattagcgctgcaataggtggtggtccaggatgtttgtctttgcgatgtcctgatccatcatgcagtgctatggttcttcaagggatggttaatgaattagctaaagatgaggacaaagcaaagtacgcacgatttctcttacgtgcatacgttgaaggtagcaagaagactaaatggtgtccagctcctgactgtacatgtgctgtggagtttcttggtgatgaaaactatgatgtctcatgcaattgcaagttcagcttttgctggaattgcactgaggaagctcatcgaccagtgaactgcgagactgtttctaagtggatattaaagaatagtgcagaatctgaaaatatgaactggtttgtcgcaggctcaggactagcgtttgatatgtggtcttcaagtttctgtttttgttgataccatctttagttaagacatggcatataaataaggagttccttgattttattttggatgattcaacctattcaactttataccttctgattttgattattttttgtaatgtttcgtttatcagttcagactaagcacaatgataactaattcttgtgtggttggatcttcatatcctatttcaccgaccttttagcggtttattgaacaatgtaaatgtcacaatcctggaactattcgccttgactgctgacaataagtgagatggtgaaacaaatctgcctaaagctagttgtttagggcctttaggctcacaggcttttgataccatttctctaaggcatttaagctgaattggaaatgggtggggaagccacggcaaatatttatgtgaggttgaatcataggtgttgtgactgttgtcaactatgaaaaatatcctagtaatttaattattttaacataattttaagatagcatttttgtttactgcaagttgcttgggatcaataggcattgtcgttactgctgctatagattgacgatagctaccttttctctgaacatgtaggagagctgcatatcattatattaagaaggtgatgagtatagctagtttgactttatgtggcttgtaaatgtttgggattgatttaattttcatttatttgtcttgttgtttcttaaaaaaatccctcactaggcagtaggcacaagcaactaaggcactgttcaacttaaacttcgcattacctgcattatataaacatgttattgaggtaatgtgccaatgattgtttttattagctggtaatcatgattttttattctattccttgtggcactcca

SEQ ID NO: 3518 - DNA, 678 bp, Zea Mays
  misc_feature (677)..(678): n is a, c, g, or t
tgatgctttcaccactgctgtacatcagattatagaatgcaggcgagtgctgaaaatggacatatgcttatggctactatctggatgataaggtcaagagtgatttttttgagtatctgcaaggtgaggctgagtctggtttggaacgtctgcatcagtgcgctgagaaagacttgcacaattttttgactcctgtgaaatttgagagcactgaaacgacgacccctacagtggctgaatttggtgaattccgggtgaagcttgctgggctcacaagcgttactcggaattactttgagaaccttgttcaagctttggaagctgggttggaggatgtccacgccactgcccaggctgctggtacatccatcgccggcaccagctccaagaaaggaggaactaaatccaagaagaaacaacacactaagccatcgtctgaccacactgatgatggttggccctgcgagcgctgcacatttcttaaccctccctcagtggttgtgtgcagcgtctgcgaaaagagtaggtactagatgatggaatagctcaaagggaggcaccccaagaaaagctcaaagcttatgagaagaggggtgcacttcagatcctgcatcggatgctgagaagctgagcctccagcagctgccatgatggtgtacagtgagttattgaaggtnn

SEQ ID NO: 3519 - DNA, 946 bp, Zea Mays
atggtggctcgagagattgctccatgcagagcgaggaactgctcgacagcctgctgtgggttctgctcctccgccgacgagctcacctccgcgtacgagctggtcagagcaatacagcggtcagacaaactcaaagtgcatcaacgcttctgatagcgaagcgcatctatcgactggagagtgttgaaacggtagcagtttcggatgccttaaaggcttaaactacagataaatctgtagtggcaagacaatacagcttcttctcaaggccttgggcccagattcgaagctcaacaaggtgttactaatggagttacccagggaggacttcctccctgccgtagtggccttcaacacagacgcagccttttctagcaaggacagccttgacggcggcgatttctctgctcctttggttctcactctctgtttcatgtcactcgagaatttatcgaacgacgcaggcagagaatgggcgctggtcggggaagacggcgtcgacctagcgctggttgattttgccttcgagctaaccacgtccttcttgtccgagaggaggccattgagcgcctgtttcgagaggttggagttcgacttggtgagctggggcttcttgctctctgtgccgttgctcttgggaggagcattgatcttctctaacctgccctgctctttctctagcgacagggcaccggcatccttggaactaccattggtggaggaggcttgggcggccttgccgctgccaagaagaaaagtggaggagctggtcaccacaagatcctccgggctgccgacgcaggcatggcggcccgggaccggcctgacccccctgaggatcggcaccggggtggctgcctcgagacggtcgacatggacgaactgccccagctggatgacgtcgctgaggatgaggtcgtgctgctcgtccggcagcgacacgtag

SEQ ID NO: 3520 - DNA, 1259 bp, Zea Mays
atggtggctcgagagattgctccatgcagagcgaggaactgctcgacagcctgctgtgggttctgctcctccgccgacgagctcacctccgcgtacgagctggtcagagcaatacagcggtcagacaaactcaaagtgcatcaacgcttctgatagcgaagcgcatctatcgactggagagtgttgaaacggtagcagtttcggatgccttaaaggcttaaactacagataaatctgtagtggcaagacaatacagaacgtcaacagcaacacaggggctcagctggcaaataccttccctagtttaacgagtgatggaggaagcgttgtccacgaagcgctagcatctgagcactcgctgagctcttcctgggtggagtcagaatcttactgtcatccttattcgatggtttctcttctgctaatgattttcgtctgggagtctgaacatgggagaatcaacaaaggttatttactaaacatgctgcatggacataagacattaataggggcactgatgagttgaagcaatactacagtctacatgttcctaacaagagacacatatgcttcttctcaaggccttgggcccagattcgaagctcaacaaggtgttactaatggagttacccagggaggacttcctccctgccgtagtggccttcaacacagacgcagccttttctagcaaggacagccttgacggcggcgatttctctgctcctttggttctcactctctgtttcatgtcactcgagaatttatcgaacgacgcaggcagagaatgggcgctggtcggggaagacggcgtcgacctagcgctggttgattttgccttcgagctaaccacgtccttcttgtccgagaggaggccattgagcgcctgtttcgagaggttggagttcgacttggtgagctggggcttcttgctctctgtgccgttgctcttgggaggagcattgatcttctctaacctgccctgctctttctctagcgacagggcaccggcatccttggaactaccattggtggaggaggcttgggcggccttgccgctgccaagaagaaaagtggaggagctggtcaccacaagatcctccgggctgccgacgcaggcatggcggcccgggaccggcctgacccccctgaggatcggcaccggggtggctgcctcgagacggtcgacatggacgaactgccccagctggatgacgtcgctgaggatgaggtcgtgctgctcgtccggcagcgacacgtag

SEQ ID NO: 3521 - DNA, 1159 bp, Zea Mays
atggtggctcgagagattgctccatgcagagcgaggaactgctcgacagcctgctgtgggttctgctcctccgccgacgagctcacctccgcgtacgagctgaaacatcgaacgatgctctctgccgcagaagcttcttgcatggcttcaacagcagccatttgtgctgcatccctgtacttcagaagctccttccctagtttaacgagtgatggaggaagcgttgtccacgaagcgctagcatctgtcagtttcctgttacttgcagcaaccttcactagattagtgacattcgggttatttaaaacccctgatgtcctccttataggagaagaaagcttgttgttcacaactttgtcggaatcgtctgcaggagcactcgctgagctcttcctgggtggagtcagaatcttactgtcatccttattcgatggtttctcttctgctaatgattttcgtctgggagtcgaagagcttcgattttcagacttcttttcagctttggcaggctttgaatccgaattgcctttgtcctttgcatctgctttcccttcccagcttcttctcaaggccttgggcccagattcgaagctcaacaaggtgttactaatggagttacccagggaggacttcctccctgccgtagtggccttcaacacagacgcagccttttctagcaaggacagccttgacggcggcgatttctctgctcctttggttctcactctctgtttcatgtcactcgagaatttatcgaacgacgcaggcagagaatgggcgctggtcggggaagacggcgtcgacctagcgctggttgattttgccttcgagctaaccacgtccttcttgtccgagaggaggccattgagcgcctgtttcgagaggttggagttcgacttgggcaccggcatccttggaactaccattggtggaggaggcttgggcggccttgccgctgccaagaagaaaagtggaggagctggtcaccacaagatcctccgggctgccgacgcaggcatggcggcccgggaccggcctgacccccctgaggatcggcaccggggtggctgcctcgagacggtcgacatggacgaactgccccagctggatgacgtcgctgaggatgaggtcgtgctgctcgtccggcagcgacacgtag

SEQ ID NO: 3522 - DNA, 1224 bp, Zea Mays
atggtggctcgagagattgctccatgcagagcgaggaactgctcgacagcctgctgtgggttctgctcctccgccgacgagctcacctccgcgtacgagctggtcagagcaatacagcggtcagacaaactcaaagtgcatcaacgcttctgatagcgaagcgcatctatcgactggagagtgttgaaacggtagcagtttcggatgccttaaaggcttaaactacagataaatctgtagtggcaagacaatacagaacgtcaacagcaacacaggggctcagctggcaaataccttccctagtttaacgagtgatggaggaagcgttgtccacgaagcgctagcatctgagcactcgctgagctcttcctgggtggagtcagaatcttactgtcatccttattcgatggtttctcttctgctaatgattttcgtctgggagtcgaagagcttcgattttcagacttcttttcagctttggcaggctttgaatccgaattgcctttgtcctttgcatctgctttcccttcccagcttcttctcaaggccttgggcccagattcgaagctcaacaaggtgttactaatggagttacccagggaggacttcctccctgccgtagtggccttcaacacagacgcagccttttctagcaaggacagccttgacggcggcgatttctctgctcctttggttctcactctctgtttcatgtcactcgagaatttatcgaacgacgcaggcagagaatgggcgctggtcggggaagacggcgtcgacctagcgctggttgattttgccttcgagctaaccacgtccttcttgtccgagaggaggccattgagcgcctgtttcgagaggttggagttcgacttggtgagctggggcttcttgctctctgtgccgttgctcttgggaggagcattgatcttctctaacctgccctgctctttctctagcgacagggcaccggcatccttggaactaccattggtggaggaggcttgggcggccttgccgctgccaagaagaaaagtggaggagctggtcaccacaagatcctccgggctgccgacgcaggcatggcggcccgggaccggcctgacccccctgaggatcggcaccggggtggctgcctcgagacggtcgacatggacgaactgccccagctggatgacgtcgctgaggatgaggtcgtgctgctcgtccggcagcgacacgtag

SEQ ID NO: 3523 - DNA, 1166 bp, Zea Mays
atggtggctcgagagattgctccatgcagagcgaggaactgctcgacagcctgctgtgggttctgctcctccgccgacgagctcacctccgcgtacgagctggtcagagcaatacagcggtcagacaaactcaaagtgcatcaacgcttctgatagcgaagcgcatctatcgactggagagtgttgaaacggtagcagtttcggatgccttaaaggcttaaactacagataaatctgtagtggcaagacaatacaggagcactcgctgagctcttcctgggtggagtcagaatcttactgtcatccttattcgatggtttctcttctgctaatgattttcgtctgggagtctgaacatgggagaatcaacaaaggttatttactaaacatgctgcatggacataagacattaataggggcactgatgagttgaagcaatactacagtctacatgttcctaacaagagacacatatgcttcttctcaaggccttgggcccagattcgaagctcaacaaggtgttactaatggagttacccagggaggacttcctccctgccgtagtggccttcaacacagacgcagccttttctagcaaggacagccttgacggcggcgatttctctgctcctttggttctcactctctgtttcatgtcactcgagaatttatcgaacgacgcaggcagagaatgggcgctggtcggggaagacggcgtcgacctagcgctggttgattttgccttcgagctaaccacgtccttcttgtccgagaggaggccattgagcgcctgtttcgagaggttggagttcgacttggtgagctggggcttcttgctctctgtgccgttgctcttgggaggagcattgatcttctctaacctgccctgctctttctctagcgacagggcaccggcatccttggaactaccattggtggaggaggcttgggcggccttgccgctgccaagaagaaaagtggaggagctggtcaccacaagatcctccgggctgccgacgcaggcatggcggcccgggaccggcctgacccccctgaggatcggcaccggggtggctgcctcgagacggtcgacatggacgaactgccccagctggatgacgtcgctgaggatgaggtcgtgctgctcgtccggcagcgacacgtag

SEQ ID NO: 3524 - DNA, 1222 bp, Zea Mays
atggtggctcgagagattgctccatgcagagcgaggaactgctcgacagcctgctgtgggttctgctcctccgccgacgagctcacctccgcgtacgagctgaaacatcgaacgatgctctctgccgcagaagcttcttgcatggcttcaacagcagccatttgtgctgcatccctgtacttcagaagctccttccctagtttaacgagtgatggaggaagcgttgtccacgaagcgctagcatctgtcagtttcctgttacttgcagcaaccttcactagattagtgacattcgggttatttaaaacccctgatgtcctccttataggagaagaaagcttgttgttcacaactttgtcggaatcgtctgcaggagcactcgctgagctcttcctgggtggagtcagaatcttactgtcatccttattcgatggtttctcttctgctaatgattttcgtctgggagtcgaagagcttcgattttcagacttcttttcagctttggcaggctttgaatccgaattgcctttgtcctttgcatctgctttcccttcccagcttcttctcaaggccttgggcccagattcgaagctcaacaaggtgttactaatggagttacccagggaggacttcctccctgccgtagtggccttcaacacagacgcagccttttctagcaaggacagccttgacggcggcgatttctctgctcctttggttctcactctctgtttcatgtcactcgagaatttatcgaacgacgcaggcagagaatgggcgctggtcggggaagacggcgtcgacctagcgctggttgattttgccttcgagctaaccacgtccttcttgtccgagaggaggccattgagcgcctgtttcgagaggttggagttcgacttgcgacagggcaccggcatccttggaactaccattggtggaggaggcttgggcggccttgccgctgccaagaagaaaagtggaggagctggtcaccacaagatcctccgggctgccgacgcaggcatggcggcccgggaccggcctgacccccctgaggatcggcaccggggtggctgcctcgagacggtcgacatggacgaactgccccagctggatgacgtcgctgaggatgaggtcgtgctgctcgtccggcagcgacacgtaggtggcgtgcgacgagtcggacaccttgaggagcttgaggaggaccccgggtaccagc

SEQ ID NO: 3525 - DNA, 1898 bp, Zea Mays
atggtggctcgagagattgctccatgcagagcgaggaactgctcgacagcctgctgtgggttctgctcctccgccgacgagctcacctccgcgtacgagctggtcagagcaatacagcggtcagacaaactcaaagtgcatcaacgcttctgatagcgaagcgcatctatcgactggagagtgttgaaacggtagcagtttcggatgccttaaaggcttaaactacagataaatctgtagtggcaagacaatacaggtaatgtgcttggaaaaaattaccttaaacatcgaacgatgctctctgccgcagaagcttcttgcatggcttcaacagcagccatttgtgctgcatccctgtacttcagaagctccttccctagtttaacgagtgatggaggaagcgttgtccacgaagcgctagcatctgtcagtttcctgttacttgcagcaaccttcactagattagtgacattcgggttatttaaaacccctgatgtcctccttataggagaagaaagcttgttgttcacaactttgtcggaatcgtctgcaggagcactcgctgagctcttcctgggtggagtcagaatcttactgtcatccttattcgatggtttctcttctgctaatgattttcgtctgggagtcgaagagcttcgattttcagacttcttttcagctttggcaggctttgaatccgaattgcctttgtcctttgcatctgctttcccttcccagcttcttctcaaggccttgggcccagattcgaagctcaacaaggtgttactaatggagttacccagggaggacttcctccctgccgtagtggccttcaacacagacgcagccttttctagcaaggacagccttgacggcggcgatttctctgctcctttggttctcactctctgtttcatgtcactcgagaatttatcgaacgacgcaggcagagaatgggcgctggtcggggaagacggcgtcgacctagcgctggttgattttgccttcgagctaaccacgtccttcttgtccgagaggaggccattgagcgcctgtttcgagaggttggagttcgacttgcgacagggcaccggcatccttggaactaccattggtggaggaggcttgggcggccttgccgctgccaagaagaaaagtggaggagctggtcaccacaagatcctccgggctgccgacgcaggcatggcggcccgggaccggcctgacccccctgaggatcggcaccggggtggctgcctcgagacggtcgacatggacgaactgccccagctggatgacgtcgctgaggatgaggtcgtgctgctcgtccggcagcgacacgtaggtggcgtgcgacgagtcggacaccttgaggagcttgaggaggaccccgggtaccagcgacgccatcgctgcagctcctagcgccgcatttacctgcgcagtgttgagccctggttcagtaaccccactccaatatgtaggctaagcagtggagccttctgagagaacaatgatgttgtcggtagccatggcaaaagcggatcactccaagctacctaatgcaaataaaggctgcgcgcgcgcggctttacaaccagagcagcaaatccagatgagcatgtcggtagccttggcgagcgaaatgagcaacaagttcagccaacagcaaaggcagagcacagtgccgtaaggaggaggaggtgaactagtaaagaggtgtactagaaacggtggctacaatgagtaaggacggcgttgttcgtcgcaagggcattcaattgggtccggaaagggatacgggtactagcgcatggccgccagtctcgactctagagacgagaaggtgatgggagtcgagacgagaagacgatgggtaaggaggaggagaagcaaac

SEQ ID NO: 3526 - DNA, 830 bp, Zea Mays
ataaaaatgtaataaaatagtccaatcgccttgactaccgcttccggttccggatccgaatctcgccctcccctctctttcttgcctccaggtccggccgtccgggcggcgccgggaggagagaatggcctccacggcgtcgccgccggtgttcgagagggtggccgggatccgagccattgccgagtccggccgcttcaaggcatggttgctggaccagtttggcgttcttcatgacgggaagaagccgtaccccggcgccattctggcattggagaagctagcggagaatggggcaaagatggtgataatcagcaattcctctaggcggtcatctgtgacaatgaagaagctcaagagcctggggttcgacacgtcctgtttcctcgcgaccatcaccagtggggagctcacacatcagcaccttcagaagagagacgacccatggtttgctgctcttggaaggaagtgtatccatatcacttgggacgatcgaggggcaatttctctcgagggccttggtttgcaagttgtgaacaatgttgatgatgcagagttcatattagcccacggtactgaagctcttggctcaccttctggtgttcctcttcccaaaagtcttgaggagcttgagcaggttctaatgcttggcatagaaaagcgacttccaatggtggtagctaatccagattatgtcactgtcgaagctcgagatctccgtgtcatgcctggttagggcagatctagtgacggaggctcacatgagtaggttctgagaaagggataaatcggggcaagcccttcactcacaaatacggagatgccatgat

SEQ ID NO: 3527 - DNA, 1747 bp, Zea Mays
ataaaaatgtaataaaatagtccaatcgccttgactaccgcttccggttccggatccgaatctcgccctcccctctctttcttgcctccaggtccggccgtccgggcggcgccgggaggagagaatggcctccacggcgtcgccgccggtgttcgagagggtggccgggatccgagccattgccgagtccggccgcttcaaggcatggttgctggaccagtttggcgttcttcatgacgggaagaagccgtaccccggcgccattctggcattggagaagctagcggagaatggggcaaagatggtgataatcagcaattcctctaggcggtcatctgtgacaatgaagaagctcaagagcctggggttcgacacgtcctgtttcctcgcgaccatcaccagtggggagctcacacatcagcaccttcagaagagagacgacccatggtttgctgctcttggaaggaagtgtatccatatcacttgggacgatcgaggggcaatttctctcgagggccttggtttgcaagttgtgaacaatgttgatgatgcagagttcatattagcccacgaaaagcgacttccaatggtggtagctaatccagattatgtcactgtcgaagctcgagatctccgtgtcatgcctggcactctggcagctaaatatgagagtcttggtggtgaagtgaaatggatggggaagcctgataaggtgatctatacatcagcgatgtccctagcgggcgttgatgcccgtgaatgtatcatggtgggtgattcgctgcaccacgacatcaaaggagccaatgcgtcagggatggcatccgcgttcgtcactggaggggtccatgcggacgaacttggactcggtgaatttggagaaactgctggggaggatgctgtcagttcgctgtgcagcaagcacggatcgtacccttcttatgttctgccttcattcgcgtggtagagatgcggcctagaatttttttttgttttaggtgcacgggaaagtgattttaggcagatattgttgttatggaaataagtgccacgcaatgatcaagccgctggaggtgtcattcttcttaataaataataagtgacacgcaatgctcaagccgctggaggcagatttgtatttgcatttgtagtgtgtgtgtgtctatatatgctgcctgtggtgtatataccgcctgtgctgcaatgttcggttgagactttagacagcgatactgtatgaaggattcacattgttctgctcaattatgtaaacccgctctattacttttcgtggatgctgctttacgtataagtttttgttgggtcttgtattgcagttatctcacgtttctgtatcccatggccagattgatctcgatcaagctcgtcaaagcattgaacggcatgatctccatagaagaagaacgtcttcagctctgtccttgaaactgttatggtgaagatgacagcattcagggtacggtcggagagctttcctccagtgaccaagtgctcaccgatgtattattgcttcctaaaccggtccagctgcataatcaatgtataatgaccctgtcttgatttctgatattagctggagctattgggaaaaaaaaggggctccaatcggctctgcaaaacattactggagttgattggagttctaacaaaggagccctagataactttagttaggtaagcaaaacattaccttaaggcatctgttttttcgaggtggtggtccaaa

SEQ ID NO: 3528 - DNA, 2427 bp, Zea Mays
ctggtttcttgcattctcgagcctcctttctggcatgttcttggtttagggggggaacggacgattctgctttgtacaatattccctagccagtatcaggcgcaagttgcgattctcgggagttcgttgaggagtcacagagaaagtttggtggtactggtgaggcaaaggtttccttccagggttcgtcaggaacgaggcgtgtcgcaatctgaagcctttcgtcggttccgtctagctgcccccctcggattcggccatggagcggcagtccagcatccggctgggcgcgctggagaagctgaggagcttccgggggatggagaagcagaagagcttccgcgggatcatgtccctggagcggcggagcagggacagcccggggaaacgcggcgacacgccgctccacctcgcggcgagggccgggagcagaaccaggacggcgagacgccgctgtacgtcgccgccgagaagggccacgcggaggtcgtgcgcgagatcctcaaggtctgtggcgtgcagacggccggcatcaaggccagcaatagtttcgacgcgttccacatcgccgccaagcagggccaccttgaagttctgaaggagatgctgcaggctcttcctgctcttgctatgacaacaaattctgtaaacgctacggccctggacaccgccgcgattcagggccatgttgacatcgtcaatctcctgctggaaaccgatgctagcctcgccaggatcacgaggaacaacgggaaaacggttttacactcagcagcaagaatgggccacgtggaagttgtaagatcgttgctgaataaggatcccaggattggtttgaggacagacaagaaggggcaaactgcgctgcatatggcttcgaaagcgcagaatgctgagatcgtggtcgagttgttgaagccagatgtctcggtcatccatatcgaagacaacaagggaaacaggcccttgcatgttgctactcggaaggggaatatcattatagtgcagactctgttatcagttgaggggatcgatgtcaatgcagttaacaggtctggagagactgcatttgccattgccgagaaaatggacagtgtagaactcgtgaacatcctgaaagaggctggtggagaagccgcaaagcagcaagtacatcctccgaattcggcgaagcagctgaaggaaacagtcagcgatatcagacacgacgtccagtcccagttcaagcaaacacgtcagaccaagatgcaagtcaaccagatcaagaagaggctggagaagctccacatcggcgggctgaacaacgccatcaactccaacaccgtcgtcgcggtgctcatcgccacggtcgccttcgccgccatattcacggtcccgggaaacttcgtggaggagctgagccaggcgcctccgggcatgtccctggggcaggcgtacgtggcgagcaacccggcgttcatcgtcttcctggtcttcgacgcgctggccctcttcatctcgctcgcggtggtcgtggtgcagacctcgctgatcgtggtggagcggagggcgaagaagcggatggtgttcgtgatgaacaagctcatgtggctggcgtgcctcttcatctcggtggccttcatcgcgctgacctacgtggtggtggggcgcgacgactggtggctggcctggtgcaccatgggcatcggcgccgcgatcatgctcactaccctcggctccatgtgctactgcatcgtcgcgcacaggctggaggagaagaacaccaggaagatcaggagggcctccgcgagccagtcccgcggctcgtggtcccgatcggtcgactcggacgaggagatacttaacagcgagtacaagacgaagatgtacgcgctgtagcctgtaggatggatagcaagtgtaacatgacggattcttttgtacataccagtgctttgtttcgccagaggctgctccatggcatgcggcaccacatcagtcttcttcaaccaaagggactgaaggtccttcctgcggaaccaagttcaggtcacttgaccggtgtgcctgttcctggggagtgagagtctgctcaactgtgtggttcttagcgcctgaaaccgtcaatggtgatggagataatccagctagaaatttagaatagaataaagtgtccggtacaaaatgcattgtgtcgtgcagtagatatgatgatcttgtacacgaggatctcatcggagagagtgatttgttgaactcttgtgggcagttttttttttcccttgggagttgggacttgggcttgtggtctgtgacgcagggaatatatgtgttgacaagatgaaaactgtcattgatcggccatttccgagactaaatttgtgtaacttgtcgaccaccggagtgaaatgtgtatctgcgaataacgatatagagtatgtgtttgtt

SEQ ID NO: 3529 - DNA, 667 bp, Zea Mays
attccttccttcaaaagctagcagacgaccaatccctgaacgaagcgttaaccgccgaggtccaacgtctgaaactcgcgactggggaggtaaccgatggccggatgccgaagggcctacagcagcagatgaactcccagatgctccagatccagcagctgcaggttcagcagcaggcgccccaggcacagcagcagggccagcgacagcagcagcagcagcctcagaaatcggcatagatcaggtcaggtcgagagaaggacgctgaagctaattgagcttgagcatgaccaattgaaggatgctgggtggggagaaaaaacccgagtcttttgcgtatatcagacatgttgtaggatagctgcaatagtagggcgacaggcgccgtggtgccgctgtttcagttggtttcgccgagtcaagtaccttagctggagtatgtcgtcttggtgtcgtagtaccatacatgattgcctgcctattgttgaggcgtcttggtagcgtccctgaacgttctctcggaggtgcttcttctgttcttttgtctaagggggctagggtgtcacaaatgtacctgcgtaatagtgtaattattatctatagcgtaccttcagcgtctgtactgtggaggggttcccaagttctcatgcatgcccgttgatctttc

SEQ ID NO: 3530 - DNA, 665 bp, Zea Mays
ttcaaggaacttatttatatatttatttgagccctgaacgaagcgttaaccgccgaggtccaacgtctgaaactcgcgactggggaggtaaccgatggccggatgccgaagggcctacagcagcagatgaactcccagatgctccagatccagcagctgcaggttcagcagcaggcgccccaggcacagcagcagggccagcgacagcagcagcagcagcctcagaaatcggcatagatcaggtcaggtcgagagaaggacgctgaagctaattgagcttgagcatgaccaattgaaggatgctgggtggggagaaaaaacccgagtcttttgcgtatatcagacatgttgtaggatagctgcaatagtagggcgacaggcgccgtggtgccgctgtttcagttggtttcgccgagtcaagtaccttagctggagtatgtcgtcttggtgtcgtagtaccatacatgattgcctgcctattgttgaggcgtcttggtagcgtccctgaacgttctctcggaggtgcttcttctgttcttttgtctaagggggctagggtgtcacaaatgtacctgcgtaatagtgtaattattatctatagcgtaccttcagcgtctgtactgtggaggggttcccaagttctcatgcatgcccgttgatctttc

SEQ ID NO: 3531 - DNA, 681 bp, Zea Mays
ccactgtctacttgtcaatggtcatgttgtgaattatgatcttttagccctgaacgaagcgttaaccgccgaggtccaacgtctgaaactcgcgactggggaggtaaccgatggccggatgccgaagggcctacagcagcagatgaactcccagatgctccagatccagcagctgcaggttcagcagcaggcgccccaggcacagcagcagggccagcgacagcagcagcagcagcctcagaaatcggcatagatcaggtcaggtcgagagaaggacgctgaagctaattgagcttgagcatgaccaattgaaggatgctgggtggggagaaaaaacccgagtcttttgcgtatatcagacatgttgtaggatagctgcaatagtagggcgacaggcgccgtggtgccgctgtttcagttggtttcgccgagtcaagtaccttagctggagtatgtcgtcttggtgtcgtagtaccatacatgattgcctgcctattgttgaggcgtcttggtagcgtccctgaacgttctctcggaggtgcttcttctgttcttttgtctaagggggctagggtgtcacaaatgtacctgcgtaatagtgtaattattatctatagcgtaccttcagcgtctgtactgtggaggggttcccaagttctcatgcatgcccgttgatctttc

SEQ ID NO: 3532 - DNA, 4701 bp, Zea Mays
agcgcctaccttcggattacacattcctttgaacttaatagggataaataatttaaatatgcatataataatatttagaaaccggagtccgtaccaaattgccttagtgtgtatatatatagcgagccatcgtcccggccgtcgtgacgtacgtacctgcagcagaggtagatagatagtttcgatctgttaattagcttctatagtccgctggtgatatggagctcgccggcgtcggcggcctcgaggacgaggactggtacgatgtgggcacgacgacggcgccggccgcgacgaagccgccgccgctcacccacgacgacaaccgcggcttcctccggatgcttcgcgagaagaaagagagatatgagttgcaaagtccggccctgatgaactggctggcatggtcggagcgcaggctgggcgtggaggcgcacaaggtggaggtgcggttcgagaggctcgccgtggaggcggacgtccgcgtcggcagccgcgccgtcccgacgctgctcaactccgccgtcaacgccgcccaggaattagcgacgtctgtccatatgtgtgttaccaggaaaagacctatgagaatcataaacgaagtaagcggggtcatccggccgtcaaggatgacgctccttctgggagcgcctggatcaggcaagacgactcttctaaaagcgttggcaggaaaactggattcttctttgaagttcaagggaaaagtcatgtacaatggagaagaaatgaatcactcaacaccgcagtacctgcgtgcttatgttagccagtatgatctccatcatgctgagatgacagtgagggagacaatcaacttctcttctaagatgttcggaaccaataacgaattcgagatgctaggagaagcaataagaagaaaaaagggtgtcatcaataaagtggaccaagatcttgattcgttcattaaggccaccacctttggagaaggaagcaacctcacaacaaactacattatcaagatacttggcctgtctgagtgtgctgataccctagtaggagacgagatgaggagaggaatatctggagggcaaaagaaaagagccacaattggggagatgctggttggtctagcaaggtgcttctttatggatgatatatcaacaggtctagatagctccacgacatttgagatcatgaagtttctccaacagatggcccatttgatggatctcacaatggttatttccttgctgcaaccacctcctgagacattggaattatttgacgacattatacttttatgtgaggggcaaattgtgtatcatggtcctcgagaaaatgctacggacttctttgaaagtatgggattcaaatgccctgacagaaagaatgtagccgatttccttcaagaggtaacctctaagatggaccaaaagcaatactgggctggtgatcaaaacaagtatcagtaccatacaattgaaaattttgcacaatccttcaggacgtcctatctccctcttctagtagaagacaaacagtgcagttcaaacaatactggaaagaaaaaggtggtaaaagtgaatgcaagtcgccgaatatccagatggaatattttcaaagcatgcttttcaagggaagtactgctgctgaaaagaaactctccagtccatatattcaagaccattcagataactgttatggctttggtgatctccacacttttcctgagaacaaaaatgagtcacgattctgtacttgatgccaacaagtacatgggagcactttttatggctgtggtcatagtaaacttcaatggaatgactgaaattgcaatgacaataaagcggcttcccaccttctacaagcaaagagagctactagcattgccaggatgggcactcctttgttcagtttaccttattagcataccaatatcgcttcttgagacaggcctttggacatgcttaacctactatgtgattggatatgcaccttccattatcaggttcttccagcactttctggtacttttttccatgcatcaaatgtcaatgggcctgtatcgcttcttagcggccataggaaggacgcaagtgatggccaacatgctagggactgcagctcttattgcaatatacatacttggaggattcgtcatatcaaaagatgatctccaaccatggttgcgctggggatattggacgtccccattcacctatgcacagaatgcaatcgccctcaatgagttccatgacaaaagatgggctacggaattttattataataatgcaaacaccgtcggtgaagctatcctcatgatcagagggctgctcacagagtggcactggtactggatttgtgtcgccattttatttggatactcgctggtcttcaacatattcagcatatttgcattggagttcatgaactctccacacaaacatcaacttaacatcaagaccacaaaagcgaatttcgtgaaccaccggcagatggctgaaaatggcaattcatcaaatgatcaagctatcctcccatttcgacccctctcccttgtctttgatcatatccactattttgttgacatgcctaagatcgcaaacaatggagcaacggagaaaaagcttcagctgctgcaagatgtcagtggtgcttttagaccaggagtactaacagctctgatgggaataactggcgctggaaagacaacattgcttgatgtattagctggaaggaaaactgggggatatattgaagggactattaagatagcaggctaccctaagaagcaggagacgttctcaaggatatcaggttactgtgaacagagtgacattcactcccctaatcttactgttcatgagtcactgaaattttctgcatggcttcgtctgccttcaaatgttaaacctcatcaaagagatatgttcattgaagaagtcatgagccttgttgagctcactgacttaaagaatgccatggtaggcatcccaggagcaactggcctgtcagccgagcagcgtaaaagactaacaatagctgtggagctggtggctagtccctccattatattcatggatgagccaaccaccggcttggatgctcgtgctgcagcaatcgtcatgagaacagtacgaaagacggtagacactggacgaactgttgtctgcacaattcatcagccaagcatcgagatatttgaatcttttgatgagcttctgctcatgaaaagaggtggtcagcttatatacagtggttcactaggtccactctctagcaacatgataaagtatttcgaggccataccaggcgttcctaaaataaacaagggccaaaacccagcagcatgggtgttagacatcagttcacacataacagaatatgaaattggagtggactatgcagaaatttatcgcaactcctccctgtacagggagaacaggcttctaattgatgaattggaacaaccagaaccaaacacagatgatctgcattttcctcagggttactggcaaaactttacgacacaatgtgcggcatgcttgtggaagcaaaattgtgcatactggaaaaactcagaacacaatgttgtccggttcataaacacttttgctgtttcaatcatgtttggagttgtattctggaaaattggctcgaacatcaaggttgagcaagatgtattcaacatacttggaatcgtatatgggtcagcattgttcctgggtttcatgaactgcagcatcctacagccagtggtggcaatggagagagttgtgctctaccgtgaaaaggcggcaggcatgtactccaccatggcatacgctatcgctcaggtggcggtggaattaccttacatgttggtgcaagtgctgatcttctcatcgattgtgtacccgatgattgggttccagctgtctgcggccaagttcttctggttcttcctatacctggtgatgagcttcatgtactacactctgtacgggatgatgacggtggccctgacccccaacatcgagatcgccatggggctgtcgttcctcatcttcatcttctggaacgtcttctctggcttcatcatcgcgagagagctgatgcccgtgtggtggcggtgggtgtactgggccgatccagcggcatggacagtttacgggctgatgttctcacagctcgcagaccggacggagcagatcctggtgccagggctcggggtgcagacggtgcgtgagttcctggaggggtacctaggcctgcaggatcgctactttgagctggtgacctgcctccatctcgcaatcattggcctcttcgccttcctcttcttcctcgccatcaagcacctcaatttccagcgcaggaatacgagtaggttcaaggggattttgcaaaatgtgtaatgattaagattcagaaaatggaaatgtgttgtttgccattgtttcagtttttgaatcttcagagatggatggaatggaactgctgcaatcctcagctctgtgtgatgtttttatgggcaagacataccatactgatgctcgatttcttcatatttccctggctgtattaagtgattggcagcgatcatagtagcaggacctcgtgtgtaaggctgtcttcaacaagcgatctatacggtgctctgaaccgaaaatgggctgtaacacaccagttgcaggcctccaacagcagaccgaaacagaagacccaaatatagagcag

SEQ ID NO: 3533 - DNA, 4685 bp, Zea Mays
attcctttgaacttaatagggataaataatttaaatatgcatataataatatttagaaaccggagtccgtaccaaattgccttagtgtgtatatatatagcgagccatcgtcccggccgtcgtgacgtacgtacctgcagcagaggtagatagatagtttcgatctgttaattagcttctatagtccgctggtgatatggagctcgccggcgtcggcggcctcgaggacgaggactggtacgatgtgggcacgacgacggcgccggccgcgacgaagccgccgccgctcacccacgacgacaaccgcggcttcctccggatgcttcgcgagaagaaagagaggctgggcgtggaggcgcacaaggtggaggtgcggttcgagaggctcgccgtggaggcggacgtccgcgtcggcagccgcgccgtcccgacgctgctcaactccgccgtcaacgccgcccaggaattagcgacgtctgtccatatgtgtgttaccaggaaaagacctatgagaatcataaacgaagtaagcggggtcatccggccgtcaaggatgacgctccttctgggagcgcctggatcaggcaagacgactcttctaaaagcgttggcaggaaaactggattcttctttgaagttcaagggaaaagtcatgtacaatggagaagaaatgaatcactcaacaccgcagtacctgcgtgcttatgttagccagtatgatctccatcatgctgagatgacagtgagggagacaatcaacttctcttctaagatgttcggaaccaataacgaattcgagatgctaggagaagcaataagaagaaaaaagggtgtcatcaataaagtggaccaagatcttgattcgttcattaaggccaccacctttggagaaggaagcaacctcacaacaaactacattatcaagatacttggcctgtctgagtgtgctgataccctagtaggagacgagatgaggagaggaatatctggagggcaaaagaaaagagccacaattggggagatgctggttggtctagcaaggtgcttctttatggatgatatatcaacaggtctagatagctccacgacatttgagatcatgaagtttctccaacagatggcccatttgatggatctcacaatggttatttccttgctgcaaccacctcctgagacattggaattatttgacgacattatacttttatgtgaggggcaaattgtgtatcatggtcctcgagaaaatgctacggacttctttgaaagtatgggattcaaatgccctgacagaaagaatgtagccgatttccttcaagaggtaacctctaagatggaccaaaagcaatactgggctggtgatcaaaacaagtatcagtaccatacaattgaaaattttgcacaatccttcaggacgtcctatctccctcttctagtagaagacaaacagtgcagttcaaacaatactggaaagaaaaaggtggtaaaagtgaatgcaagtcgccgaatatccagatggaatattttcaaagcatgcttttcaagggaagtactgctgctgaaaagaaactctccagtccatatattcaagaccattcagataactgttatggctttggtgatctccacacttttcctgagaacaaaaatgagtcacgattctgtacttgatgccaacaagtacatgggagcactttttatggctgtggtcatagtaaacttcaatggaatgactgaaattgcaatgacaataaagcggcttcccaccttctacaagcaaagagagctactagcattgccaggatgggcactcctttgttcagtttaccttattagcataccaatatcgcttcttgagacaggcctttggacatgcttaacctactatgtgattggatatgcaccttccattatcaggtactcatctcttggtacttatatgctgaatgacctctggtgcttcaatagacggaagttcttccagcactttctggtacttttttccatgcatcaaatgtcaatgggcctgtatcgcttcttagcggccataggaaggacgcaagtgatggccaacatgctagggactgcagctcttattgcaatatacatacttggaggattcgtcatatcaaaagatgatctccaaccatggttgcgctggggatattggacgtccccattcacctatgcacagaatgcaatcgccctcaatgagttccatgacaaaagatgggctacggaattttattataataatgcaaacaccgtcggtgaagctatcctcatgatcagagggctgctcacagagtggcactggtactggatttgtgtcgccattttatttggatactcgctggtcttcaacatattcagcatatttgcattggagttcatgaactctccacacaaacatcaacttaacatcaagaccacaaaagcgaatttcgtgaaccaccggcagatggctgaaaatggcaattcatcaaatgatcaagctatcctcccatttcgacccctctcccttgtctttgatcatatccactattttgttgacatgcctaaggagatcgcaaacaatggagcaacggagaaaaagcttcagctgctgcaagatgtcagtggtgcttttagaccaggagtactaacagctctgatgggaataactggcgctggaaagacaacattgcttgatgtattagctggaaggaaaactgggggatatattgaagggactattaagatagcaggctaccctaagaagcaggagacgttctcaaggatatcaggttactgtgaacagagtgacattcactcccctaatcttactgttcatgagtcactgaaattttctgcatggcttcgtctgccttcaaatgttaaacctcatcaaagagatatgttcattgaagaagtcatgagccttgttgagctcactgacttaaagaatgccatggtaggcatcccaggagcaactggcctgtcagccgagcagcgtaaaagactaacaatagctgtggagctggtggctagtccctccattatattcatggatgagccaaccaccggcttggatgctcgtgctgcagcaatcgtcatgagaacagtacgaaagacggtagacactggacgaactgttgtctgcacaattcatcagccaagcatcgagatatttgaatcttttgatgagcttctgctcatgaaaagaggtggtcagcttatatacagtggttcactaggtccactctctagcaacatgataaagtatttcgaggccataccaggcgttcctaaaataaacaagggccaaaacccagcagcatgggtgttagacatcagttcacacataacagaatatgaaattggagtggactatgcagaaatttatcgcaactcctccctgtacagggagaacaggcttctaattgatgaattggaacaaccagaaccaaacacagatgatctgcattttcctcagggttactggcaaaactttacgacacaatgtgcggcatgcttgtggaagcaaaattgtgcatactggaaaaactcagaacacaatgttgtccggttcataaacacttttgctgtttcaatcatgtttggagttgtattctggaaaattggctcgaacatcaaggttgagcaagatgtattcaacatacttggaatcgtatatgggtcagcattgttcctgggtttcatgaactgcagcatcctacagccagtggtggcaatggagagagttgtgctctaccgtgaaaaggcggcaggcatgtactccaccatggcatacgctatcgctcaggtggcggtggaattaccttacatgttggtgcaagtgctgatcttctcatcgattgtgtacccgatgattgggttccagctgtctgcggccaagttcttctggttcttcctatacctggtgatgagcttcatgtactacactctgtacgggatgatgacggtggccctgacccccaacatcgagatcgccatggggctgtcgttcctcatcttcatcttctggaacgtcttctctggcttcatcatcgcgagagagctgatgcccgtgtggtggcggtgggtgtactgggccgatccagcggcatggacagtttacgggctgatgttctcacagctcgcagaccggacggagcagatcctggtgccagggctcggggtgcagacggtgcgtgagttcctggaggggtacctaggcctgcaggatcgctactttgagctggtgacctgcctccatctcgcaatcattggcctcttcgccttcctcttcttcctcgccatcaagcacctcaatttccagcgcaggaatacgagtaggttcaaggggattttgcaaaatgtgtaatgattaagattcagaaaatggaaatgtgttgtttgccattgtttcagtttttgaatcttcagagatggatggaatggaactgctgcaatcctcagctctgtgtgatgtttttatgggcaagacataccatactgatgctcgatttcttcatatttccctggctgtattaagtgattggcagcgatcatagtagcaggacctcgtgtgtaaggctgtcttcaacaagcgatctatacggtgctctgaaccgaaaatgggctgtaacacaccagttgcaggcctccaacagcagaccgaaacagaagacccaaatatagagcag

SEQ ID NO: 3534 - DNA, 4628 bp, Zea Mays
attcctttgaacttaatagggataaataatttaaatatgcatataataatatttagaaaccggagtccgtaccaaattgccttagtgtgtatatatatagcgagccatcgtcccggccgtcgtgacgtacgtacctgcagcagaggtagatagatagtttcgatctgttaattagcttctatagtccgctggtgatatggagctcgccggcgtcggcggcctcgaggacgaggactggtacgatgtgggcacgacgacggcgccggccgcgacgaagccgccgccgctcacccacgacgacaaccgcggcttcctccggatgcttcgcgagaagaaagagaggctgggcgtggaggcgcacaaggtggaggtgcggttcgagaggctcgccgtggaggcggacgtccgcgtcggcagccgcgccgtcccgacgctgctcaactccgccgtcaacgccgcccaggaattagcgacgtctgtccatatgtgtgttaccaggaaaagacctatgagaatcataaacgaagtaagcggggtcatccggccgtcaaggatgacgctccttctgggagcgcctggatcaggcaagacgactcttctaaaagcgttggcaggaaaactggattcttctttgaagttcaagggaaaagtcatgtacaatggagaagaaatgaatcactcaacaccgcagtacctgcgtgcttatgttagccagtatgatctccatcatgctgagatgacagtgagggagacaatcaacttctcttctaagatgttcggaaccaataacgaattcgagatgctaggagaagcaataagaagaaaaaagggtgtcatcaataaagtggaccaagatcttgattcgttcattaaggccaccacctttggagaaggaagcaacctcacaacaaactacattatcaagatacttggcctgtctgagtgtgctgataccctagtaggagacgagatgaggagaggaatatctggagggcaaaagaaaagagccacaattggggagatgctggttggtctagcaaggtgcttctttatggatgatatatcaacaggtctagatagctccacgacatttgagatcatgaagtttctccaacagatggcccatttgatggatctcacaatggttatttccttgctgcaaccacctcctgagacattggaattatttgacgacattatacttttatgtgaggggcaaattgtgtatcatggtcctcgagaaaatgctacggacttctttgaaagtatgggattcaaatgccctgacagaaagaatgtagccgatttccttcaagaggtaacctctaagatggaccaaaagcaatactgggctggtgatcaaaacaagtatcagtaccatacaattgaaaattttgcacaatccttcaggacgtcctatctccctcttctagtagaagacaaacagtgcagttcaaacaatactggaaagaaaaaggtggtaaaagtgaatgcaagtcgccgaatatccagatggaatattttcaaagcatgcttttcaagggaagtactgctgctgaaaagaaactctccagtccatatattcaagaccattcagataactgttatggctttggtgatctccacacttttcctgagaacaaaaatgagtcacgattctgtacttgatgccaacaagtacatgggagcactttttatggctgtggtcatagtaaacttcaatggaatgactgaaattgcaatgacaataaagcggcttcccaccttctacaagcaaagagagctactagcattgccaggatgggcactcctttgttcagtttaccttattagcataccaatatcgcttcttgagacaggcctttggacatgcttaacctactatgtgattggatatgcaccttccattatcaggttcttccagcactttctggtacttttttccatgcatcaaatgtcaatgggcctgtatcgcttcttagcggccataggaaggacgcaagtgatggccaacatgctagggactgcagctcttattgcaatatacatacttggaggattcgtcatatcaaaagatgatctccaaccatggttgcgctggggatattggacgtccccattcacctatgcacagaatgcaatcgccctcaatgagttccatgacaaaagatgggctacggaattttattataataatgcaaacaccgtcggtgaagctatcctcatgatcagagggctgctcacagagtggcactggtactggatttgtgtcgccattttatttggatactcgctggtcttcaacatattcagcatatttgcattggagttcatgaactctccacacaaacatcaacttaacatcaagaccacaaaagcgaatttcgtgaaccaccggcagatggctgaaaatggcaattcatcaaatgatcaagctatcctcccatttcgacccctctcccttgtctttgatcatatccactattttgttgacatgcctaaggagatcgcaaacaatggagcaacggagaaaaagcttcagctgctgcaagatgtcagtggtgcttttagaccaggagtactaacagctctgatgggaataactggcgctggaaagacaacattgcttgatgtattagctggaaggaaaactgggggatatattgaagggactattaagatagcaggctaccctaagaagcaggagacgttctcaaggatatcaggttactgtgaacagagtgacattcactcccctaatcttactgttcatgagtcactgaaattttctgcatggcttcgtctgccttcaaatgttaaacctcatcaaagagatatgttcattgaagaagtcatgagccttgttgagctcactgacttaaagaatgccatggtaggcatcccaggagcaactggcctgtcagccgagcagcgtaaaagactaacaatagctgtggagctggtggctagtccctccattatattcatggatgagccaaccaccggcttggatgctcgtgctgcagcaatcgtcatgagaacagtacgaaagacggtagacactggacgaactgttgtctgcacaattcatcagccaagcatcgagatatttgaatcttttgatgagcttctgctcatgaaaagaggtggtcagcttatatacagtggttcactaggtccactctctagcaacatgataaagtatttcgaggccataccaggcgttcctaaaataaacaagggccaaaacccagcagcatgggtgttagacatcagttcacacataacagaatatgaaattggagtggactatgcagaaatttatcgcaactcctccctgtacagggagaacaggcttctaattgatgaattggaacaaccagaaccaaacacagatgatctgcattttcctcagggttactggcaaaactttacgacacaatgtgcggcatgcttgtggaagcaaaattgtgcatactggaaaaactcagaacacaatgttgtccggttcataaacacttttgctgtttcaatcatgtttggagttgtattctggaaaattggctcgaacatcaaggttgagcaagatgtattcaacatacttggaatcgtatatgggtcagcattgttcctgggtttcatgaactgcagcatcctacagccagtggtggcaatggagagagttgtgctctaccgtgaaaaggcggcaggcatgtactccaccatggcatacgctatcgctcaggtggcggtggaattaccttacatgttggtgcaagtgctgatcttctcatcgattgtgtacccgatgattgggttccagctgtctgcggccaagttcttctggttcttcctatacctggtgatgagcttcatgtactacactctgtacgggatgatgacggtggccctgacccccaacatcgagatcgccatggggctgtcgttcctcatcttcatcttctggaacgtcttctctggcttcatcatcgcgagagagctgatgcccgtgtggtggcggtgggtgtactgggccgatccagcggcatggacagtttacgggctgatgttctcacagctcgcagaccggacggagcagatcctggtgccagggctcggggtgcagacggtgcgtgagttcctggaggggtacctaggcctgcaggatcgctactttgagctggtgacctgcctccatctcgcaatcattggcctcttcgccttcctcttcttcctcgccatcaagcacctcaatttccagcgcaggaatacgagtaggttcaaggggattttgcaaaatgtgtaatgattaagattcagaaaatggaaatgtgttgtttgccattgtttcagtttttgaatcttcagagatggatggaatggaactgctgcaatcctcagctctgtgtgatgtttttatgggcaagacataccatactgatgctcgatttcttcatatttccctggctgtattaagtgattggcagcgatcatagtagcaggacctcgtgtgtaaggctgtcttcaacaagcgatctatacggtgctctgaaccgaaaatgggctgtaacacaccagttgcaggcctccaacagcagaccgaaacagaagacccaaatatagagcag

SEQ ID NO: 3535 - DNA, 4544 bp, Zea Mays
agcagaggtagatagatagtttcgatctgttaattagcttctatagtccgctggtgatatggagctcgccggcgtcggcggcctcgaggacgaggactggtacgatgtgggcacgacgacggcgccggccgcgacgaagccgccgccgctcacccacgacgacaaccgcggcttcctccggatgcttcgcgagaagaaagagagatatgagttgcaaagtccggccctgatgaactggctggcatggtcggagcgcaggctgggcgtggaggcgcacaaggtggaggtgcggttcgagaggctcgccgtggaggcggacgtccgcgtcggcagccgcgccgtcccgacgctgctcaactccgccgtcaacgccgcccaggaattagcgacgtctgtccatatgtgtgttaccaggaaaagacctatgagaatcataaacgaagtaagcggggtcatccggccgtcaaggatgacgctccttctgggagcgcctggatcaggcaagacgactcttctaaaagcgttggcaggaaaactggattcttctttgaagttcaagggaaaagtcatgtacaatggagaagaaatgaatcactcaacaccgcagtacctgcgtgcttatgttagccagtatgatctccatcatgctgagatgacagtgagggagacaatcaacttctcttctaagatgttcggaaccaataacgaattcgagatgctaggagaagcaataagaagaaaaaagggtgtcatcaataaagtggaccaagatcttgattcgttcattaaggccaccacctttggagaaggaagcaacctcacaacaaactacattatcaagatacttggcctgtctgagtgtgctgataccctagtaggagacgagatgaggagaggaatatctggagggcaaaagaaaagagccacaattggggagatgctggttggtctagcaaggtgcttctttatggatgatatatcaacaggtctagatagctccacgacatttgagatcatgaagtttctccaacagatggcccatttgatggatctcacaatggttatttccttgctgcaaccacctcctgagacattggaattatttgacgacattatacttttatgtgaggggcaaattgtgtatcatggtcctcgagaaaatgctacggacttctttgaaagtatgggattcaaatgccctgacagaaagaatgtagccgatttccttcaagaggtaacctctaagatggaccaaaagcaatactgggctggtgatcaaaacaagtatcagtaccatacaattgaaaattttgcacaatccttcaggacgtcctatctccctcttctagtagaagacaaacagtgcagttcaaacaatactggaaagaaaaaggtggtaaaagtgaatgcaagtcgccgaatatccagatggaatattttcaaagcatgcttttcaagggaagtactgctgctgaaaagaaactctccagtccatatattcaagaccattcagataactgttatggctttggtgatctccacacttttcctgagaacaaaaatgagtcacgattctgtacttgatgccaacaagtacatgggagcactttttatggctgtggtcatagtaaacttcaatggaatgactgaaattgcaatgacaataaagcggcttcccaccttctacaagcaaagagagctactagcattgccaggatgggcactcctttgttcagtttaccttattagcataccaatatcgcttcttgagacaggcctttggacatgcttaacctactatgtgattggatatgcaccttccattatcaggttcttccagcactttctggtacttttttccatgcatcaaatgtcaatgggcctgtatcgcttcttagcggccataggaaggacgcaagtgatggccaacatgctagggactgcagctcttattgcaatatacatacttggaggattcgtcatatcaaaagatgatctccaaccatggttgcgctggggatattggacgtccccattcacctatgcacagaatgcaatcgccctcaatgagttccatgacaaaagatgggctacggaattttattataataatgcaaacaccgtcggtgaagctatcctcatgatcagagggctgctcacagagtggcactggtactggatttgtgtcgccattttatttggatactcgctggtcttcaacatattcagcatatttgcattggagttcatgaactctccacacaaacatcaacttaacatcaagaccacaaaagcgaatttcgtgaaccaccggcagatggctgaaaatggcaattcatcaaatgatcaagctatcctcccatttcgacccctctcccttgtctttgatcatatccactattttgttgacatgcctaaggagatcgcaaacaatggagcaacggagaaaaagcttcagctgctgcaagatgtcagtggtgcttttagaccaggagtactaacagctctgatgggaataactggcgctggaaagacaacattgcttgatgtattagctggaaggaaaactgggggatatattgaagggactattaagatagcaggctaccctaagaagcaggagacgttctcaaggatatcaggttactgtgaacagagtgacattcactcccctaatcttactgttcatgagtcactgaaattttctgcatggcttcgtctgccttcaaatgttaaacctcatcaaagagatatgttcattgaagaagtcatgagccttgttgagctcactgacttaaagaatgccatggtaggcatcccaggagcaactggcctgtcagccgagcagcgtaaaagactaacaatagctgtggagctggtggctagtccctccattatattcatggatgagccaaccaccggcttggatgctcgtgctgcagcaatcgtcatgagaacagtacgaaagacggtagacactggacgaactgttgtctgcacaattcatcagccaagcatcgagatatttgaatcttttgatgagcttctgctcatgaaaagaggtggtcagcttatatacagtggttcactaggtccactctctagcaacatgataaagtatttcgaggccataccaggcgttcctaaaataaacaagggccaaaacccagcagcatgggtgttagacatcagttcacacataacagaatatgaaattggagtggactatgcagaaatttatcgcaactcctccctgtacagggagaacaggcttctaattgatgaattggaacaaccagaaccaaacacagatgatctgcattttcctcagggttactggcaaaactttacgacacaatgtgcggcatgcttgtggaagcaaaattgtgcatactggaaaaactcagaacacaatgttgtccggttcataaacacttttgctgtttcaatcatgtttggagttgtattctggaaaattggctcgaacatcaaggttgagcaagatgtattcaacatacttggaatcgtatatgggtcagcattgttcctgggtttcatgaactgcagcatcctacagccagtggtggcaatggagagagttgtgctctaccgtgaaaaggcggcaggcatgtactccaccatggcatacgctatcgctcaggtggcggtggaattaccttacatgttggtgcaagtgctgatcttctcatcgattgtgtacccgatgattgggttccagctgtctgcggccaagttcttctggttcttcctatacctggtgatgagcttcatgtactacactctgtacgggatgatgacggtggccctgacccccaacatcgagatcgccatggggctgtcgttcctcatcttcatcttctggaacgtcttctctggcttcatcatcgcgagagagctgatgcccgtgtggtggcggtgggtgtactgggccgatccagcggcatggacagtttacgggctgatgttctcacagctcgcagaccggacggagcagatcctggtgccagggctcggggtgcagacggtgcgtgagttcctggaggggtacctaggcctgcaggatcgctactttgagctggtgacctgcctccatctcgcaatcattggcctcttcgccttcctcttcttcctcgccatcaagcacctcaatttccagcgcaggaatacgagtaggttcaaggggattttgcaaaatgtgtaatgattaagattcagaaaatggaaatgtgttgtttgccattgtttcagtttttgaatcttcagagatggatggaatggaactgctgcaatcctcagctctgtgtgatgtttttatgggcaagacataccatactgatgctcgatttcttcatatttccctggctgtattaagtgattggcagcgatcatagtagcaggacctcgtgtgtaaggctgtcttcaacaagcgatctatacggtgctctgaaccgaaaatgggctgtaacacaccagttgcaggcctccaacagcagaccgaaacagaagacccaaatatagagcag

SEQ ID NO: 3536 - DNA, 4568 bp, Zea Mays
agcagaggtagatagatagtttcgatctgttaattagcttctatagtccgctggtgatatggagctcgccggcgtcggcggcctcgaggacgaggactggtacgatgtgggcacgacgacggcgccggccgcgacgaagccgccgccgctcacccacgacgacaaccgcggcttcctccggatgcttcgcgagaagaaagagagatatgagttgcaaagtccggccctgatgaactggctggcatggtcggagcgcaggctgggcgtggaggcgcacaaggtggaggtgcggttcgagaggctcgccgtggaggcggacgtccgcgtcggcagccgcgccgtcccgacgctgctcaactccgccgtcaacgccgcccaggaattagcgacgtctgtccatatgtgtgttaccaggaaaagacctatgagaatcataaacgaagtaagcggggtcatccggccgtcaaggatgacgctccttctgggagcgcctggatcaggcaagacgactcttctaaaagcgttggcaggaaaactggattcttctttgaagttcaagggaaaagtcatgtacaatggagaagaaatgaatcactcaacaccgcagtacctgcgtgcttatgttagccagtatgatctccatcatgctgagatgacagtgagggagacaatcaacttctcttctaagatgttcggaaccaataacgaattcgagatgctaggagaagcaataagaagaaaaaagggtgtcatcaataaagtggaccaagatcttgattcgttcattaaggccaccacctttggagaaggaagcaacctcacaacaaactacattatcaagatacttggcctgtctgagtgtgctgataccctagtaggagacgagatgaggagaggaatatctggagggcaaaagaaaagagccacaattggggagatgctggttggtctagcaaggtgcttctttatggatgatatatcaacaggtctagatagctccacgacatttgagatcatgaagtttctccaacagatggcccatttgatggatctcacaatggttatttccttgctgcaaccacctcctgagacattggaattatttgacgacattatacttttatgtgaggggcaaattgtgtatcatggtcctcgagaaaatgctacggacttctttgaaagtatgggattcaaatgccctgacagaaagaatgtagccgatttccttcaagaggtaacctctaagatggaccaaaagcaatactgggctggtgatcaaaacaagtatcagtaccatacaattgaaaattttgcacaatccttcaggacgtcctatctccctcttctagtagaagacaaacagtgcagttcaaacaatactggaaagaaaaaggtggtaaaagtgaatgcaagtcgccgaatatccagatggaatattttcaaagcatgcttttcaagggaagtactgctgctgaaaagaaactctccagtccatatattcaagaccattcagataactgttatggctttggtgatctccacacttttcctgagaacaaaaatgagtcacgattctgtacttgatgccaacaagtacatgggagcactttttatggctgtggtcatagtaaacttcaatggaatgactgaaattgcaatgacaataaagcggcttcccaccttctacaagcaaagagagctactagcattgccaggatgggcactcctttgttcagtttaccttattagcataccaatatcgcttcttgagacaggcctttggacatgcttaacctactatgtgattggatatgcaccttccattatcaggttcttccagcactttctggtacttttttccatgcatcaaatgtcaatgggcctgtatcgcttcttagcggccataggaaggacgcaagtgatggccaacatgctagggactgcagctcttattgcaatatacatacttggaggattcgtcatatcaaaagatgatctccaaccatggttgcgctggggatattggacgtccccattcacctatgcacagaatgcaatcgccctcaatgagttccatgacaaaagatgggctacggaattttattataataatgcaaacaccgtcggtgaagctatcctcatgatcagagggctgctcacagagtggcactggtactggatttgtgtcgccattttatttggatactcgctggtcttcaacatattcagcatatttgcattggagttcatgaactctccacacaaacatcaacttaacatcaagaccacaaaagcgaatttcgtgaaccaccggcagatggctgaaaatggcaattcatcaaatgatcaagctatcctcccatttcgacccctctcccttgtctttgatcatatccactattttgttgacatgcctaagaaaagaaaacgaatgtcccaccaggagatcgcaaacaatggagcaacggagaaaaagcttcagctgctgcaagatgtcagtggtgcttttagaccaggagtactaacagctctgatgggaataactggcgctggaaagacaacattgcttgatgtattagctggaaggaaaactgggggatatattgaagggactattaagatagcaggctaccctaagaagcaggagacgttctcaaggatatcaggttactgtgaacagagtgacattcactcccctaatcttactgttcatgagtcactgaaattttctgcatggcttcgtctgccttcaaatgttaaacctcatcaaagagatatgttcattgaagaagtcatgagccttgttgagctcactgacttaaagaatgccatggtaggcatcccaggagcaactggcctgtcagccgagcagcgtaaaagactaacaatagctgtggagctggtggctagtccctccattatattcatggatgagccaaccaccggcttggatgctcgtgctgcagcaatcgtcatgagaacagtacgaaagacggtagacactggacgaactgttgtctgcacaattcatcagccaagcatcgagatatttgaatcttttgatgagcttctgctcatgaaaagaggtggtcagcttatatacagtggttcactaggtccactctctagcaacatgataaagtatttcgaggccataccaggcgttcctaaaataaacaagggccaaaacccagcagcatgggtgttagacatcagttcacacataacagaatatgaaattggagtggactatgcagaaatttatcgcaactcctccctgtacagggagaacaggcttctaattgatgaattggaacaaccagaaccaaacacagatgatctgcattttcctcagggttactggcaaaactttacgacacaatgtgcggcatgcttgtggaagcaaaattgtgcatactggaaaaactcagaacacaatgttgtccggttcataaacacttttgctgtttcaatcatgtttggagttgtattctggaaaattggctcgaacatcaaggttgagcaagatgtattcaacatacttggaatcgtatatgggtcagcattgttcctgggtttcatgaactgcagcatcctacagccagtggtggcaatggagagagttgtgctctaccgtgaaaaggcggcaggcatgtactccaccatggcatacgctatcgctcaggtggcggtggaattaccttacatgttggtgcaagtgctgatcttctcatcgattgtgtacccgatgattgggttccagctgtctgcggccaagttcttctggttcttcctatacctggtgatgagcttcatgtactacactctgtacgggatgatgacggtggccctgacccccaacatcgagatcgccatggggctgtcgttcctcatcttcatcttctggaacgtcttctctggcttcatcatcgcgagagagctgatgcccgtgtggtggcggtgggtgtactgggccgatccagcggcatggacagtttacgggctgatgttctcacagctcgcagaccggacggagcagatcctggtgccagggctcggggtgcagacggtgcgtgagttcctggaggggtacctaggcctgcaggatcgctactttgagctggtgacctgcctccatctcgcaatcattggcctcttcgccttcctcttcttcctcgccatcaagcacctcaatttccagcgcaggaatacgagtaggttcaaggggattttgcaaaatgtgtaatgattaagattcagaaaatggaaatgtgttgtttgccattgtttcagtttttgaatcttcagagatggatggaatggaactgctgcaatcctcagctctgtgtgatgtttttatgggcaagacataccatactgatgctcgatttcttcatatttccctggctgtattaagtgattggcagcgatcatagtagcaggacctcgtgtgtaaggctgtcttcaacaagcgatctatacggtgctctgaaccgaaaatgggctgtaacacaccagttgcaggcctccaacagcagaccgaaacagaagacccaaatatagagcag

SEQ ID NO: 3537 - DNA, 6110 bp, Zea Mays
atggagctcgccggcgtcggcggcctcgaggacgaggactggtacgatgtgggcacgacgacggcgccggccgcgacgaagccgccgccgctcacccacgacgacaaccgcggcttcctccggatgcttcgcgagaagaaagagagatatgagttgcaaagtccggccctgatgaactggctggcatggtcggagcgcaggctgggcgtggaggcgcacaaggtggaggtgcggttcgagaggctcgccgtggaggcggacgtccgcgtcggcagccgcgccgtcccgacgctgctcaactccgccgtcaacgccgcccaggaattagcgacgtctgtccatatgtgtgttaccaggaaaagacctatgagaatcataaacgaagtaagcggggtcatccggccgtcaaggatgacgctccttctgggagcgcctggatcaggcaagacgactcttctaaaagcgttggcaggaaaactggattcttctttgaagttcaagggaaaagtcatgtacaatggagaagaaatgaatcactcaacaccgcagtacctgcgtgcttatgttagccagtatgatctccatcatgctgagatgacagtgagggagacaatcaacttctcttctaagatgttcggaaccaataacgaattcgagatgctaggagaagcaataagaagaaaaaagggtgtcatcaataaagtggaccaagatcttgattcgttcattaaggtagctcttctttactaagatttttgaaagaccggattatgttttgtttggttactcaaatagctcgtctctcaggccaccacctttggagaaggaagcaacctcacaacaaactacattatcaaggtaatttagttacttgtttgatttgctgtataccttgatgatacaatagtaacagttgattgtatgcagatacttggcctgtctgagtgtgctgataccctagtaggagacgagatgaggagaggaatatctggagggcaaaagaaaagagccacaattggtaagcattcctatcatggctgattgtaaaatacatagctataggatttatttagctgccactggaagcacacacttcaatctgaaacaaagccacattaactgacattccaccacctcaagaacgcaaaaggttcttaccagggcaggaatcttcatgataacgaataatgagtagctctaaaattgaatgcttaactaaccagaatattagaataaggaacagagtaaagatatagttaactggaacctaacctaagttggcatacattaacgtgatgttgtttaatgcaggggagatgctggttggtctagcaaggtgcttctttatggatgatatatcaacaggtctagatagctccacgacatttgagatcatgaagtttctccaacagatggcccatttgatggatctcacaatggttatttccttgctgcaaccacctcctgagacattggaattatttgacgacattatacttttatgtgaggggcaaattgtgtatcatggtcctcgagaaaatgctacggacttctttgaaagtatgggattcaaatgccctgacagaaagaatgtagccgatttccttcaagaggtaacctctaagatggaccaaaagcaatactgggctggtgatcaaaacaagtatcagtaccatacaattgaaaattttgcacaatccttcaggacgtcctatctccctcttctagtagaagacaaacagtgcagttcaaacaatactggaaagaaaaaggtggtaaaagtgaatgcaagtcgccgaatatccagatggaatattttcaaagcatgcttttcaagggaagtactgctgctgaaaagaaactctccagtccatatattcaagaccattcagataactgttatggctttggtgatctccacacttttcctgagaacaaaaatgagtcacgattctgtacttgatgccaacaagtacatgggagcactttttatggctgtggtcatagtaaacttcaatggaatgactgaaattgcaatgacaataaagcggcttcccaccttctacaagcaaagagagctactagcattgccaggatgggcactcctttgttcagtttaccttattagcataccaatatcgcttcttgagacaggcctttggacatgcttaacctactatgtgattggatatgcaccttccattatcaggttcttccagcactttctggtacttttttccatgcatcaaatgtcaatgggcctgtatcgcttcttagcggccataggaaggacgcaagtgatggccaacatgctagggactgcagctcttattgcaatatacatacttggaggattcgtcatatcaaaaggttaggtgaatgtagcttagcatacaccatgaaacatgagtacacgacatacactctaataaaaattctgtgcaacaagttgctaacaaattctgcacactgaaacagatgatctccaaccatggttgcgctggggatattggacgtccccattcacctatgcacagaatgcaatcgccctcaatgagttccatgacaaaagatgggctacggtaagcactaatttcaacacttggaagttatagctatatggtagtatgtcctttttcaaattaattacactaaggttcttgaccttttgttactgataggaattttattataataatgcaaacaccgtcggtgaagctatcctcatgatcagagggctgctcacagagtggcactggtactggatttgtgtcgccattttatttggatactcgctggtcttcaacatattcagcatatttgcattggagttcatgaactgtatgttaccaatctatcacaaacctagtaaatattcaatttaaatgaaaatattgattatctgccatgtttactacttgcagctccacacaaacatcaacttaacatcaagaccacaaaagcgaatttcgtgaaccaccggcagatggctgaaaatggcaattcatcaaatgatcaagctatcctcccatttcgacccctctcccttgtctttgatcatatccactattttgttgacatgcctaaggtaaaatcttgatcacttattaaaatcttaaatggtagcttcattaattccaatcacacattgaagaaaagaaaacgaatgtcccaccaggagatcgcaaacaatggagcaacggagaaaaagcttcagctgctgcaagatgtcagtggtgcttttagaccaggagtactaacagctctgatgggaataactggcgctggaaagacaacattgcttgatgtattagctggaaggaaaactgggggatatattgaagggactattaagatagcaggctaccctaagaagcaggagacgttctcaaggatatcaggttactgtgaacagagtgacattcactcccctaatcttactgttcatgagtcactgaaattttctgcatggcttcgtctgccttcaaatgttaaacctcatcaaagagatgtatgtgtttcaaccttacccctctttatcattggagtatggagcctagttcctgacacaatttattttcaaatgcatttcagatgttcattgaagaagtcatgagccttgttgagctcactgacttaaagaatgccatggtaggcatcccaggagcaactggcctgtcagccgagcagcgtaaaagactaacaatagctgtggagctggtggctagtccctccattatattcatggatgagccaaccaccggcttggatgctcgtgctgcagcaatcgtcatgagaacagtacgaaagacggtagacactggacgaactgttgtctgcacaattcatcagccaagcatcgagatatttgaatcttttgatgaggtatgaacaagttcagatggtatagccatataggtagacaaaaatatagccacaccaagcaattgagaaacatgaatacatgattagtccagtgctggagtggtgtcaaagtaattacataagtaaaacaaacatgattcttgacaaacaaattgaagtgtatagaagtatgcataaagttgtaaaatgcagtcgaaacctaaagtagaaaacgatcaaagaactacatgataaactggtccttcttttattaaagtaggcataggcactacaaaatagccattctgaattttaagttcaatttgcgtttttaagtgcatggaaaacagctattcatgtgcccgaaacttgattgtggttttattgggtttttaactctagcctacccccaacttggttgggataaaaggctcggttgttgttgttattgagttttaagttcaatttggccaattgcagcttctgctcatgaaaagaggtggtcagcttatatacagtggttcactaggtccactctctagcaacatgataaagtatttcgaggtaagattgcctaagatggacatttatatttgtaagatacatagagaagaaataatgaattactctgtaacaggccataccaggcgttcctaaaataaacaagggccaaaacccagcagcatgggtgttagacatcagttcacacataacagaatatgaaattggagtggactatgcagaaatttatcgcaactcctccctgtacaggtacacccagtagtacaaccgtaaagctgcaataactttattttagctggtataaacaataaggtggaagtcaatctaatggaatttttggtggcacctgcagggagaacaggcttctaattgatgaattggaacaaccagaaccaaacacagatgatctgcattttcctcagggttactggcaaaactttacgacacaatgtgcggcatgcttgtggaagcaaaattgtgcatactggaaaaactcagaacacaatgttgtccggttcataaacacttttgctgtttcaatcatgtttggagttgtattctggaaaattggctcgaacatgtaagtggattataattacctttcatgaatatttcaaattaatttttatgcccccaatcaagatctaacacagatatcatgtgcaacagcaaggttgagcaagatgtattcaacatacttggaatcgtatatgggtcagcattgttcctgggtttcatgaactgcagcatcctacagccagtggtggcaatggagagagttgtgctctaccgtgaaaaggcggcaggcatgtactccaccatggcatacgctatcgctcaggtggcggtggaattaccttacatgttggtgcaagtgctgatcttctcatcgattgtgtacccgatgattgggttccagctgtctgcggccaagttcttctggttcttcctatacctggtgatgagcttcatgtactacactctgtacgggatgatgacggtggccctgacccccaacatcgagatcgccatggggctgtcgttcctcatcttcatcttctggaacgtcttctctggcttcatcatcgcgagagagctgatgcccgtgtggtggcggtgggtgtactgggccgatccagcggcatggacagtttacgggctgatgttctcacagctcgcagaccggacggagcagatcctggtgccagggctcggggtgcagacggtgcgtgagttcctggaggggtacctaggcctgcaggatcgctactttgagctggtgacctgcctccatctcgcaatcattggcctcttcgccttcctcttcttcctcgccatcaagcacctcaatttccagcgcaggaatacgagtaggttcaaggggattttgcaaaatgtgtaatgattaagattcagaaaatggaaatgtgttgtttgccattgtttcagtttttgaatcttcagagatggatggaatggaactgctgcaatcctcagctctgtgtgatgtttttatgggcaagacataccatactgatgctcgatttcttcatatttccctggctgtattaagtgattggcagcgatcatagtagcaggacctcgtgtgtaaggctgtcttcaacaagcgatctatacggtgctctgaaccgaaaatgggctgtaacacaccagttgcaggcctccaacagcagaccgaaacagaagacccaaatatagagcag

SEQ ID NO: 3538 - DNA, 4488 bp, Zea Mays
atggagctcgccggcgtcggcggcctcgaggacgaggactggtacgatgtgggcacgacgacggcgccggccgcgacgaagccgccgccgctcacccacgacgacaaccgcggcttcctccggatgcttcgcgagaagaaagagagatatgagttgcaaagtccggccctgatgaactggctggcatggtcggagcgcaggctgggcgtggaggcgcacaaggtggaggtgcggttcgagaggctcgccgtggaggcggacgtccgcgtcggcagccgcgccgtcccgacgctgctcaactccgccgtcaacgccgcccaggaattagcgacgtctgtccatatgtgtgttaccaggaaaagacctatgagaatcataaacgaagtaagcggggtcatccggccgtcaaggatgacgctccttctgggagcgcctggatcaggcaagacgactcttctaaaagcgttggcaggaaaactggattcttctttgaagttcaagggaaaagtcatgtacaatggagaagaaatgaatcactcaacaccgcagtacctgcgtgcttatgttagccagtatgatctccatcatgctgagatgacagtgagggagacaatcaacttctcttctaagatgttcggaaccaataacgaattcgagatgctaggagaagcaataagaagaaaaaagggtgtcatcaataaagtggaccaagatcttgattcgttcattaagaggccaccacctttggagaaggaagcaacctcacaacaaactacattatcaagatacttggcctgtctgagtgtgctgataccctagtaggagacgagatgaggagaggaatatctggagggcaaaagaaaagagccacaattggggagatgctggttggtctagcaaggtgcttctttatggatgatatatcaacaggtctagatagctccacgacatttgagatcatgaagtttctccaacagatggcccatttgatggatctcacaatggttatttccttgctgcaaccacctcctgagacattggaattatttgacgacattatacttttatgtgaggggcaaattgtgtatcatggtcctcgagaaaatgctacggacttctttgaaagtatgggattcaaatgccctgacagaaagaatgtagccgatttccttcaagaggtaacctctaagatggaccaaaagcaatactgggctggtgatcaaaacaagtatcagtaccatacaattgaaaattttgcacaatccttcaggacgtcctatctccctcttctagtagaagacaaacagtgcagttcaaacaatactggaaagaaaaaggtggtaaaagtgaatgcaagtcgccgaatatccagatggaatattttcaaagcatgcttttcaagggaagtactgctgctgaaaagaaactctccagtccatatattcaagaccattcagataactgttatggctttggtgatctccacacttttcctgagaacaaaaatgagtcacgattctgtacttgatgccaacaagtacatgggagcactttttatggctgtggtcatagtaaacttcaatggaatgactgaaattgcaatgacaataaagcggcttcccaccttctacaagcaaagagagctactagcattgccaggatgggcactcctttgttcagtttaccttattagcataccaatatcgcttcttgagacaggcctttggacatgcttaacctactatgtgattggatatgcaccttccattatcaggttcttccagcactttctggtacttttttccatgcatcaaatgtcaatgggcctgtatcgcttcttagcggccataggaaggacgcaagtgatggccaacatgctagggactgcagctcttattgcaatatacatacttggaggattcgtcatatcaaaagatgatctccaaccatggttgcgctggggatattggacgtccccattcacctatgcacagaatgcaatcgccctcaatgagttccatgacaaaagatgggctacggaattttattataataatgcaaacaccgtcggtgaagctatcctcatgatcagagggctgctcacagagtggcactggtactggatttgtgtcgccattttatttggatactcgctggtcttcaacatattcagcatatttgcattggagttcatgaactctccacacaaacatcaacttaacatcaagaccacaaaagcgaatttcgtgaaccaccggcagatggctgaaaatggcaattcatcaaatgatcaagctatcctcccatttcgacccctctcccttgtctttgatcatatccactattttgttgacatgcctaaggagatcgcaaacaatggagcaacggagaaaaagcttcagctgctgcaagatgtcagtggtgcttttagaccaggagtactaacagctctgatgggaataactggcgctggaaagacaacattgcttgatgtattagctggaaggaaaactgggggatatattgaagggactattaagatagcaggctaccctaagaagcaggagacgttctcaaggatatcaggttactgtgaacagagtgacattcactcccctaatcttactgttcatgagtcactgaaattttctgcatggcttcgtctgccttcaaatgttaaacctcatcaaagagatatgttcattgaagaagtcatgagccttgttgagctcactgacttaaagaatgccatggtaggcatcccaggagcaactggcctgtcagccgagcagcgtaaaagactaacaatagctgtggagctggtggctagtccctccattatattcatggatgagccaaccaccggcttggatgctcgtgctgcagcaatcgtcatgagaacagtacgaaagacggtagacactggacgaactgttgtctgcacaattcatcagccaagcatcgagatatttgaatcttttgatgagcttctgctcatgaaaagaggtggtcagcttatatacagtggttcactaggtccactctctagcaacatgataaagtatttcgaggccataccaggcgttcctaaaataaacaagggccaaaacccagcagcatgggtgttagacatcagttcacacataacagaatatgaaattggagtggactatgcagaaatttatcgcaactcctccctgtacagggagaacaggcttctaattgatgaattggaacaaccagaaccaaacacagatgatctgcattttcctcagggttactggcaaaactttacgacacaatgtgcggcatgcttgtggaagcaaaattgtgcatactggaaaaactcagaacacaatgttgtccggttcataaacacttttgctgtttcaatcatgtttggagttgtattctggaaaattggctcgaacatcaaggttgagcaagatgtattcaacatacttggaatcgtatatgggtcagcattgttcctgggtttcatgaactgcagcatcctacagccagtggtggcaatggagagagttgtgctctaccgtgaaaaggcggcaggcatgtactccaccatggcatacgctatcgctcaggtggcggtggaattaccttacatgttggtgcaagtgctgatcttctcatcgattgtgtacccgatgattgggttccagctgtctgcggccaagttcttctggttcttcctatacctggtgatgagcttcatgtactacactctgtacgggatgatgacggtggccctgacccccaacatcgagatcgccatggggctgtcgttcctcatcttcatcttctggaacgtcttctctggcttcatcatcgcgagagagctgatgcccgtgtggtggcggtgggtgtactgggccgatccagcggcatggacagtttacgggctgatgttctcacagctcgcagaccggacggagcagatcctggtgccagggctcggggtgcagacggtgcgtgagttcctggaggggtacctaggcctgcaggatcgctactttgagctggtgacctgcctccatctcgcaatcattggcctcttcgccttcctcttcttcctcgccatcaagcacctcaatttccagcgcaggaatacgagtaggttcaaggggattttgcaaaatgtgtaatgattaagattcagaaaatggaaatgtgttgtttgccattgtttcagtttttgaatcttcagagatggatggaatggaactgctgcaatcctcagctctgtgtgatgtttttatgggcaagacataccatactgatgctcgatttcttcatatttccctggctgtattaagtgattggcagcgatcatagtagcaggacctcgtgtgtaaggctgtcttcaacaagcgatctatacggtgctctgaaccgaaaatgggctgtaacacaccagttgcaggcctccaacagcagaccgaaacagaagacccaaatatagagcag

SEQ ID NO: 3539 - DNA, 5065 bp, Zea Mays
atggagctcgccggcgtcggcggcctcgaggacgaggactggtacgatgtgggcacgacgacggcgccggccgcgacgaagccgccgccgctcacccacgacgacaaccgcggcttcctccggatgcttcgcgagaagaaagagagatatgagttgcaaagtccggccctgatgaactggctggcatggtcggagcgcaggctgggcgtggaggcgcacaaggtggaggtgcggttcgagaggctcgccgtggaggcggacgtccgcgtcggcagccgcgccgtcccgacgctgctcaactccgccgtcaacgccgcccaggaattagcgacgtctgtccatatgtgtgttaccaggaaaagacctatgagaatcataaacgaagtaagcggggtcatccggccgtcaaggatgacgctccttctgggagcgcctggatcaggcaagacgactcttctaaaagcgttggcaggaaaactggattcttctttgaagttcaagggaaaagtcatgtacaatggagaagaaatgaatcactcaacaccgcagtacctgcgtgcttatgttagccagtatgatctccatcatgctgagatgacagtgagggagacaatcaacttctcttctaagatgttcggaaccaataacgaattcgagatgctaggagaagcaataagaagaaaaaagggtgtcatcaataaagtggaccaagatcttgattcgttcattaagctcgtctctcaggccaccacctttggagaaggaagcaacctcacaacaaactacattatcaagatacttggcctgtctgagtgtgctgataccctagtaggagacgagatgaggagaggaatatctggagggcaaaagaaaagagccacaattggggagatgctggttggtctagcaaggtgcttctttatggatgatatatcaacaggtctagatagctccacgacatttgagatcatgaagtttctccaacagatggcccatttgatggatctcacaatggttatttccttgctgcaaccacctcctgagacattggaattatttgacgacattatacttttatgtgaggggcaaattgtgtatcatggtcctcgagaaaatgctacggacttctttgaaagtatgggattcaaatgccctgacagaaagaatgtagccgatttccttcaagaggtaacctctaagatggaccaaaagcaatactgggctggtgatcaaaacaagtatcagtaccatacaattgaaaattttgcacaatccttcaggacgtcctatctccctcttctagtagaagacaaacagtgcagttcaaacaatactggaaagaaaaaggtggtaaaagtgaatgcaagtcgccgaatatccagatggaatattttcaaagcatgcttttcaagggaagtactgctgctgaaaagaaactctccagtccatatattcaagaccattcagataactgttatggctttggtgatctccacacttttcctgagaacaaaaatgagtcacgattctgtacttgatgccaacaagtacatgggagcactttttatggctgtggtcatagtaaacttcaatggaatgactgaaattgcaatgacaataaagcggcttcccaccttctacaagcaaagagagctactagcattgccaggatgggcactcctttgttcagtttaccttattagcataccaatatcgcttcttgagacaggcctttggacatgcttaacctactatgtgattggatatgcaccttccattatcaggtactcatctcttggtacttatatgctgaatgacctctggtgcttcaatagacggaagttcttccagcactttctggtacttttttccatgcatcaaatgtcaatgggcctgtatcgcttcttagcggccataggaaggacgcaagtgatggccaacatgctagggactgcagctcttattgcaatatacatacttggaggattcgtcatatcaaaagatgatctccaaccatggttgcgctggggatattggacgtccccattcacctatgcacagaatgcaatcgccctcaatgagttccatgacaaaagatgggctacggaattttattataataatgcaaacaccgtcggtgaagctatcctcatgatcagagggctgctcacagagtggcactggtactggatttgtgtcgccattttatttggatactcgctggtcttcaacatattcagcatatttgcattggagttcatgaactctccacacaaacatcaacttaacatcaagaccacaaaagcgaatttcgtgaaccaccggcagatggctgaaaatggcaattcatcaaatgatcaagctatcctcccatttcgacccctctcccttgtctttgatcatatccactattttgttgacatgcctaagaaaagaaaacgaatgtcccaccaggagatcgcaaacaatggagcaacggagaaaaagcttcagctgctgcaagatgtcagtggtgcttttagaccaggagtactaacagctctgatgggaataactggcgctggaaagacaacattgcttgatgtattagctggaaggaaaactgggggatatattgaagggactattaagatagcaggctaccctaagaagcaggagacgttctcaaggatatcaggttactgtgaacagagtgacattcactcccctaatcttactgttcatgagtcactgaaattttctgcatggcttcgtctgccttcaaatgttaaacctcatcaaagagatatgttcattgaagaagtcatgagccttgttgagctcactgacttaaagaatgccatggtaggcatcccaggagcaactggcctgtcagccgagcagcgtaaaagactaacaatagctgtggagctggtggctagtccctccattatattcatggatgagccaaccaccggcttggatgctcgtgctgcagcaatcgtcatgagaacagtacgaaagacggtagacactggacgaactgttgtctgcacaattcatcagccaagcatcgagatatttgaatcttttgatgaggtatgaacaagttcagatggtatagccatataggtagacaaaaatatagccacaccaagcaattgagaaacatgaatacatgattagtccagtgctggagtggtgtcaaagtaattacataagtaaaacaaacatgattcttgacaaacaaattgaagtgtatagaagtatgcataaagttgtaaaatgcagtcgaaacctaaagtagaaaacgatcaaagaactacatgataaactggtccttcttttattaaagtaggcataggcactacaaaatagccattctgaattttaagttcaatttgcgtttttaagtgcatggaaaacagctattcatgtgcccgaaacttgattgtggttttattgggtttttaactctagcctacccccaacttggttgggataaaaggctcggttgttgttgttattgagttttaagttcaatttggccaattgcagcttctgctcatgaaaagaggtggtcagcttatatacagtggttcactaggtccactctctagcaacatgataaagtatttcgaggccataccaggcgttcctaaaataaacaagggccaaaacccagcagcatgggtgttagacatcagttcacacataacagaatatgaaattggagtggactatgcagaaatttatcgcaactcctccctgtacagggagaacaggcttctaattgatgaattggaacaaccagaaccaaacacagatgatctgcattttcctcagggttactggcaaaactttacgacacaatgtgcggcatgcttgtggaagcaaaattgtgcatactggaaaaactcagaacacaatgttgtccggttcataaacacttttgctgtttcaatcatgtttggagttgtattctggaaaattggctcgaacatatctaacacagatatcatgtgcaacagcaaggttgagcaagatgtattcaacatacttggaatcgtatatgggtcagcattgttcctgggtttcatgaactgcagcatcctacagccagtggtggcaatggagagagttgtgctctaccgtgaaaaggcggcaggcatgtactccaccatggcatacgctatcgctcaggtggcggtggaattaccttacatgttggtgcaagtgctgatcttctcatcgattgtgtacccgatgattgggttccagctgtctgcggccaagttcttctggttcttcctatacctggtgatgagcttcatgtactacactctgtacgggatgatgacggtggccctgacccccaacatcgagatcgccatggggctgtcgttcctcatcttcatcttctggaacgtcttctctggcttcatcatcgcgagagagctgatgcccgtgtggtggcggtgggtgtactgggccgatccagcggcatggacagtttacgggctgatgttctcacagctcgcagaccggacggagcagatcctggtgccagggctcggggtgcagacggtgcgtgagttcctggaggggtacctaggcctgcaggatcgctactttgagctggtgacctgcctccatctcgcaatcattggcctcttcgccttcctcttcttcctcgccatcaagcacctcaatttccagcgcaggaatacgagtaggttcaaggggattttgcaaaatgtgtaatgattaagattcagaaaatggaaatgtgttgtttgccattgtttcagtttttgaatcttcagagatggatggaatggaactgctgcaatcctcagctctgtgtgatgtttttatgggcaagacataccatactgatgctcgatttcttcatatttccctggctgtattaagtgattggcagcgatcatagtagcaggacctcgtgtgtaaggctgtcttcaacaagcgatctatacggtgctctgaaccgaaaatgggctgtaacacaccagttgcaggcctccaacagcagaccgaaacagaagacccaaatatagagcag

SEQ ID NO: 3540 - DNA, 4983 bp, Zea Mays
atggagctcgccggcgtcggcggcctcgaggacgaggactggtacgatgtgggcacgacgacggcgccggccgcgacgaagccgccgccgctcacccacgacgacaaccgcggcttcctccggatgcttcgcgagaagaaagagagatatgagttgcaaagtccggccctgatgaactggctggcatggtcggagcgcaggctgggcgtggaggcgcacaaggtggaggtgcggttcgagaggctcgccgtggaggcggacgtccgcgtcggcagccgcgccgtcccgacgctgctcaactccgccgtcaacgccgcccaggaattagcgacgtctgtccatatgtgtgttaccaggaaaagacctatgagaatcataaacgaagtaagcggggtcatccggccgtcaaggatgacgctccttctgggagcgcctggatcaggcaagacgactcttctaaaagcgttggcaggaaaactggattcttctttgaagttcaagggaaaagtcatgtacaatggagaagaaatgaatcactcaacaccgcagtacctgcgtgcttatgttagccagtatgatctccatcatgctgagatgacagtgagggagacaatcaacttctcttctaagatgttcggaaccaataacgaattcgagatgctaggagaagcaataagaagaaaaaagggtgtcatcaataaagtggaccaagatcttgattcgttcattaagctcgtctctcaggccaccacctttggagaaggaagcaacctcacaacaaactacattatcaagatacttggcctgtctgagtgtgctgataccctagtaggagacgagatgaggagaggaatatctggagggcaaaagaaaagagccacaattggtaagcattcctatcatggctgattgtaaaatacatagctataggatttatttagctgccactggaagcacacacttcaatctgaaacaaagccacattaactgacattccaccacctcaagaacgcaaaaggttcttaccagggcaggaatcttcatgataacgaataatgagtagctctaaaattgaatgcttaactaaccagaatattagaataaggaacagagtaaagatatagttaactggaacctaacctaagttggcatacattaacgtgatgttgtttaatgcaggggagatgctggttggtctagcaaggtgcttctttatggatgatatatcaacaggtctagatagctccacgacatttgagatcatgaagtttctccaacagatggcccatttgatggatctcacaatggttatttccttgctgcaaccacctcctgagacattggaattatttgacgacattatacttttatgtgaggggcaaattgtgtatcatggtcctcgagaaaatgctacggacttctttgaaagtatgggattcaaatgccctgacagaaagaatgtagccgatttccttcaagaggtaacctctaagatggaccaaaagcaatactgggctggtgatcaaaacaagtatcagtaccatacaattgaaaattttgcacaatccttcaggacgtcctatctccctcttctagtagaagacaaacagtgcagttcaaacaatactggaaagaaaaaggtggtaaaagtgaatgcaagtcgccgaatatccagatggaatattttcaaagcatgcttttcaagggaagtactgctgctgaaaagaaactctccagtccatatattcaagaccattcagataactgttatggctttggtgatctccacacttttcctgagaacaaaaatgagtcacgattctgtacttgatgccaacaagtacatgggagcactttttatggctgtggtcatagtaaacttcaatggaatgactgaaattgcaatgacaataaagcggcttcccaccttctacaagcaaagagagctactagcattgccaggatgggcactcctttgttcagtttaccttattagcataccaatatcgcttcttgagacaggcctttggacatgcttaacctactatgtgattggatatgcaccttccattatcaggttcttccagcactttctggtacttttttccatgcatcaaatgtcaatgggcctgtatcgcttcttagcggccataggaaggacgcaagtgatggccaacatgctagggactgcagctcttattgcaatatacatacttggaggattcgtcatatcaaaagatgatctccaaccatggttgcgctggggatattggacgtccccattcacctatgcacagaatgcaatcgccctcaatgagttccatgacaaaagatgggctacggaattttattataataatgcaaacaccgtcggtgaagctatcctcatgatcagagggctgctcacagagtggcactggtactggatttgtgtcgccattttatttggatactcgctggtcttcaacatattcagcatatttgcattggagttcatgaactctccacacaaacatcaacttaacatcaagaccacaaaagcgaatttcgtgaaccaccggcagatggctgaaaatggcaattcatcaaatgatcaagctatcctcccatttcgacccctctcccttgtctttgatcatatccactattttgttgacatgcctaaggagatcgcaaacaatggagcaacggagaaaaagcttcagctgctgcaagatgtcagtggtgcttttagaccaggagtactaacagctctgatgggaataactggcgctggaaagacaacattgcttgatgtattagctggaaggaaaactgggggatatattgaagggactattaagatagcaggctaccctaagaagcaggagacgttctcaaggatatcaggttactgtgaacagagtgacattcactcccctaatcttactgttcatgagtcactgaaattttctgcatggcttcgtctgccttcaaatgttaaacctcatcaaagagatatgttcattgaagaagtcatgagccttgttgagctcactgacttaaagaatgccatggtaggcatcccaggagcaactggcctgtcagccgagcagcgtaaaagactaacaatagctgtggagctggtggctagtccctccattatattcatggatgagccaaccaccggcttggatgctcgtgctgcagcaatcgtcatgagaacagtacgaaagacggtagacactggacgaactgttgtctgcacaattcatcagccaagcatcgagatatttgaatcttttgatgagcttctgctcatgaaaagaggtggtcagcttatatacagtggttcactaggtccactctctagcaacatgataaagtatttcgaggccataccaggcgttcctaaaataaacaagggccaaaacccagcagcatgggtgttagacatcagttcacacataacagaatatgaaattggagtggactatgcagaaatttatcgcaactcctccctgtacaggtacacccagtagtacaaccgtaaagctgcaataactttattttagctggtataaacaataaggtggaagtcaatctaatggaatttttggtggcacctgcagggagaacaggcttctaattgatgaattggaacaaccagaaccaaacacagatgatctgcattttcctcagggttactggcaaaactttacgacacaatgtgcggcatgcttgtggaagcaaaattgtgcatactggaaaaactcagaacacaatgttgtccggttcataaacacttttgctgtttcaatcatgtttggagttgtattctggaaaattggctcgaacatgtaagtggattataattacctttcatgaatatttcaaattaatttttatgcccccaatcaagatctaacacagatatcatgtgcaacagcaaggttgagcaagatgtattcaacatacttggaatcgtatatgggtcagcattgttcctgggtttcatgaactgcagcatcctacagccagtggtggcaatggagagagttgtgctctaccgtgaaaaggcggcaggcatgtactccaccatggcatacgctatcgctcaggtggcggtggaattaccttacatgttggtgcaagtgctgatcttctcatcgattgtgtacccgatgattgggttccagctgtctgcggccaagttcttctggttcttcctatacctggtgatgagcttcatgtactacactctgtacgggatgatgacggtggccctgacccccaacatcgagatcgccatggggctgtcgttcctcatcttcatcttctggaacgtcttctctggcttcatcatcgcgagagagctgatgcccgtgtggtggcggtgggtgtactgggccgatccagcggcatggacagtttacgggctgatgttctcacagctcgcagaccggacggagcagatcctggtgccagggctcggggtgcagacggtgcgtgagttcctggaggggtacctaggcctgcaggatcgctactttgagctggtgacctgcctccatctcgcaatcattggcctcttcgccttcctcttcttcctcgccatcaagcacctcaatttccagcgcaggaatacgagtaggttcaaggggattttgcaaaatgtgtaatgattaagattcagaaaatggaaatgtgttgtttgccattgtttcagtttttgaatcttcagagatggatggaatggaactgctgcaatcctcagctctgtgtgatgtttttatgggcaagacataccatactgatgctcgatttcttcatatttccctggctgtattaagtgattggcagcgatcatagtagcaggacctcgtgtgtaaggctgtcttcaacaagcgatctatacggtgctctgaaccgaaaatgggctgtaacacaccagttgcaggcctccaacagcagaccgaaacagaagacccaaatatagagcag

SEQ ID NO: 3541 - DNA, 5408 bp, Zea Mays
atggagctcgccggcgtcggcggcctcgaggacgaggactggtacgatgtgggcacgacgacggcgccggccgcgacgaagccgccgccgctcacccacgacgacaaccgcggcttcctccggatgcttcgcgagaagaaagagagatatgagttgcaaagtccggccctgatgaactggctggcatggtcggagcgcaggctgggcgtggaggcgcacaaggtggaggtgcggttcgagaggctcgccgtggaggcggacgtccgcgtcggcagccgcgccgtcccgacgctgctcaactccgccgtcaacgccgcccaggaattagcgacgtctgtccatatgtgtgttaccaggaaaagacctatgagaatcataaacgaagtaagcggggtcatccggccgtcaaggatgacgctccttctgggagcgcctggatcaggcaagacgactcttctaaaagcgttggcaggaaaactggattcttctttgaagttcaagggaaaagtcatgtacaatggagaagaaatgaatcactcaacaccgcagtacctgcgtgcttatgttagccagtatgatctccatcatgctgagatgacagtgagggagacaatcaacttctcttctaagatgttcggaaccaataacgaattcgagatgctaggagaagcaataagaagaaaaaagggtgtcatcaataaagtggaccaagatcttgattcgttcattaagaggccaccacctttggagaaggaagcaacctcacaacaaactacattatcaagatacttggcctgtctgagtgtgctgataccctagtaggagacgagatgaggagaggaatatctggagggcaaaagaaaagagccacaattggggagatgctggttggtctagcaaggtgcttctttatggatgatatatcaacaggtctagatagctccacgacatttgagatcatgaagtttctccaacagatggcccatttgatggatctcacaatggttatttccttgctgcaaccacctcctgagacattggaattatttgacgacattatacttttatgtgaggggcaaattgtgtatcatggtcctcgagaaaatgctacggacttctttgaaagtatgggattcaaatgccctgacagaaagaatgtagccgatttccttcaagaggtaacctctaagatggaccaaaagcaatactgggctggtgatcaaaacaagtatcagtaccatacaattgaaaattttgcacaatccttcaggacgtcctatctccctcttctagtagaagacaaacagtgcagttcaaacaatactggaaagaaaaaggtggtaaaagtgaatgcaagtcgccgaatatccagatggaatattttcaaagcatgcttttcaagggaagtactgctgctgaaaagaaactctccagtccatatattcaagaccattcagataactgttatggctttggtgatctccacacttttcctgagaacaaaaatgagtcacgattctgtacttgatgccaacaagtacatgggagcactttttatggctgtggtcatagtaaacttcaatggaatgactgaaattgcaatgacaataaagcggcttcccaccttctacaagcaaagagagctactagcattgccaggatgggcactcctttgttcagtttaccttattagcataccaatatcgcttcttgagacaggcctttggacatgcttaacctactatgtgattggatatgcaccttccattatcaggtactcatctcttggtacttatatgctgaatgacctctggtgcttcaatagacggaagtaagaaaatgatctccattgcttatggcaggttcttccagcactttctggtacttttttccatgcatcaaatgtcaatgggcctgtatcgcttcttagcggccataggaaggacgcaagtgatggccaacatgctagggactgcagctcttattgcaatatacatacttggaggattcgtcatatcaaaaggttaggtgaatgtagcttagcatacaccatgaaacatgagtacacgacatacactctaataaaaattctgtgcaacaagttgctaacaaattctgcacactgaaacagatgatctccaaccatggttgcgctggggatattggacgtccccattcacctatgcacagaatgcaatcgccctcaatgagttccatgacaaaagatgggctacggaattttattataataatgcaaacaccgtcggtgaagctatcctcatgatcagagggctgctcacagagtggcactgctccacacaaacatcaacttaacatcaagaccacaaaagcgaatttcgtgaaccaccggcagatggctgaaaatggcaattcatcaaatgatcaagctatcctcccatttcgacccctctcccttgtctttgatcatatccactattttgttgacatgcctaaggagatcgcaaacaatggagcaacggagaaaaagcttcagctgctgcaagatgtcagtggtgcttttagaccaggagtactaacagctctgatgggaataactggcgctggaaagacaacattgcttgatgtattagctggaaggaaaactgggggatatattgaagggactattaagatagcaggctaccctaagaagcaggagacgttctcaaggatatcaggttactgtgaacagagtgacattcactcccctaatcttactgttcatgagtcactgaaattttctgcatggcttcgtctgccttcaaatgttaaacctcatcaaagagatgtatgtgtttcaaccttacccctctttatcattggagtatggagcctagttcctgacacaatttattttcaaatgcatttcagatgttcattgaagaagtcatgagccttgttgagctcactgacttaaagaatgccatggtaggcatcccaggagcaactggcctgtcagccgagcagcgtaaaagactaacaatagctgtggagctggtggctagtccctccattatattcatggatgagccaaccaccggcttggatgctcgtgctgcagcaatcgtcatgagaacagtacgaaagacggtagacactggacgaactgttgtctgcacaattcatcagccaagcatcgagatatttgaatcttttgatgaggtatgaacaagttcagatggtatagccatataggtagacaaaaatatagccacaccaagcaattgagaaacatgaatacatgattagtccagtgctggagtggtgtcaaagtaattacataagtaaaacaaacatgattcttgacaaacaaattgaagtgtatagaagtatgcataaagttgtaaaatgcagtcgaaacctaaagtagaaaacgatcaaagaactacatgataaactggtccttcttttattaaagtaggcataggcactacaaaatagccattctgaattttaagttcaatttgcgtttttaagtgcatggaaaacagctattcatgtgcccgaaacttgattgtggttttattgggtttttaactctagcctacccccaacttggttgggataaaaggctcggttgttgttgttattgagttttaagttcaatttggccaattgcagcttctgctcatgaaaagaggtggtcagcttatatacagtggttcactaggtccactctctagcaacatgataaagtatttcgaggtaagattgcctaagatggacatttatatttgtaagatacatagagaagaaataatgaattactctgtaacaggccataccaggcgttcctaaaataaacaagggccaaaacccagcagcatgggtgttagacatcagttcacacataacagaatatgaaattggagtggactatgcagaaatttatcgcaactcctccctgtacaggtacacccagtagtacaaccgtaaagctgcaataactttattttagctggtataaacaataaggtggaagtcaatctaatggaatttttggtggcacctgcagggagaacaggcttctaattgatgaattggaacaaccagaaccaaacacagatgatctgcattttcctcagggttactggcaaaactttacgacacaatgtgcggcatgcttgtggaagcaaaattgtgcatactggaaaaactcagaacacaatgttgtccggttcataaacacttttgctgtttcaatcatgtttggagttgtattctggaaaattggctcgaacatgtaagtggattataattacctttcatgaatatttcaaattaatttttatgcccccaatcaagatctaacacagatatcatgtgcaacagcaaggttgagcaagatgtattcaacatacttggaatcgtatatgggtcagcattgttcctgggtttcatgaactgcagcatcctacagccagtggtggcaatggagagagttgtgctctaccgtgaaaaggcggcaggcatgtactccaccatggcatacgctatcgctcaggtggcggtggaattaccttacatgttggtgcaagtgctgatcttctcatcgattgtgtacccgatgattgggttccagctgtctgcggccaagttcttctggttcttcctatacctggtgatgagcttcatgtactacactctgtacgggatgatgacggtggccctgacccccaacatcgagatcgccatggggctgtcgttcctcatcttcatcttctggaacgtcttctctggcttcatcatcgcgagagagctgatgcccgtgtggtggcggtgggtgtactgggccgatccagcggcatggacagtttacgggctgatgttctcacagctcgcagaccggacggagcagatcctggtgccagggctcggggtgcagacggtgcgtgagttcctggaggggtacctaggcctgcaggatcgctactttgagctggtgacctgcctccatctcgcaatcattggcctcttcgccttcctcttcttcctcgccatcaagcacctcaatttccagcgcaggaatacgagtaggttcaaggggattttgcaaaatgtgtaatgattaagattcagaaaatggaaatgtgttgtttgccattgtttcagtttttgaatcttcagagatggatggaatggaactgctgcaatcctcagctctgtgtgatgtttttatgggcaagacataccatactgatgctcgatttcttcatatttccctggctgtattaagtgattggcagcgatcatagtagcaggacctcgtgtgtaaggctgtcttcaacaagcgatctatacggtgctctgaaccgaaaatgggctgtaacacaccagttgcaggcctccaacagcagaccgaaacagaagacccaaatatagagcag

SEQ ID NO: 3542 - DNA, 1605 bp, Zea Mays
atggggaagaaaagaacatcgcgggcggggccgaccgaccggacgagtgaggaagcatccgggccggatggcgcaccgtgttccgtgcacgagcaaaatgctaatccaacaggcaggcgggcccctgcccccgccccgctctcctgctctgttcgcctcgctagtggcgacctcatggctgaacagcgacgtggaatattcgcagggccccacgtcaccagcatcctcggccccaccaggaccgggtccctacggcgggaagagcggaggggcacggcacggcacgcgggggccaacgaggccccaccaccagccacccaacacgtgtccgggccggtgcccaccagccgcgacgcgagcgggtccaggaccccacacctaccgccgcgcctgccggagccccaccacgcggcggcaacgaggaggggcccccctccgcccaccagtcacgtgacgggcagctcgtggctgcctggctgtccccacacgccacaccccaccccaccccagccgctggtgcgctcgcgcacggtccgcgagggcgcgcgctttgacccaccaccacatcgctttgcgtccggggcccgcgccacgaaccaccggctccgggccccaccgccggagcctaagaaaagcaacccactccgccggacccacctccggccgtgtgcgttaaattttgccaccacgtacgcacgtgctcgccgctccgcctcgcctccatccctagcacactagcaggattagcagagtacgctaaacccatccctcctcactctcctcatcaggagggctcaagctcaccaaacaaaaatggcgacacagtaaaaaaaagaattatattagcaaaaggtcgtcaattaattaactcaataacaaatcagctgctcgttttgatttgcattacacgctgcttctacagttccactacctctttcatcatcttcttctctctaccactaacactgggggtcactgaactgaacgtgagctacgacagaaagcatcatgtagttcatcataaggaggattgcgaaaggggggaaaacgagggggagcgattaaattagagcaaaaggaacctaagctttggggttggactttctgggcgtacggtggtgcgttactcttctgggctggagtcggacaccggctcgtcgtcgtcgtcgtcgtcttcttcctcctccggatggttgacgtcgctgcgaccgccgcgctgctgctcgtgggacccggaccccaggtgcagatgctccgagttgctgttgtgagacaagctagagatgggctgctggccctggaagtcggcgacgttcaccgccgcggggaacacggcggcctgcgcgccgccgaggttgatgagctgcggcgcgggctggatggcccagaattgcgtgggctgggcggccgcggcgccaggctggggcaccatccacacggcggtggcctgcggaatcatgcggttgcccccccccggggctgccggccgcagggaccgcgaagaccgggacgagcccttgaggggcgcccgacgcggcgatgggggcgaggccgctcggcaccgagatggccgctccaccggtggccctgcaggagcgggtcggc

SEQ ID NO: 3543 - DNA, 84 bp, Zea Mays
tttcttgtaaccgcgctcggtgacggtggctccctcgtccctctccttccgcgtgcgagcgcggaggtggggctcgcgtcggac

SEQ ID NO: 3544 - DNA, 634 bp, Zea Mays
tctaatgttagttattcaattcgaacgactaaccttaggcaaagtgtggtatatttagccacaaaccaaacatgccaggcgggaagcgagccaaggccaggtccaggccaaaaaatctcacgcttcgcctgacgcctgctcctggtcgttacagatagagacggataagcatgacagcgcaggccgcgcggcgtggactccatgcctgcaaggggacaatagagatgccgtctgcgtccgcggcggcatcggcgccggcgtcaccccccgctataaatccgtcgcacccgcccacccacctgccgtgccagtgctctcatctgcgtacacggtctccctcttcctgtcagtagtagagtgagagtgaggcagcgagtaggagacaaggggaaatggggaagggagcgcaagggagcgatgcggcggcggcgggcggcgaggtggaggagaacatggcggcgtggctggttgccaagaacaccctcaagatcatgcccttcaagctcccgcccgtcggaaacatcagtgcatcttttccaagatcctaactactccagcacaagggaacccactcattcaataggctagcagaatattaaccgtgctaatgctacggttccgaagagcggggaag

SEQ ID NO: 3545 - DNA, 1546 bp, Zea Mays
cgcggttccatatcccattcatatcctccccgcggcgcgcggccgcgccagcaccacccagcaaccagatgcgcagccgacccgccagtatggcagcggggcccaccccatccgccgcggcggcgtcgttgcggccgccgccgccgtgtttcgactaccgggcggccgtgctcgccgacacgcgcgccgccgccgcagggaaccctgcgctggcggggctgatcgagtccggtgcgctcgtgcgcgtcccgcggcggcggttcggcccggtcccggcgtggcgcccgccagacttcgtggagcctgaggatgtgtggatcctcggcacctcgcacctctcccgggactccgtcgccgacgtggagcgcgtcctccgcgccgtccaacccgacaatgtcgtcgtcgagctctgccggagcagagctggaatcatgtacgcgtccagtgattcttccgacgagccgcttttgaagtccaacatgttctctctcggtggctccaagttcttcggcgcagtcagtagaagcatcaacctgggtgggcagagcgctcttgctctgcgtctgctcctcgctgttttttcgtctaaaattgcttccagtgcgaaccggccgtttggagaagagttccgggcagctaggagggtgtctgaagatattggagctcagcttgttcttggggatcgccccattgaaataactcttgaacgagcatggaaatcccttacatgggatcaaaaggcaaagctactaatctcactgttccgcggaattacttctaagactcacacgccggatgagaaagccgccgtcagcccatacgagttgtacgagaaactgagcacatcttaccctgcactgttgcagcctctcatacatgagcgcgacatgttcctcgcatggtcgctgaagaggagcaaggctgtgaacaagagcagaactgtcgtcggagttgtagggaaggggcacatcaatggcatcgtgtacgcgctgatctctgaccagggggatctgaggttccgagaccttgttggtagagcatcatctgatacatgggtcagctcactcgtcaagggcctggtaagggacactgtaattggtctggtcctttgggctctgtatgaacagctgcaggctgtgctgtagagtagatggttcagacttccacaaggcacacaaactcggtactgttctcaacttcttacaagctgaaacagtggaactgaaatccgataccagcggaaatctaaaacttgttcgaagtgcctgtacatgaacttgatactgtccctgttcttcacaaggttgattacttgattaaagtacctgtacatgaactgtcaactgctgttttatcttctgaatacatctacattggacaacaaaacactacctgtatttttctacttttttgccatttcatatttgggtaaagcaaaaaaaaaagatgcattatgtgtagcacactttatatttgtatatatatgccgggcgaaaagcaatagattttgagaaaactgtgatagaatttcctctgaaacctgaat

SEQ ID NO: 3546 - DNA, 1788 bp, Zea Mays
gcggccgcgccagcaccacccagcaaccagatgcgcagccgacccgccagtatggcagcggggcccaccccatccgccgcggcggcgtcgttgcggccgccgccgccgtgtttcgactaccgggcggccgtgctcgccgacacgcgcgccgccgccgcagggaaccctgcgctggcggggctgatcgagtccggtgcgctcgtgcgcgtcccgcggcggcggttcggcccggtcccggcgtggcgcccgccagacttcgtggagcctgaggatgtgtggatcctcggcacctcgcacctctcccgggactccgtcgccgacgtggagcgcgtcctccgcgccgtccaacccgacaatgtcgtcgtcgagctctgccggagcagagctggaatcatgtacgcgtccagtgattcttccgacgagccgcttttgaagtccaacatgttctctctcggtggctccaagttcttcggcgcagtcagtagaagcatcaacctgggtgggcagagcgctcttgctctgcgtctgctcctcgctgttttttcgtctaaaattgcttccagtgcgaaccggccgtttggagaagagttccgggcagctaggagggtgtctgaagatattggagctcagcttgttcttggggatcgccccattgaaataactgtatgtggcttattatctacacaatggttttcttcaattgcagatttgtgcactgaacttgcattgctaactctgtaaagtactctactccctccgttccaaatcatatggcattttgacttttctagatacgttacttttattatctatctagacatactgtgtatctaaatacatagcaaaagctacgagtctagaaaaacaaaatatcttataattggaaatggggagtacaactgataaaatagctgaagctcatgtcagattgttcattcagcttgaacgagcatggaaatcccttacatgggatcaaaaggcaaagctactaatctcactgttccgcggaattacttctaagactcacacgccgcaggatgagaaagccgccgtcagcccatacgagttgtacgagaaactgagcacatcttaccctgcactgttgcagcctctcatacatgagcgcgacatgttcctcgcatggtcgctgaagaggagcaaggctgtgaacaagagcagaactgtcgtcggagttgtagggaaggggcacatcaatggcatcgtgtacgcgctgatctctgaccagggggatctgaggttccgagaccttgttggtagagcatcatctgatacatgggtcagctcactcgtcaagggcctggtaagggacactgtaattggtctggtcctttgggctctgtatgaacagctgcaggctgtgctgtagagtagatggttcagacttccacaaggcacacaaactcggtactgttctcaacttcttacaagctgaaacagtggaactgaaatccgataccagcggaaatctaaaacttgttcgaagtgcctgtacatgaacttgatactgtccctgttcttcacaaggttgattacttgattaaagtacctgtacatgaactgtcaactgctgttttatcttctgaatacatctacattggacaacaaaacactacctgtatttttctacttttttgccatttcatatttgggtaaagcaaaaaaaaaagatgcattatgtgtagcacactttatatttgtatatatatgccgggcgaaaagcaatagattttgagaaaactgtgatagaatttcctctgaaacctgaat

SEQ ID NO: 3547 - DNA, 1524 bp, Zea Mays
gcggccgcgccagcaccacccagcaaccagatgcgcagccgacccgccagtatggcagcggggcccaccccatccgccgcggcggcgtcgttgcggccgccgccgccgtgtttcgactaccgggcggccgtgctcgccgacacgcgcgccgccgccgcagggaaccctgcgctggcggggctgatcgagtccggtgcgctcgtgcgcgtcccgcggcggcggttcggcccggtcccggcgtggcgcccgccagacttcgtggagcctgaggatgtgtggatcctcggcacctcgcacctctcccgggactccgtcgccgacgtggagcgcgtcctccgcgccgtccaacccgacaatgtcgtcgtcgagctctgccggagcagagctggaatcatgtacgcgtccagtgattcttccgacgagccgcttttgaagtccaacatgttctctctcggtggctccaagttcttcggcgcagtcagtagaagcatcaacctgggtgggcagagcgctcttgctctgcgtctgctcctcgctgttttttcgtctaaaattgcttccagtgcgaaccggccgtttggagaagagttccgggcagctaggagggtgtctgaagatattggagctcagcttgttcttggggatcgccccattgaaataactattgttcattcagcttgaacgagcatggaaatcccttacatgggatcaaaaggcaaagctactaatctcactgttccgcggaattacttctaagactcacacgccgcaggatgagaaagccgccgtcagcccatacgagttgtacgagaaactgagcacatcttaccctgcactgttgcagcctctcatacatgagcgcgacatgttcctcgcatggtcgctgaagaggagcaaggctgtgaacaagagcagaactgtcgtcggagttgtagggaaggggcacatcaatggcatcgtgtacgcgctgatctctgaccagggggatctgaggttccgagaccttgttggtagagcatcatctgatacatgggtcagctcactcgtcaagggcctggtaagggacactgtaattggtctggtcctttgggctctgtatgaacagctgcaggctgtgctgtagagtagatggttcagacttccacaaggcacacaaactcggtactgttctcaacttcttacaagctgaaacagtggaactgaaatccgataccagcggaaatctaaaacttgttcgaagtgcctgtacatgaacttgatactgtccctgttcttcacaaggttgattacttgattaaagtacctgtacatgaactgtcaactgctgttttatcttctgaatacatctacattggacaacaaaacactacctgtatttttctacttttttgccatttcatatttgggtaaagcaaaaaaaaaagatgcattatgtgtagcacactttatatttgtatatatatgccgggcgaaaagcaatagattttgagaaaactgtgatagaatttcctctgaaacctgaat

SEQ ID NO: 3548 - DNA, 1525 bp, Zea Mays
gcggccgcgccagcaccacccagcaaccagatgcgcagccgacccgccagtatggcagcggggcccaccccatccgccgcggcggcgtcgttgcggccgccgccgccgtgtttcgactaccgggcggccgtgctcgccgacacgcgcgccgccgccgcagggaaccctgcgctggcggggctgatcgagtccggtgcgctcgtgcgcgtcccgcggcggcggttcggcccggtcccggcgtggcgcccgccagacttcgtggagcctgaggatgtgtggatcctcggcacctcgcacctctcccgggactccgtcgccgacgtggagcgcgtcctccgcgccgtccaacccgacaatgtcgtcgtcgagctctgccggagcagagccctcacttcagagctggaatcatgtacgcgtccagtgattcttccgacgagccgcttttgaagtccaacatgttctctctcggtggctccaagttcttcggcgcagtcagtagaagcatcaacctgggtgggcagagcgctcttgctctgcgtctgctcctcgctgttttttcgtctaaaattgcttccagtgcgaaccggccgtttggagaagagttccgggcagctaggagggtgtctgaagatattggagctcagcttgttcttggggatcgccccattgaaataactcttgaacgagcatggaaatcccttacatgggatcaaaaggcaaagctactaatctcactgttccgcggaattacttctaagactcacacgccgcaggatgagaaagccgccgtcagcccatacgagttgtacgagaaactgagcacatcttaccctgcactgttgcagcctctcatacatgagcgcgacatgttcctcgcatggtcgctgaagaggagcaaggctgtgaacaagagcagaactgtcgtcggagttgtagggaaggggcacatcaatggcatcgtgtacgcgctgatctctgaccagggggatctgaggttccgagaccttgttggtagagcatcatctgatacatgggtcagctcactcgtcaagggcctggtaagggacactgtaattggtctggtcctttgggctctgtatgaacagctgcaggctgtgctgtagagtagatggttcagacttccacaaggcacacaaactcggtactgttctcaacttcttacaagctgaaacagtggaactgaaatccgataccagcggaaatctaaaacttgttcgaagtgcctgtacatgaacttgatactgtccctgttcttcacaaggttgattacttgattaaagtacctgtacatgaactgtcaactgctgttttatcttctgaatacatctacattggacaacaaaacactacctgtatttttctacttttttgccatttcatatttgggtaaagcaaaaaaaaaagatgcattatgtgtagcacactttatatttgtatatatatgccgggcgaaaagcaatagattttgagaaaactgtgatagaatttcctctgaaacctgaat

SEQ ID NO: 3549 - DNA, 1051 bp, Zea Mays
cttcaattgcagatttgtgcactgaacttgcattgctaactctcttgaacgagcatggaaatcccttacatgggatcaaaaggcaaagctactaatctcactgttccgcggaattacttctaagactcacacgccggtgagtacctgtattcattttgtcagtcctcagttgtaattgcccgaaagaaaatgctgacaggtctttttagtacaaggatgtatcatgaaccaaatgccggagaaaccattttttactgccgttgtctgctgacatccttgttcgattaccattgtagcaggatgagaaagccgccgtcagcccatacgagttgtacgagaaactgagcacatcttaccctgcactgttgcagcctctcatacatgagcgcgacatgttcctcgcatggtcgctgaagaggagcaaggctgtgaacaagagcagaactgtcgtcggagttgtagggaaggggcacatcaatggcatcgtgtacgcgctgatctctgaccagggggatctgaggttccgagaccttgttggtagagcatcatctgatacatgggtcagctcactcgtcaagggcctggtaagggacactgtaattggtctggtcctttgggctctgtatgaacagctgcaggctgtgctgtagagtagatggttcagacttccacaaggcacacaaactcggtactgttctcaacttcttacaagctgaaacagtggaactgaaatccgataccagcggaaatctaaaacttgttcgaagtgcctgtacatgaacttgatactgtccctgttcttcacaaggttgattacttgattaaagtacctgtacatgaactgtcaactgctgttttatcttctgaatacatctacattggacaacaaaacactacctgtatttttctacttttttgccatttcatatttgggtaaagcaaaaaaaaaagatgcattatgtgtagcacactttatatttgtatatatatgccgggcgaaaagcaatagattttgagaaaactgtgatagaatttcctctgaaacctgaat

SEQ ID NO: 3550 - DNA, 1838 bp, Zea Mays
ccgccccgcagccagccgtcccgccccgcaatccccgccccgccccgcaatccccgcccgcaatccgctggtaggtgctcgccgatggaaggttatcaggtccgctgccgctggaaggtgcccgccccgcagcagagaatggaaggtcctcacgcccgcacgctcgctggaaggtccttgattgagctgataatggaaggtcaccgtacacggatggaggacgcggatggaaggtccgtggccaaatccgatttgccccctcgcccgcgagatgccgccgcccaccgtgcccgcgattccgccccaatcacctctggttctcaagtatggggaggaagggaaggtggtggagcgagtgaacctcgccactcggcagctgcgcctactgccgaagcccgttgtccggatctgcggtctcctcgcgctcgacgtctcccgcgaccagctaaaggcgatagtcgagcgcgccggagcaggcagcaggccaacaacccagcagatgggggaagtagcatcaaggagggtcgcgcaccgtcgtcgacgacccgcttcttccccgatgcggaggctgcggggcaactacgaccccgtggagatggcgcgcatggccgccagcgctgcggcagccgtgcgccactcggccaagaagcgccccaaaatgagccagatcgtgagggcactcgagggggacatctcgctggaggacctcaacgacaacgagggggtgcggcctgggcagagcatggcgttcggcacggctgccgcggctgcgacctcgtacaaggccaaagctcccggaccgtacacgcacggcgtggagcggatcaggcaggcgcccacggtgtacagcggcgcggtgggccgtccctctacgatcggcaactacggcgatgagtcccgtgaaaccgcaccagtagcaggccggaagcagcagcagctgagttgctaccgtattagacacattcccatgtcacctactgatgtgtacatcacaacaaacatgtgtagttacaataagaaaataggtgtagccttgagaagtgacatcaaaggttcctgcaatagtggcatggacgaccagttcctgggtgaagctgtttcgagcaacaacgacatcgaagatagtggttgactggtaaatcagttgcagaaaaaagctgaagattacagaaatagtttgcaacaagaagcacaagcaaaagctcaagcattacactttgaagatgaattagctagaaaaagaatgccggtaacagccagagatatgcacagccgatacattcctcagcaagatcccttctcagagggactctacacgttcgatattgggcagaatgaccttgctggtgagttctattcaagaacagaggaccaggtcatcgtttccattccaactattttgctggaatttgagaatggtctcaagaaactgtatgaccaaggtgctaggaagttctggattcacaacacaggccccctcggctgcttgcctcaaaacattgccctgttcggcaaagacccatcccaactggacgagctccactggttcgagcacgccactcacgcatgctgtggatacggaggcccacccctgaactacgatggtaatgtaccatgtggacacacagtgtctctggatggtaagatggtcaccgcaaaaggtgcagcgacactactgaattcgtcaactgggatgggatacattacacggaagctgcgaatttccatatcgcgtcgcagatcgtcgcagatcctgaccgggaagtattctgatcctccgttcgtggataagatgttgttcgtcataaaacctagattctgattagcatatgattttc

SEQ ID NO: 3551 - DNA, 839 bp, Zea Mays
atcaacaggttgaagctggcgctgtcgttgttgctgttttggccttggcacaattggacttgcagcaagtggatatgattttgacttctgagtttctcttttaggttgctgagggttgaaaagatgttggtgcttctcgaattattggcattgacatcgacaataaaaagtttgacgttgtgacatcaaaggttcctgcaatagtggcatggacgaccagttcctgggtgaagctgtttcgagcaacaacgacatcgaaggagatatgcacagccgatacattcctcagcaagatcccttctcagagggactctacacgttcgatattgggcagaatgaccttgctggtgagttctattcaagaacagaggaccaggtcatcgtttccattccaactattttgctggaatttgagaatggtctcaagaaactgtatgaccaaggtgctaggaagttctggattcacaacacaggccccctcggctgcttgcctcaaaacattgccctgttcggcaaagacccatcccaactggacgagctccactggttcgagcacgccactcacgcatgctgtggatacggaggcccacccctgaactacgatggtaatgtaccatgtggacacacagtgtctctggatggtaagatggtcaccgcaaaaggtgcagcgacactactgaattcgtcaactgggatgggatacattacacggaagctgcgaatttccatatcgcgtcgcagatcgtcgcagatcctgaccgggaagtattctgatcctccgttcgtggataagatgttgttcgtcataaaacctagattctgattagcatatgattttc

SEQ ID NO: 3552 - DNA, 1073 bp, Zea Mays
cggcaggctcccccctatcttcaacaccgcagccgctcgctcccctcttctcctggtcctcgtgcgcgcgcgcgagacagagagaggcgagtggcaatggcgagctctggcagctgccactcgctcctctcttcagcctcaccaatctcgcctgcgctcttctcgcgacaccgagcggccgccgtcggtggaggagccagccgggcgagtaaagtgcaatcgcaggtcaggtgtcttgctagagatgaggattcgaaggggtgcgcaaacgtttccaaggccgagactaatgaagaaaaagaaactacgccttcatcaagacgaagatgtctggtctgtctcggcgctgttaccttgatcagcgcgacaggaccaccaaacggactcgctgcggatgcgatgaacaaggccggggtacagaaagctgtttgcaggaactgtaatggcagtggtgctgtgatatgtaagggtctcgtggcgcttgttcacttcgtcagctccaaactcctggacctactactaccaatagggatgtaccttcagtaggaaatggaagctaatataaccaacagctttgttcattggaatgtctaaaagcctgcagtataatgccatgtatatatacagaaatagtgtctatgaataattcgatttcatctgtgttcaggcgacatgtgtggtggcacagggaaatggaaggccctcaatcggaagagggcgaaagatgtttatgaattcaccgagtgcccgaattgctacggccgcggaaagttggtgtgccctgtctgtctcggaactggcctgccaaacaacaaggggctcctgcgacgcccagaagccaagcagctgctcgacaagatgtataacggcaagatactgccgaggtcgtagagcactctttaccacgcccaggattttgttgagtcgtcgagtaggaatgacgctcggatcgatgtagccctagtagagtgtaaaattgctgttagccgttcaagaaagattttttacacatacatgtactgacccttttttttaccaaaaagtcaaagcaagattgatgtggtcgtccaacg

SEQ ID NO: 3553 - DNA, 2207 bp, Zea Mays
ctcccaaaccccaacccccctttcccgccacaccatctcctcgccgcttcccgccacctctctcccatggcggcgccgtcggcggccacgcgcaggaaactgcagcgcaagttccgcctgcgaggcttcaccctcaaggtggacgccctcgaggaggccgccgccttcctcgaccgcttccccgacgccgaggacgacgcgctcgatctcctcctcgacgagctcgacaaggaaccgctgcagtcgtcgatactggaccgggacgcggtcaggcgcgtggtggcgctgcttgtcgaggccgaggaggcgctcgatgtggcgtcgccagcggccacaagcgcaaggtctgcgctgcgggtggtggacgcgttcctcgtgccgcggttccactacgatccaatcaagaaagtattttacgagcacacaggcagattagctgtccatggagaagctggagataaagcttccctttatagggataggtatcaagtgctgctgcagagactgtctcgtgataaatatttctctaagccggcttttgacacagttgcgaccgaacactgtagttgcgagataacttctgtacagtcgctaattgggtgcactgggcggagatggattatgggggtcatttcgcagttggaggagcgacagttctacttggaggatcttactggagcagttccaattgacttatctaatgccaaaatcacgtcaggtttttttgttgaaaatactgtaatcgtagccgaaggtgagctgctttcaaatggcattttccaggtaaatacatgtggatttcctcccctggaggacagagaagcgtcagtctcattgctcatgggttttgatttctttgggggaggtgtaataccaactgaagaaacactaaggttatcatcactggaaaaaaaggctgtgaatgatatgtttgtcattctttcggatgtgtggctggacaatcctgagagaagactatggagaagttggctgttgttcttgacgggtatgatagtgtggaagttgtgccttccctctttgttttaatgggcaatttctgctcccggccttgcaatctagcgttcaattcatttgaagaactcagatttcagttcggaaagcttggcgagatgattgcagctcgatctagattaaaggaacatagtcgtttcttattcattcctggacctgatgatgcaggtccttctaaagccctcccaagatgtgcacttccaaaatatctaattgaagaacttcagaagcacataccaaattcaatcttcgtaagcaacccctgcagggtgaagttttacacacaagaaattgtgtttttccggcaagatctcctttacaggatgcggcggtcatgtctcattccaccaacaacggaagaaacaagtgacccttttgaacacctggtagcaactatcacccatcagagccatctttgtccattgcctcttactgttcaacctatcatatggaattatgatcattgccttcggttgtatccaactcctcacacgattgtattgggtgacaaaagcgagcagaaagccttcaaatatactgggatcacttgctttaatccaggttcgtttgcgaatgacagcaccttcgcagcatatcgtccttgcaccaaagaggttgagctttctgcgttggaaggctaataaagggagaataaactgaagttctccaatttgatgaagtgtaaagtcttcgacaaattaaagaactgccacttccacacaaggagccgtgaaaatagcatgactttcatgacgatgtggtgtttctgtgaagagaactgatgctgatatctcatcataggctcagcaaagcagtaggagcagcacattggtgtttgtgcagcatctctagctgtttgtaacaatctttaaatactgcacgttagaccagactattttacttgtactgtttagtttttcattgaatcatggtaacaactaacaagattactttctgacagtgctcataactgctctatcttaatattttgatcacccacctttccaattgttatatttggtagtctagatattgtaccttgtcatgtgttctatatttgatagtctacatagtgtcttgtatagtgtcatatgtattcatgggtcttatctcctatgttatgtattctatataaaccatctaaggactcaatacaatatattaatccttggcag

SEQ ID NO: 3554 - DNA, 2483 bp, Zea Mays
aacccccctttcccgccacaccatctcctcgccgcttcccgccacctctctcccatggcggcgccgtcggcggccacgcgcaggaaactgcagcgcaagttccgcctgcgaggcttcaccctcaaggtggacgccctcgaggaggccgccgccttcctcgaccgcttccccgacgccgaggacgacgcgctcgatctcctcctcgacgagctcgacaaggaaccgctgcagtcgtcgatactggaccgggacgcggtcaggcgcgtggtggcgctgcttgtcgaggccgaggaggcgctcgatgtggcgtcgccagcggccacaagcgcaaggtctgcgctgcgggtggtggacgcgttcctcgtgccgcggttccactacgatccaatcaagaaagtattttacgagcacacaggcagattagctgtccatggagaagctggagataaagcttccctttatagggataggtatcaagtgctgctgcagagactgtctcgtgataaatatttctctaagccggcttttgacacagttgcgaccgaacactgtagttgcgagataacttctgtacagtcgctaattgggtgcactgggcggagatggattatgggggtcatttcgcagttggaggagcgacagttctacttggaggatcttactggagcagttccaattgacttatctaatgccaaaatcacgtcaggtttttttgttgaaaatactgtaatcgtagccgaaggtgagctgctttcaaatggcattttccaggtaaatacatgtggatttcctcccctggaggacagagaagcgtcagtctcattgctcatgggttttgatttctttgggggaggtgtaataccaactgaagaaacactaaggttatcatcactggaaaaaaaggctgtgaatgatatgtttgtcattctttcggatgtgtggctggacaatcctgagactatggagaagttggctgttgttcttgacgggtatgatagtgtggaagttgtgccttccctctttgttttaatgggcaatttctgctcccggccttgcaatctagcgttcaattcatttgaagaactcagatttcagttcggaaagcttggcgagatgattgcagctcgatctagattaaaggaacatagtcgtttcttattcattcctggacctgatgatgcaggtactccaaaacttagtgacacactgagctgatagctgttcacatccacaagctcgatgcactcctatatccagatttgtaatctattttctatttaatatggagcttgttatggctattaacttggtccattcttttatatcctagtttaccatgctatttagaacattttctgtgatactaatagcagtaggactataaatgagcttcttcggacatattgctagttgtctccccggacagctgcaatgagatcgctttatatgtttttttacttgataacaaatatgcaggtccttctaaagccctcccaagatgtgcacttccaaaatatctaattgaagaacttcagaagcacataccaaattcaatcttcgtaagcaacccctgcagggtgaagttttacacacaagaaattgtgtttttccggcaagatctcctttacaggatgcggcggtcatgtctcattccaccaacaacggaagaaacaagtgacccttttgaacacctggtagcaactatcacccatcagagccatctttgtccattgcctcttactgttcaacctatcatatggaattatgatcattgccttcggttgtatccaactcctcacacgattgtattgggtgacaaaagcgagcagaaagccttcaaatatactgggatcacttgctttaatccaggttcgtttgcgaatgacagcaccttcgcagcatatcgtccttgcaccaaagaggttgagctttctgcgttggaaggctaataaagggagaataaactgaagttctccaatttgatgaagtgtaaagtcttcgacaaattaaagaactgccacttccacacaaggagccgtgaaaatagcatgactttcatgacgatgtggtgtttctgtgaagagaactgatgctgatatctcatcataggctcagcaaagcagtaggagcagcacattggtgtttgtgcagcatctctagctgtttgtaacaatctttaaatactgcacgttagaccagactattttacttgtactgtttagtttttcattgaatcatggtaacaactaacaagattactttctgacagtgctcataactgctctatcttaatattttgatcacccacctttccaattgttatatttggtagtctagatattgtaccttgtcatgtgttctatatttgatagtctacatagtgtcttgtatagtgtcatatgtattcatgggtcttatctcctatgttatgtattctatataaaccatctaaggactcaatacaatatattaatccttggcag

SEQ ID NO: 3555 - DNA, 2115 bp, Zea Mays
aacccccctttcccgccacaccatctcctcgccgcttcccgccacctctctcccatggcggcgccgtcggcggccacgcgcaggaaactgcagcgcaagttccgcctgcgaggcttcaccctcaaggtggacgccctcgaggaggccgccgccttcctcgaccgcttccccgacgccgaggacgacgcgctcgatctcctcctcgacgagctcgacaaggaaccgctgcagtcgtcgatactggaccgggacgcggtcaggcgcgtggtggcgctgcttgtcgaggccgaggaggcgctcgatgtggcgtcgccagcggccacaagcgcaaggcacacaggcagattagctgtccatggagaagctggagataaagcttccctttatagggataggtatcaagtgctgctgcagagactgtctcgtgataaatatttctctaagccggcttttgacacagttgcgaccgaacactgtagttgcgagataacttctgtacagtcgctaattgggtgcactgggcggagatggattatgggggtcatttcgcagttggaggagcgacagttctacttggaggatcttactggagcagttccaattgacttatctaatgccaaaatcacgtcaggtttttttgttgaaaatactgtaatcgtagccgaaggtgagctgctttcaaatggcattttccaggtaaatacatgtggatttcctcccctggaggacagagaagcgtcagtctcattgctcatgggttttgatttctttgggggaggtgtaataccaactgaagaaacactaaggttatcatcactggaaaaaaaggctgtgaatgatatgtttgtcattctttcggatgtgtggctggacaatcctgagactatggagaagttggctgttgttcttgacgggtatgatagtgtggaagttgtgccttccctctttgttttaatgggcaatttctgctcccggccttgcaatctagcgttcaattcatttgaagaactcagatttcagttcggaaagcttggcgagatgattgcagctcgatctagattaaaggaacatagtcgtttcttattcattcctggacctgatgatgcaggtccttctaaagccctcccaagatgtgcacttccaaaatatctaattgaagaacttcagaagcacataccaaattcaatcttcgtaagcaacccctgcagggtgaagttttacacacaagaaattgtgtttttccggcaagatctcctttacaggatgcggcggtcatgtctcattccaccaacaacggaagaaacaagtgacccttttgaacacctggtagcaactatcacccatcagagccatctttgtccattgcctcttactgttcaacctatcatatggaattatgatcattgccttcggttgtatccaactcctcacacgattgtattgggtgacaaaagcgagcagaaagccttcaaatatactgggatcacttgctttaatccaggttcgtttgcgaatgacagcaccttcgcagcatatcgtccttgcaccaaagaggttgagctttctgcgttggaaggctaataaagggagaataaactgaagttctccaatttgatgaagtgtaaagtcttcgacaaattaaagaactgccacttccacacaaggagccgtgaaaatagcatgactttcatgacgatgtggtgtttctgtgaagagaactgatgctgatatctcatcataggctcagcaaagcagtaggagcagcacattggtgtttgtgcagcatctctagctgtttgtaacaatctttaaatactgcacgttagaccagactattttacttgtactgtttagtttttcattgaatcatggtaacaactaacaagattactttctgacagtgctcataactgctctatcttaatattttgatcacccacctttccaattgttatatttggtagtctagatattgtaccttgtcatgtgttctatatttgatagtctacatagtgtcttgtatagtgtcatatgtattcatgggtcttatctcctatgttatgtattctatataaaccatctaaggactcaatacaatatattaatccttggcag

SEQ ID NO: 3556 - DNA, 2975 bp, Zea Mays
ccccacacaccctccctgcatgatgcaatcctaaagaaagctgctgaaacctaaagctggtagaaagctgcctcccctcccccctatggtgttgtctgtgtagcagcaaagccaaaaaaacaacactgctcctccaaagaccttttccaccctcactctctctctctcctctcccctctcctcgccctctctctctctctcaaattcattcctagctgtacccacatctctctcccccggcccttttgttttgtttattcacaactctcctccgtcctcgctctcatctggtccgcactccggaggagtgatttacctccccctccggcctccaatcttatatagagatgcctcaattccattgccccattcccatcgcagactgatctagcgagaaggagaggcacacaagtgacggcagtgccgtgcgcgcggcgccacccccaccacaccatgttgagttcttgcgcgccaacgacggcctttccgcccccagaggcgggggccgccgcgccaccggagccgttccggtctctgcagatcgccacgaccaccagcgccgccggggccaagaagaagcggcgtcccgccggcactcctgaccccgacgcggaggtggtgtcgctgtcgccgcggacgctgctggagtcggaccggtacgtgtgcgagatctgcgggcaggggttccagcgcgaccagaacctgcagatgcaccggcggcggcacaaggtgccgtggaagctgctgaagcgggaggccggggaggcggcgcggaagcgcgtgttcgtgtgcccggagccgagctgcctgcaccacgacccctcgcacgcgctgggcgacctcgtcggcatcaagaagcacttccgccgcaagcacagcggccaccgccagtgggcctgcgcccgctgctccaaggcctacgccgtccactccgactacaaggcccacctcaagacctgcggcacccgcggccacacctgcgactgcggccgcgtcttctcccgggtggagagctttatcgagcaccaggacacgtgcaacgccggccggacgcgggccgagacgtcgtcgtccccggctagtggtggtggctacggcggcggcaccggcgccgggttctgcgtggccgcagctgcctccacgtcccagcaacgtcacctgcatgccgccgccgccgcggcggcggcgttgtctcggacggcgtctagtgcgagcccatcaagcggcggcgagtttggggtgagccagcaggtcgcctgctggcctggtccggcgatggcgagccccacggccgccgcgacgttccacaggttcgaccaggctctgtcgcctccgacgccgcacgagcgtcctggaggcatccacaacctggagctccagctcatgccgccgcgcggcagcgccgccagctactacgagggggctgcaggtgcagctcctgcagctgccgtcaggtgctgcgcctcgccgcattattcgcctgctgtacatgttccgcagccgggcgccgacccgatgcggctgcagctgtcgatcgggttcggcggcggcgacggcgagacgtcggcgccggcagcggcggcgaggctgaaggaggaggcccgggagcagctgcggctggcgatggcggagaaggcggcggccgacgacgcccgggcgcaggcgcggcggcaggcggagctggccgagcaggagctggcggccgcccggcgcatgcggcagcaggcgcaggcggagctgggccgcgcgcacgcgctccgggaccacgccgtgcggcaggtggacgccacgctgctgcaggtcacctgctacagctgccgctgcaagttccgggcgcgtgtgactggcggcggcgccatgagctccgaggtggccagctacgtctcctccgttgtcacggccgagggcggcgacgccgaggtggacgacgacgacccgtaccgccaccaccggcagctcaccgccgacgacgacgcgccgagccacgctaggatgatggacatcaactagcggccggccggcgcccggccatctcgtactcgcatggacgagaggccgtgatggatggatcgtggatgtgcgatgtggtagcagctgcttggtggtggtctctgactagatgtggtgatagtgcagagtgctagtctagactctcacggccggcggccggcggggagtcatgcttgagcgcaaaagtgaagctagtagctaattacgacgtgcatggaatctttcgcttgtttgcttgctgttggactttcttacaataacatttgttcgatcgatccggactcagcaggagcattccggctgcagctggtgctgtcgaaaccgagaaagaatgcatgcatggcagctcttgtcacttcttgtcatcgtttcagctaaactaacatctcgatagatgcagttaggctacaagcctacaacagttttgctactgtgctaccggttttacgatttgtttttctggttacactatggcagcagggaagagggattggagttgggtagtaggggtaaaaggcatatatagttgacatgagaaggcatattttaagtgttaacgacaatgcatctccggggcattcacgatagtattgcatgtttttgtgtgcgttggggagtctatgtagcatctccaacaacgcgacctagaaaaatatcatataatttaaaaggagtatattttataaaatttagggcaccaacaaaacatcccgctccaacagtaaagtctcaaatctagattataggacaacccagtatatttgaggcacttaataggctgctctataattttttgaccaaattttatgaaatgaggcactgttggagtatttttttccctacgtatttcagtttgatgcactgatttgaggcattgttgaagatgctcttatagttatagaacattgcaagacaaggtgatttctcactaattttgcacaaggggaaaattcatgacatctgac

SEQ ID NO: 3557 - DNA, 953 bp, Zea Mays
tcccctcccccctatggtgttgtctgtgtagcagcaaagccaaaaaaacaacactgctcctccaaagaccttttccaccctcactctctctctctcctctcccctctcctcgccctctctctctctctcaaattcattcctagctgtacccacatctctctcccccggcccttttgttttgtttattcacaactctcctccgtcctcgctctcatctggtccgcactccggaggagtgatttacctccccctccggcctccaatcttatatagagatgcctcaattccattgccccattcccatcgcagactgatctagcgagaaggagaggcacacaagtgacggcagtgccgtgcgcgcggcgccacccccaccacaccatgttgagttcttgcgcgccaacgacggcctttccgcccccagaggcgggggccgccgcgccaccggagccgttccggtctctgcagatcgccacgaccaccagcgccgccggggccaagaagaagcggcgtcccgccggcactcctgaccccgacgcggaggtggtgtcgctgtcgccgcggacgctgctggagtcggaccggtacgtgtgcgagatctgcgggcaggggttccagcgcgaccagaacctgcagatgcaccggcggcggcacaaggtgccgtggaagctgctgaagcgggaggccggggaggcggcgcggaagcgcgtgttcgtgtgcccggagccgagctgcctgcaccacgacccctcgcacgcgctgggcgacctcgtcggcatcaagaagcacttccgccgcaagcacagcggccaccgccagtgggcctgcgcccgctgctccaaggcctacgccgtccactccgactacaaggcccacctcaagacctgcggcacccgcggccacacctgcgactgcggccgcgtcttctcccgagatttggcagaagaatgagg

SEQ ID NO: 3558 - DNA, 3920 bp, Zea Mays
gtgtaacacagatttagcttaaacagaaaccgctagtgattttaaaatgaggtaaacttaccaggccataaaagcaatgtcgtgtattgggatcaaagccaggcctggacggcgttagcccgtgctggacggcgtcagcacttaacttccgagagggaagcgccctctcggaagttaatcattaacttctgagaggcggacggccctctcggaagtttccttaacttccgagagcccgtcggaagttagcctaacttccgaccaatttgttccgacgggctaacttccgacggtttcggctaacttccgacggtttgtataacttctaagagttttgagctaacttcctacggtttaggccctaggaagttaagcattttggtgtagtgaggaagattgcgctgcaggcagatgtatgacaaatttttgtgctctctcttttcaaggacattggaatcagacaatatttcttgaagaatacacacaacatatcggttagtaactaactatgattgagaataattttataaatctagtaaacaccttgataaactgccatccaagcgtgtgtttaagtctgaactgtatgtagtactaaagtttcgtatatagtacaaacacgaactgcgtgtttgcgtctctggagtaatgacattggagtcaattgcctctgatttctccttttgggctagagtcctaccctctacctcgaactccttcctcatcctctcctcctccgctgcttgagcaaagtcaacgcagcatgagaagacagctgaaactcgatgaggtgggcacagactgcagggaggaaaaccgaggcattgtatatggaggaatgccattgcatgagtgtgcacatattatggtcttgaatttttattaaatgaaatcatgcgatggaagattgaatttctaattttggcttcgaaataagttcggtacaggagtaatttagtattatgtccattttatgcaagattcatatttaatactttaatccataagaatttcgtataacatctgagattgctcatggtttcatacagataatggtatttatcattcatagatactatcttataaattttaaaccaatcaatgctcataacaaagcgcccactactccatatgtttagcaatgccctttcctagggacaaaaaagagtatccaagtgacactgcattgattcctaaaggcaccaaaaccatggatatgcttgcaatacctgatgaaagttgtacagagaagagcttcactttgtcatctaaggacacacatactcaagtgatggaagattgaatttctaattttggcttcgaaataagttcagtaaaagagtaatttagtaatgtgtccactttatgttagattcacatttaacactttaatccataagaattttgtataacatctgattgctcatggtttcatacagataaaggtatttatcattgacagatactatcttataaagtttaatccaatcaatacgcataacaaggcaaccactactccatatgtttagcaatgaataaattgaagcattgtaccatggagtgaataaatgagacaactgaagacaaccaatacacttgtgtcaaacatatgccgagcagtggaagggaaaacttatctaataagcgtccaacatatgtgctttctagtaacttcaccatagggtcgattgcttgcctaactatggccagtacggtcagattcatgagctccttcttaattccagaatcgacatggtcaagggatcaccgcacagaggccacacccttcgtgccaacggctcaacaaattgaggcaaaattgtttgttgggtagctgactggtggactgagatggatgattgcacaggttgcacaacctatgtgaagcataaattgctgtataaatactataaacaaagagtataatgcagtaaaggttataatgaagaaaagtgacctaatcaactcaagattaattactaccatagctgaaattgaatgttgcaaaatatgagaaaatgcatacttgtttttcaacttcaaaattcatttcataaaattgctgaactcgagcaagtgatttggcaaattcctaagttatatatggtgatttatcaaaaatggccccaaggcaactaagagcacaatacaagcagctttcccatatttggtcttgctatttgcaaacagaacaaacctcctggaccctgctaaatttttcctcatgtgaaactcctatatgtgaacttgtacagactgcagaagtcaagcttaagtcgatagtgcaatgtccatgtgttacgacagtatataaaatatttgataaaactgcatatcaattcatattccaatcatgtgacctacttcagccaaacacacacaataaaattatggaatattccatactgaaacctcatatcagaattgggtgcccactatgtacttcaaaattcgaattcacacctacaacaatacttaaactcttgtgcgttgtcatgaacaaaagctagcccatcaacaaaatgtgaaagagcaaagcaataggagagtaggcaacgattatcaattggatcagcagcaaactttccctcggcaatgaaagccttggccggtgatgcacctctttgaagcaaccaaatgatacctatgttagtcgtttacaaagcctaaggttccttttgacgttgatctctatatatagttggattgcaaagggaaggtaactgtcttcacctatcacaatgaaaaggtagtgaattaagaactgaatgaagtaatacataaacatagctacaatttttcagttagcaacaagaactaactaattgtatgaacaggaaggtacgtccagttgtaaggtttactatgtacagtttagtactatgagtagcatcacccattgaaattagctggagcatgagcaaagagcaggcaacaaagttaaagatatatgtactactaaatagtctagcaaaattggtttgacaaacttgaattgtacaaaactaacatatttaaacgcacaaagataagatgaacatatttaaaattatggtaccaaattaacaggttgatttaactgaaaatcgaatgagactgtgcagtttagtactatgacttaactgaaaatcgaatgaaacataacataccagttgtttggagaggatcggtaaacatgtaacctatgtctcagaaataaacttatttcagaaataaacctgtaacctaaccccagtgatcaacaacgcaaaacactaatgagccacccaatccacaatcaccaaggctaggcaacccaacccatcgcattcgaagctgccaccccacatcgagtacacacgtatcaacaaacaggaacaggctaaaacctcacgcaacccgaacaggttccaaaaagaacagcatactcaacacaggaaagaagtgtgcaggatgaaaaggtagtgaattacatggctgatggtgggcgccggatgtactcgcgtgtgtccgcttggtaaactcgtgtgtggcctccctttggccttttaattgtgctcggatcagatccatggatttttggaatcacttaaagatgcttcaaaaatccaagagcagatatgcttaagagtagtgtgtcagtttgtcagctaagcatacactatacagcaggccaacccttctatcattcaaaggacaaaattcttttcacataatttgcagctaaaaattagtgtttcaatacctacaccagaaattgattgccatatttcacacaagacacacggccaaggcgaataattgcatctgttaccgacaccaatcgccaaaaaacagcataatggacaagtaaacctacaaattggtcttactccaaggattccgcggccgcgccaactgtcaactaaccagtacggagattaaacagcaacgaacagtct

SEQ ID NO: 3559 - DNA, 3011 bp, Zea Mays
gtcagagtcacccatggtgaggaggagcttgtccgatcgatctgcgaggacgaatcgacaccgggtgtcctcgccaccggggtggaggcgcggtcgctagggttttgagcgagatgaccgcgaccgccgcgcgggggaggggtcgcgagattggggtggcgagggcaaggtcacggagcgagattggggtggatcggggggcgtgcacggaccgggggcagccgtcgggcagaaccgtgcaccgtatgattgtggacgtctacgttagtgtcttatgaagtagtatagatttatttgttgcttaaccaaattaatgtttatcaattggttatgaattgaaaaggcccttataaattctcaatggtttaaaaaattcttgaaacactattattgatgcttttagttctttattttattattattattattattattttcctgatacaaattttgggctttacaaatcctacccccttaacagaaatctcgtcctcgagatttgtaagaaaagggatacaataagtttggtctagaattttagtttctcatttggttttgggaattaaagttttggttaaagtttttttatggatatatatgtctagccatttattatgtcagatgaggtacggttatggcaagtataggttgtggcaaggaagagtataataaggaaagacttcatctagaactgtggatcttgattctgctggtgattcaacttgatctttgaagacttgagttgatccttatccttctttgacgtggttggtcttctttggtctttcttcttggagttgccatctgagttaaggacatatagttaggatagccggggtacacgaggtaggtaggtttgaacagagttttactttgcttttggaacaaatggattaggcaacctatgatgtgggttaggttgttgtttacggacgagttagtccaaggtattaatttaggataagatatgtttatagaattagggcttaatttttttgtcgccaacattatctaacttatttaagtaactcaatttggatcatgttagattaggtgggatctagatcagattgaaataggataaaatcttttcaagataagatgaatctactaagataagagagaatcttttaagaaaagatggatctattaagctagatacattttaattatgataagttaggatcttttgggatgagatggatctatgagtgtagaatagaatctttttagatgagatggatattgttaagctagatactttaatgagggataatctagtttgtatagttagttttataagcattatgtatatgcagatgtaattgtggacattactccacaactcatcacactcaatcaaagatccaaatcaaacaagtatcataagaacaaacattcaagtgtatagatacctacaaaaatagttttgtttttgttcctaagattagttctcctattcctaaaatcactttaggcacatgatttcaaagtgtgaaatccacttttgtctttggaagcagaaagataagagtaatcagagtagagcggaaatagatgagaaaagattaagaaaagtttagaaaagaatcagagtagcaaaggtaagtagacaatggttgtccagttctatctaggtttcgtcctacagtcaacattcctctgataccacttctgtcacacccgggttttatgggtccaaagcccgggcacgaacataatcactaggtgtgctaggaccaagtctcacacatatgatgaatcatggcacaggatcgaatgtcacaactttactatataataggagttctatacaaaataaataaataattacattataaggagacaacagtccagcaacccaaagttgactgggagacgacggcctagaccactcatgaactcatcacagcatcctccatgcgcctcatcctgtggttcctgttcttgacctgtggggggtggggtgtgagacagcaagagtgagctcacatacgttcatcgctcaacaagttgtggggaataatgtgcatgaactcgccaaaggtgggagctcacgtgaagtgtaaggcttaccaaagtggatggttagagctaagcattgattttaaagttggtcaaaattttattagcaattactaagtataagtaaataccaacctaattaagtagtagaacaaaagtaataacatcacatgcgatgcaatgcatatgacaaattgaatttagttccataagttaatcatgtgagggtccaagctgctcatgaccgtgagcacggctagtataccagttttacactctgtagaggttgcacatctttacccacaagtcatgttactcatctgccacggggttgtacgggccccatacacctctaccaaggaagcgaggcagggtaacactacgaggcctttacaaagttccactagcttcagaaaacccgctacagtttataggaagctccaatgcagggatcccttgcctgaccgccatcgcagcaaaatcaaccaaagacctccccacaatgaccactcccctactgcccttgcccctttcgggtaaggtagtcttccactagctttcctaattaatcagccaagggcgtctattaaacccttatggtagcactgttttcccgggtggtcgctccatgttccaattaacataatgatcttatcatgaacagtaacaactgataacaaaagtataatcatgaatgatgtgtatctcaatgcccaaaaccacatatagcactagcaagtactacccaaaaagttcagtggtaaacaaggcataaagatagacaaactagggtaccctattaggtcccatcaaaattaacctatgcagattattatgattaataagaacatgagtgggtaaaagaagtgatcaagggcacaacttgtctggcacttgagattccaggtaccaacttgctcttcaggtgactcgtgacctcacgctaaacgtagcaatacagacaaacatgtataggcaaaattaac

SEQ ID NO: 3560 - DNA, 1642 bp, Zea Mays
cgaaacccaccaccatcccagcaaacacaaatcgcgcacgctccccagtccccacactccccatccaatccgcgcacaccaagcccccaatctcggccgccactcgctgactagctgctccggcaacagtcccccccgaggtacgagggtgcgaccgcggcatggacacgctcccagaaggcgtcgtgcagcacatcctctcgcagctcagcaacgcccgcgacgtggccggctgcgccgccgtcgcccgctgctggcgcgactgtgtggccttccttccgtcgctctattttccgcggggcgcctttgaggccttggccggcggaccggcgtcggccgtggccttcgccgacgacgccatcggtcggatggtcgacgccgccgcgcgcctcgaggagctcgtcgtgtactgccccttctccgcgtccctgctcccgcactggctcgcggcgcgggccgccacgctgcgcgtgctcgagctacggatggactccgccgccgctgacaagtcggggcacctgaatctcgattctatcggggtggccgcgggcctcgaggagctcaggctgtgggggctcacgatgacgcgcgcccccgcgtggggccggatggagcggctccgcgtgctggagatcgtcagcgccatcctggtagacgcagcggtcaacgacgtcctcgccgcctgccccaacctcaccgacctctcgctgctcgggtgccagtgcgacggagaggcggtcatctcgctagcctcgctcgagcggtgccggctcgacttcctcggctctggcaactcctctctcaggtagtgtgcatcatgtcgagatggggaagctcccggagctggaccagctctcgctgcgcggcgtccagtggagctggggcgccatcagctcggtgctgcagtgcgctagcgaggtgaagcacctggtgatgaaggtcgaattctccggtgattatgacacgctgcagccgtttccggagatcgacctcgtcgaattcttcaacagccacccgaagcttcgcaagttcgaggtccacggcgccatgttcgcggcgctgagtcaggaaaacagcctgaagaatttggattcaaggttcgtgatacctttcttggagcaggtcgtggtcaccgtgcggtcatctctcaatgctaagcagaagctgaacaccctcaagtccgttgtcaggtacagcgtgaggctaagaaggatgatcattaggatctcgcagatgaagaattgccatgctgctggagatgatttctttgaggagatttgcaagttcacttacatgaacagtgggacagtgtgcatagagtagaggtgttgctgcatttgccattcttgaagtgatttaacactaaatcaaggcagtttttacccatgctgtttgcttaggacagtttactggataattcattgtttgttttgttgttcaccgagcttgaatgtatcctgcacttcaggcttgaaatcgtttggttctatttgtcactagtctaagttttgcgcctgttaactgcactggtaataagtggctttggtttgttgctgttctttgatccaagcaatttttcccatttggtacaatctagtttgatataataagaaatatatagttgattgttgcccttcagctg

SEQ ID NO: 3561 - DNA, 1710 bp, Zea Mays
cgaaacccaccaccatcccagcaaacacaaatcgcgcacgctccccagtccccacactccccatccaatccgcgcacaccaagcccccaatctcggccgccactcgctgactagctgctccggcaacagtcccccccgaggtacgagggtgcgaccgcggcatggacacgctcccagaaggcgtcgtgcagcacatcctctcgcagctcagcaacgcccgcgacgtggccggctgcgccgccgtcgcccgctgctggcgcgactgtgtggccttccttccgtcgctctattttccgcggggcgcctttgaggccttggccggcggaccggcgtcggccgtggccttcgccgacgacgccatcggtcggatggtcgacgccgccgcgcgcctcgaggagctcgtcgtgtactgccccttctccgcgtccctgctcccgcactggctcgcggcgcgggccgccacgctgcgcgtgctcgagctacggatggactccgccgccgctgacaagtcggggcacctgaatctcgattctatcggggtggccgcgggcctcgaggagctcaggctgtgggggctcacgatgacgcgcgcccccgcgtggggccggatggagcggctccgcgtgctggagatcgtcagcgccatcctggtagacgcagcggtcaacgacgtcctcgccgcctgccccaacctcaccgacctctcgctgctcgggtgccagtgcgacggagaggcggtcatctcgctagcctcgctcgagcggtgccggctcgacttcctcggctctggcaactcctctctcaggttcgccgcgccccgcgtcgagtcccttgaggtccagggtttctcatttatctatctgcaaggtggcaaccgtctcaaacatctcacaatctccaagaacactggtagtgtgcatcatgtcgagatggggaagctcccggagctggaccagctctcgctgcgcggcgtccagtggagctggggcgccatcagctcggtgctgcagtgcgctagcgaggtgaagcacctggtgatgaaggtcgaattctccggtgattatgacacgctgcagccgtttccggagatcgacctcgtcgaattcttcaacagccacccgaagcttcgcaagttcgaggtccacggcgccatgttcgcggcgctgagtcaggaaaacagcctgaagaatgtcgtggtcaccgtgcggtcatctctcaatgctaagcagaagctgaacaccctcaagtccgttgtcaggtacagcgtgaggctaagaaggatgatcattaggatctcgcagatgaagaattgccatgctgctggagatgatttctttgaggagatttgcaagttcacttacatgaacagtgggacagtgtgcatagagtagaggtgttgctgcatttgccattcttgaagtgatttaacactaaatcaaggcagtttttacccatgctgtttgcttaggacagtttactggataattcattgtttgttttgttgttcaccgagcttgaatgtatcctgcacttcaggcttgaaatcgtttggttctatttgtcactagtctaagttttgcgcctgttaactgcactggtaataagtggctttggtttgttgctgttctttgatccaagcaatttttcccatttggtacaatctagtttgatataataagaaatatatagttgattgttgcccttcagctg

SEQ ID NO: 3562 - DNA, 318 bp, Zea Mays
aaatatataatgaaactgatccagaacgtgattatatgctgacctctagtataaacagtctcctcatatttcaaagttccagattctaaaggggaaaaacatgaatggcctgtctatgtgcttctctcaaattctaggctatagcagagtacaatagtgttaagtgtacacgacttcactataatccttccaatatatgattcccatgcatctcacgaaaatttacgctggcaagtcggctagttttggtggcactacatacagatatctatgaaattattaatttgctgctacggtcttagaacacgacgaaagaat

SEQ ID NO: 3563 - DNA, 2458 bp, Zea Mays
gttctttctcgccccgaaaccgtcactcccccggtcgcgctgaaatcatcgtgcgccgcccgcaaacgcctcccccaaccgctcaccgctcgcaactcccctagccgctcgccccgtccgcagcgcgtgggctgcagccagtccttcactgctcgcgcctccgtccgccgctcccccaatccacctctccttcggcgctgtcccctaccgccataccaacgccccacacctagccagagacgatgatggtggggctcggctctatggcgggctatgggatccattcgatgctcaaggagggccattgatacctctccgggctcgaggaggctgcactcaagaacatcgacgcctgcctcgactgggaaattggaatggaggacatcaggtcgactacctcaccgcgacactgcccgactgtcaccacgacactcttactggccaactaggcactagcggctcccggctggtcgagtcgccgaggggcgagccggcgctcgacgacgatgctggctctggctggctagtcgtacccaaacggtgaagccatggagggcggaccgacggtcgaccgtcgacgggcgcactccgaagtgaccggacgaacgtcgtcggtgggcggagggcggaacgcggaccggcggtcggcggacgggcaccggacgaccgacggcgacgatgcacgggcggacgggcgtgtcgtgcgcgcagagcaggtgaaggcggctagcggccggcgggcgtctgcgtcgagcgtgcccactgcccaggcaacaaaacgatagggggcctgggaattgggattgaaggctgcgagttgcaggcctttgaggcccatttagggttttttttaccaaaaatctatacatatataagaatgtttttgggctacgacccgggccacggcccaggtggcccaggcctaatatctgcccctgcttatggccatacatgcatggatcaaaaacacttcacatgttttcttttgagttgctcaattttctcaagttaatccgcaccttcctagcccaacttgccgagatccgagcggtggtggcagccgccttcctcgcctcgccctctgccaccgtggtcatcgacgacaagggcagtgacgacgggagtatcctgcagctttcctccatcgccaacttcatagtctcccactgctcaagtgggctggacagtgatatccagcgacggtggtgtagtgggagtgggacgacgaggaggttaagggcggcgacggcgaggtgcggagctcctacgggctccgccatcaacaccatggatacactccaagaggccccttcagctccattggaggctacagctgccctctacactatacagtttgcagtatatttcttcttctcggaggaggatgaacggatttccagcaccctattttcaacatcgaggaggatgaacattctacgaaatcaaaaggaccccttaagttctacaactcagaggctgcacttggggaatcaaagaaaagtgaaagtgccatgtcaaagttgatgaccagaagcttgctattggaaccctctctattgaaaaatacccctagatagaaattgatttggttttcaataaagagtgtgagttgtcacacacatcgaaaactacccgtgtatttttctttggttacaaggttgaggaagatgaataatggatcttgattctgaagatgaagagaaggagctaaacattccagtaatcaaggaaaatgctaactgggaggtgttgcggctcctctgcaactgcacgtaccttggtttctgtacaaaaatgcactccaaaagtgtttttggatcaacaaatgtttttataattcacggcgggaggataaactggaaaacaagtattccaacgaatgagaagtacaagtccatggagttcaccacgtgaaggctgtggctgtttacaaaagcagtctgtagtgatttactccacaaaatttgcgagagttcaagctggaccagtggacttcgacttcactggcaggcctctggttcttggacgcttgtacaagagttttgacgcatgccactattgaagaaatcgaagcagagaagtccctcatggaagaccaagttgtatgtttaatgtatctacattggaaggcccagttgcagttcctagcagactgtttcttaacaggagcctttccagcagctcttacttgagggaaaagaaagggtgcatgtttggacaaaatccagcagcaaaagcactcggccattctagcagcaacacttatttagtaagtggaaaatattcttgaagcaaatgggtaaggctattgtttgaattgcagctgtaaaacttgccagaagttcagcaaaactgccacatatatgtgaggtttcggttcctgtccaaaatttgcagtttgctgtccgaaaattttagaactgtttcctgtccaaaattatggtttgttgtccaaaat

SEQ ID NO: 3564 - DNA, 1351 bp, Zea Mays
cgaaaccgtcactcccccggtcgcgctgaaatcatcgtgcgccgcccgcaaacgcctcccccaaccgctcaccgctcgcaactcccctagccgctcgccccgtccgcagcgcgtgggctgcagccagtccttcactgctcgcgcctccgtccgccgctcccccaatccacctctccttcggcgctgtcccctaccgccataccaacgccccacacctagccagagacgatgatggtggggctcggctctatggcgggctatgggatccattcgatgctcaaggagggccattgatacctctccgggctcgaggaggctgcactcaagaacatcgacgcctgcctcgactgggaaattggaatggaggacatcaggtcgactacctcaccgcgacactgcccgactgtcaccacgacactcttactggccaactaggcactagcggctcccggctggtcgagtcgccgaggggcgagccggcgctcgacgacgatgctggctctggctggctagtcgtacccaaacggtgaagccatggagggcggaccgacggtcgaccgtcgacgggcgcactccgaagtgaccggacgaacgtcgtcggtgggcggagggcggaacgcggaccggcggtcggcggacgggcaccggacgaccgacggcgacgatgcacgggcggacgggcgtgtcgtgcgcgcagagcaggtgaaggcggctagcggccggcgggcgtctgcgtcgagcgtgcccactgcccaggcaacaaaacgatagggggcctgggaattgggattgaaggctgcgagttgcaggcctttgaggcccatttagggttttttttaccaaaaatctatacatatataagaatgtttttgggctacgacccgggccacggcccaggtggcccaggcctaatatctgcccctgcttatggccatacatgcatggatcaaaaacacttcacatgttttcttttgagttgctcaattttctcaagttaatccgcaccttcctagcccaacttgccgagatccgagcggtggtggcagccgccttcctcgcctcgccctctgccaccgtggtcatcgacgacaagggcagtgacgacgggagtatcctgcagctttcctccatcgccaacttcatagtctcccactgctcaagtgggctggacagtgatatccagcgacggtggtgtagtgggagtgggacgacgaggaggttaagggcggcgacggcgaggtgcggagctcctacgggctccgccatcaacaccatggatacactccaagaggccccttcagatccacacggcatcattctgtttgccctcttttgcaaagagggtaattga

SEQ ID NO: 3565 - DNA, 2638 bp, Zea Mays
cgaaaccgtcactcccccggtcgcgctgaaatcatcgtgcgccgcccgcaaacgcctcccccaaccgctcaccgctcgcaactcccctagccgctcgccccgtccgcagcgcgtgggctgcagccagtccttcactgctcgcgcctccgtccgccgctcccccaatccacctctccttcggcgctgtcccctaccgccataccaacgccccacacctagccagagacgatgatggtggggctcggctctatggcgggctatgggatccattcgatgctcaaggagggccattgatacctctccgggctcgaggaggctgcactcaagaacatcgacgcctgcctcgactgggaaattggaatggaggacatcaggtcgactacctcaccgcgacactgcccgactgtcaccacgacactcttactggccaactaggcactagcggctcccggctggtcgagtcgccgaggggcgagccggcgctcgacgacgatgctggctctggctggctagtcgtacccaaacggtgaagccatggagggcggaccgacggtcgaccgtcgacgggcgcactccgaagtgaccggacgaacgtcgtcggtgggcggagggcggaacgcggaccggcggtcggcggacgggcaccggacgaccgacggcgacgatgcacgggcggacgggcgtgtcgtgcgcgcagagcagttaatccgcaccttcctagcccaacttgccgagatccgagcggtggtggcagccgccttcctcgcctcgccctctgccaccgtggtcatcgacgacaagggcagtgacgacgggagtatcctgcagctttcctccatcgccaacttcatagtctcccactgctcaagtgggctggacagtgatatccagcgacggtggtgtagtgggagtgggacgacgaggaggttaagggcggcgacggcgaggtgcggagctcctacgggctccgccatcaacaccatggatacactccaagaggccccttcagctccattggaggctacagctgccctctacactatacagtttgcagtatatttcttcttctcggaggaggatgaacggatttccagcaccctattttcaacatcgaggaggatgaacattctacgaaatcaaaaggaccccttaagttctacaactcagaggctgcacttggggaatcaaagaaaagtgaaagtgccatgtcaaagttgatgaccagaagcttgctattggaaccctctctattgaaaaatacccctagatagaaattgatttggttttcaataaagagtgtgagttgtcacacacatcgaaaactacccgtgtatttttctttggttacaaggttgaggaagatgaatatcctttttaacattgattttttattagttttatttcatgtaagactgatctaaacaatttctttgtggagtattttgtttccttgacctcatttttgcttcttgcctcttacataatggatcttgattctgaagatgaagagaaggagctaaacattccagtaatcaaggaaaatgctaactgggaggtgttgcggctcctctgcaactgcacgtaccttggttagccttactcaacctcttgcatcccctcttgcttgctttctctaactgtagggatttctcgagttaggattctgtttgcttctcacggtgggcttaatcattagttagagagatctagcaatagctccaacatattgccacgggaaaacatgcacaacaaggttattaatttcttacaaacatccatgatactcctgatatctctgtccttttgtgtggatccacaatatcaaccattttgcttggtgcaagtggatcaggttagggaaaatctactaacacacgaaacagaatgtcaatatggtttaatttttttaattagattgtctaatttgcaatttcttcactccaaaagttccgatctgtaggtttctgtacaaaaatgcactccaaaagtgtttttggatcaacaaatgtttttataattcacggcgggaggataaactggaaaacaagtattccaacgaatgagaagtacaagtccatggagttcaccacgtgaaggctgtggctgtttacaaaagcagtctgtagtgatttactccacaaaatttgcgagagttcaagctggaccagtggacttcgacttcactggcaggcctctggttcttggacgcttgtacaagagttttgacgcatgccactattgaagaaatcgaagcagagaagtccctcatggaagaccaagttgtatgtttaatgtatctacattggaaggcccagttgcagttcctagcagactgtttcttaacaggagcctttccagcagctcttacttgagggaaaagaaagggtgcatgtttggacaaaatccagcagcaaaagcactcggccattctagcagcaacacttatttagtaagtggaaaatattcttgaagcaaatgggtaaggctattgtttgaattgcagctgtaaaacttgccagaagttcagcaaaactgccacatatatgtgaggtttcggttcctgtccaaaatttgcagtttgctgtccgaaaattttagaactgtttcctgtccaaaattatggtttgttgtccaaaat

SEQ ID NO: 3566 - DNA, 880 bp, Zea Mays
gcgtcgagcgtgcccactgcccaggcaacaaaacgatagggggcctgggaattgggattgaaggctgcgagttgcaggcctttgaggcccatttagggttttttttaccaaaaatctatacatatataagaatgtttttgggctacgacccgggccacggcccaggtggcccaggcctaatatctgcccctgcttatggccatacatgcatggatcaaaaacacttcacatgttttcttttgagttgctcaattttctcaagttaatccgcaccttcctagcccaacttgccgagatccgagcggtggtggcagccgccttcctcgcctcgccctctgccaccgtggtcatcgacgacaagggcagtgacgacgggagtatcctgcagctttcctccatcgccaacttcatagtctcccactgctcaagtgggctggacagtgatatccagcgacggtggtgtagtgggagtgggacgacgaggaggttaagggcggcgacggcgaggtgcggagctcctacgggctccgccatcaacaccatggatacactccaagaggccccttcagtttgcagtatatttcttcttctcggaggaggatgaacggatttccagcaccctattttcaacatcgaggaggatgaacattctacgaaatcaaaaggaccccttaagttctacaactcagaggctgcacttggggaatcaaagaaaagtgaaagtgccatgtcaaagttgatgaccagaagcttgctattggaaccctctctattgaaaaatacccctagatagaaattgatttggttttcaataaagagtgtgagttgtcacacacatcgaaaactacccgtgtatttttctttggttacaaggttgagg

SEQ ID NO: 3567 - DNA, 906 bp, Zea Mays
gcgtcgagcgtgcccactgcccaggcaacaaaacgatagggggcctgggaattgggattgaaggctgcgagttgcaggcctttgaggcccatttagggttttttttaccaaaaatctatacatatataagaatgtttttgggctacgacccgggccacggcccaggtggcccaggcctaatatctgcccctgcttatggccatacatgcatggatcaaaaacacttcacatgttttcttttgagttgctcaattttctcaagttaatccgcaccttcctagcccaacttgccgagatccgagcggtggtggcagccgccttcctcgcctcgccctctgccaccgtggtcatcgacgacaagggcagtgacgacgggagtatcctgcagctttcctccatcgccaacttcatagtctcccactgctcaagtgatatccagcgacggtggtgtagtgggagtgggacgacgaggaggttaagggcggcgacggcgaggtgcggagctcctacgggctccgccatcaacaccatggatacactccaagaggccccttcagctccattggaggctacagctgccctctacactatacagtttgcagtatatttcttcttctcggaggaggatgaacggatttccagcaccctattttcaacatcgaggaggatgaacattctacgaaatcaaaaggaccccttaagttctacaactcagaggctgcacttggggaatcaaagaaaagtgaaagtgccatgtcaaagttgatgaccagaagcttgctattggaaccctctctattgaaaaatacccctagatagaaattgatttggttttcaataaagagtgtgagttgtcacacacatcgaaaactacccgtgtatttttctttggttacaaggttgagg

SEQ ID NO: 3568 - DNA, 743 bp, Zea Mays
gaaaatgctaactgggaggtgttgcggctcctctgcaactgcacgtaccttgttccgatctgtaggtttctgtacaaaaatgcactccaaaagtgtttttggatcaacaaatgtttttataattcacggcgggaggataaactggaaaacaagtattccaacgaatgagaagtacaagtccatggagttcaccacgtgaaggctgtggctgtttacaaaagcagtctgtagtgatttactccacaaaatttgcgagagttcaagctggaccagtggacttcgacttcactggcaggcctctggttcttggacgcttgtacaagagttttgacgcatgccactattgaagaaatcgaagcagagaagtccctcatggaagaccaagttgtatgtttaatgtatctacattggaaggcccagttgcagttcctagcagactgtttcttaacaggagcctttccagcagctcttacttgagggaaaagaaagggtgcatgtttggacaaaatccagcagcaaaagcactcggccattctagcagcaacacttatttagtaagtggaaaatattcttgaagcaaatgggtaaggctattgtttgaattgcagctgtaaaacttgccagaagttcagcaaaactgccacatatatgtgaggtttcggttcctgtccaaaatttgcagtttgctgtccgaaaattttagaactgtttcctgtccaaaattatggtttgttgtccaaaat

SEQ ID NO: 3569 - DNA, 3398 bp, Zea Mays
cgggcccattttccagtcttctgagtttctgtctttctgactacaccctggccctggatccgcctcccgtctctgacctcctcacatagccgccgccgccgatctccgtcatcggcccagcaatgcccgccgccacgccatagctcaccgcgcgatgcccgcgcccgcgcccaaggcgctgccccgtctcctcgccgccatatccaccgccgcctcctcggccactgacctccgtcgtctctccctcctcctcctctccccctccgctcctgtgccccccatccggtgcctcaacaccctcctcatggcgctcgcccgccacggcatgctctcggacatggagtcgctcgccgcccgcatgcctgtccgcaacctccacacctacaccaccctcatcaacgcctattgccacgctggcgacctccccgctgccaagcgccatctgtcctcgctcctgcgcgccggcctcgcaccggactcccacgcgtacacgtccttcgtcctcgggtactgccgcacggggctgttcgcgcacgcctgccgattgttcttgctaatgccgcagcgggggtgcgcgcgcaccccgttcacgtacgcagccctgctccaggggctatgtggcgctgggatggtgcgcgaggcgatggcggttttcgctgggatgtggcctgatggctgtgcccctgattcgcacgtctacagcataatggtgcacgggttatgtggggcaggacgagctggagaggcggttgcgctgctcacagacgcaatggggaagggatttgtgccgaatgttgctgtatacaatgctttgatcgatggctactgcagtactggggacttggagctcgcaattgacatcttcaaggggatgcagagtaaagggtgcttgccgaacgtccgcacatatactcagctgatatgtgggttttgcaagtcggggaaagtagagagggccatggtactatacagtcggatgattgaggcaggtttagctccaaatgtggtgacatacacaaccttaatccagggacagtgcagcgaggggcacttggaacatgcttttaggctgcttcattcaatggaggcttgtgggctggcccctaatgagtggacttgcttagtgctgattgatgctttgtgcaaacatgggagaattgaggaagctcagcagtttctcgggtctcttgttcagaagggaattaaggtgaatcaggttatctacaccagtatgatagatgcattgtgcaagtcgggaaagtttgatggtgctcataatctgatgcagaaaataatcacagaagggtttgtgccagacgcccacatgtacagttcgcttattgatggactatgcagggaaaacaagctgttggaagcaatatcactattgaatgatatgattgagagtggagtacaggccaatgctgttccatttaccattctaattgataaacatctcagggagtttagatctgattccccaaaaatgatatccgataggatggctgcggcaggtgttaagcctgatgtcgtcacttatacagtttttatacgctcctactgtcaagatggaaggatggaagatgccgaatccatgatgattcagatgatcgatcatggtgttcgtccaaatttaaccacatataacacattgattaaaggatatgcaaatcttggactagttagtcaagcattttcatctcttaagaacatgattgataatggatgcaagccaaatgacgagtcttacacagttctccttggacttctactaaagaaaaattcctaccatgacttagttgctgattctattagtttatggaaaatagttgacatgaaagttctcgaggaacttttggaggaagtgattaagcttcagtgcagctcagccagctatgtttacgattgttttattagatgtttgagcaaagtcgacagattggaggaagcaaaaagttttctcgtagggatgcagagtgctaacttaaccccaagtgaggatgtatatacttgtatgatagaatgttgctacagaatgaaattgctaaaagaagctttaaggtttcttgattcaatggtgaaaagaaactatttaccacgtttagaatcttataggtttattatttgtgctctttgtgaggaaggaagctttcatactgctaaaagcatttttggtgacatactatcaaaggaatacaaccgtgatgagattgcttggaagattttgattgatggcttattacaaaaaggaaacactgctgactgctcccgtctgctatcattcatggaggaacagaattgccgtcctggttctgcaatatattctaggcttacaggcgaaataacagttacaagtgaagctcaggaaattgctacatgaatacggacaaaccaaccaaccttagtgttggtgttgatggttccatgaatcagtacaagatgggcaaattgaaagctaaaaagactttggctgtttgacattagcagtgcccctgtaattgtgaggaaggatgtggcaacacaaataatccctgatataagcaggtggatgatcgggtgattctgactaggtggtccaaggcttgaggctctgcaaaaaggcaacatatattctagaatggaagaaaaaaactatggaatctaaatcttctgcctgggaagtaacacaaattgtgaagtgtatatcaaaattgaagtctcattttgaagcgaatccaagggacattgatttgctcaagcgtgataagttgataaacaacagggaaattcatgaactgatgcacacatgcgttatgttcctgactatctaattgaccctaaatcaaaagaagccattgtcaaactttccagggctcctatgggtatggacaagccccaaagacgaaaaagacacgggtttaagggaggatcagggagaagcagagatcctcttaaaactctctgctgaggtgcgtttatccattcagtggcttcaaaatttcagggaaaacgagggagacggaggagagatacagagggagaaccagatatatagaacaaatagtaagaagcgcggaaagttgattttgcaatgagtcttgccatcaaactcactcagttttgtaggcttgttttaagccacatgtcaaacttgtatcgttgacacttgaggaactgttgtttcggtgacacttgtagctaaggagtatatatttcattgcctgatggatattcaaaggctaaaaatgtaaactcctcccagctagaacattcatattaaattcgtttgccggttatgtaaacaaaatctgcttctcatgggtctggctgaggtgatgccacccgcacgtacaaagttacatttcctctagtttttaatgggaaacttttaaaaaaattttatcaaaaaccaatcattt

SEQ ID NO: 3570 - DNA, 4664 bp, Zea Mays
cccattttccagtcttctgagtttctgtctttctgactacaccctggccctggatccgcctcccgtctctgacctcctcacatagccgccgccgccgatctccgtcatcggcccagcaatgcccgccgccacgccatagctcaccgcgcgatgcccgcgcccgcgcccaaggcgctgccccgtctcctcgccgccatatccaccgccgcctcctcggccactgacctccgtcgtctctccctcctcctcctctccccctccgctcctgtgccccccatccggtgcctcaacaccctcctcatggcgctcgcccgccacggcatgctctcggacatggagtcgctcgccgcccgcatgcctgtccgcaacctccacacctacaccaccctcatcaacgcctattgccacgctggcgacctccccgctgccaagcgccatctgtcctcgctcctgcgcgccggcctcgcaccggactcccacgcgtacacgtccttcgtcctcgggtactgccgcacggggctgttcgcgcacgcctgccgattgttcttgctaatgccgcagcgggggtgcgcgcgcaccccgttcacgtacgcagccctgctccaggggctatgtggcgctgggatggtgcgcgaggcgatggcggttttcgctgggatgtggcctgatggctgtgcccctgattcgcacgtctacagcataatggtgcacgggttatgtggggcaggacgagctggagaggcggttgcgctgctcacagacgcaatggggaagggatttgtgccgaatgttgctgtatacaatgctttgatcgatggctactgcagtactggggacttggagctcgcaattgacatcttcaaggggatgcagagtaaagggtgcttgccgaacgtccgcacatatactcagctgatatgtgggttttgcaagtcggggaaagtagagagggccatggtactatacagtcggatgattgaggcaggtttagctccaaatgtggtgacatacacaaccttaatccagggacagtgcagcgaggggcacttggaacatgcttttaggctgcttcattcaatggaggcttgtgggctggcccctaatgagtggacttgcttagtgctgattgatgctttgtgcaaacatgggagaattgaggaagctcagcagtttctcgggtctcttgttcagaagggaattaaggtgaatcaggttatctacaccagtatgatagatgcattgtgcaagtcgggaaagtttgatggtgctcataatctgatgcagaaaataatcacagaagggtttgtgccagacgcccacatgtacagttcgcttattgatggactatgcagggaaaacaagctgttggaagcaatatcactattgaatgatatgattgagagtggagtacaggccaatgctgttccatttaccattctaattgataaacatctcagggagtttagatctgattccccaaaaatgatatccgataggatggctgcggcaggtgttaagcctgatgtcgtcacttatacagtttttatacgctcctactgtcaagatggaaggatggaagatgccgaatccatgatgattcagatgatcgatcatggtgttcgtccaaatttaaccacatataacacattgattaaaggatatgcaaatcttggactagttagtcaagcattttcatctcttaagaacatgattgataatggatgcaagccaaatgacgagtcttacacagttctccttggacttctactaaagaaaaattcctaccatgacttagttgctgattctattagtttatggaaaatagttgacatgaaagttctcgaggaacttttggaggaagtgattaagcttcagtgcagctcagccagctatgtttacgattgttttattagatgtttgagcaaagtcgacagattggaggaagcaaaaagttttctcgtagggatgcagagtgctaacttaaccccaagtgaggatgtatatacttgtatgatagaatgttgctacagaatgaaattgctaaaagaagctttaaggtttcttgattcaatggtgaaaagaaactatttaccacgtttagaatcttataggtttattatttgtgctctttgtgaggaaggaagctttcatactgctaaaagcatttttggtgacatactatcaaaggaatacaaccgtgatgagattgcttggaagattttgattgatggcttattacaaaaaggaaacactgctgactgctcccgtctgctatcattcatggaggaacagaattgccgtcctggttctgcaatatattctaggcttacaggcgaaataacagttacaagtgaagctcaggaaattgctacatgaatacggacaaaccaaccaaccttagtgttggtgttgatggttccatgaatcagtacaagatgggcaaattgaaagctaaaaagactttggctgtttgacattagcagtgcccctgtaattgtgaggaaggatgtggcaacacaaataatccctgatataagcaggtcctcttctcccagcatgagatcattttcctgtttcactgtcggtgcaacaaatcaaatagctggagggttgttgctctaatcttgagattagggatgcacaggtggatgatcgggtgattctgactaggtggtccaaggcttgaggctctgcaaaaaggcaacatatattctagaatggaagaaaaaaactatggaatctaaatcttctgcctgggaagtaacacaaattgtgaagtgtatatcaaattcttggcttgtgctggaccatccctgatgcggcaattccatgggcgacaaaggggactgaggtgaatgcagtgcaaattcctgagccgactattccctgctgtgtgcctctggaatcaacagatgctacccctcggacatcgagcttgtggctgttggcaagttcctagtgccaagtgctccgagcctccaaccaacggcgaagtgggcaaagctctccagacactgctgctccaagggcctccagaatttgctgtaagatttcgccctgataacatcattgtctattctcgagcaccaagacaacagggagaatcgccagctccagcatctgagttcattgaaaaggttaccaagaagatagacacccttgtacctgttccgatcattcagaaaaggagaaagaaaatgaactacccgacccgcctgccacggcgcacccgtcgaattgcctaactgccacctgaaaggctgaaactgacctagtttcagcatcagccgcttgccgtaagcttggcttgtcagatgaagaaggaaggatatctgatgaaacccttgagaggtacatcaaactctatgatgaggatagactatgccgcgagcttggcttgtcagatgaagaaggaaggatatctgatgaaacccttgagaggtacatcaaactctatgatgaggatagactattccgcgaccatgtggcagcgcttgctgctttatttggctgggacgcgcctcctgaaggacaagcttgtcttgccgacaacaccgtgttagttgtctgacagctcctatttttggtcctgcttctgattctgcgtcaatggatagatccaatatcttgatttggaatgtacggggtcttaatgataaatcaaggcgagataatcttcggaaagtcgttgatgcatccaaaccttctgtggtctgtctgcaagagaccaaactgtctcatcttttatagtttaatatcttcaaaacaacctaccgtctcttctcgagaaaagaaaagggaaacactctacttgttgttgccagtatacttgctagatagtaataaactgtggtttcttgctgagaaaccgagaacatctaatatgaaattgtacattttttcatgaaaccgaagatcattttcattttaatccatttctgcaccaataatattttttcctaacagtgatgccttttctttaccttgtagattgaagtctcattttgaagcgaatccaagggacattgatttgctcaagcgtgataagttgataaacaacagggaaattcatgaactgatgcacacatgcgttatgttcctgactatctaattgaccctaaatcaaaagaagccattgtcaaactttccagggctcctatgggtatggacaagccccaaagacgaaaaagacacgggtttaagggaggatcagggagaagcagagatcctcttaaaactctctgctgagggaaaacgagggagacggaggagagatacagagggagaaccagatatatagaacaaatagtaagaagcgcggaaagttgattttgcaatgagtcttgccatcaaactcactcagttttgtaggcttgttttaagccacatgtcaaacttgtatcgttgacacttgaggaactgttgtttcggtgacacttgtagctaaggagtatatatttcattgcctgatggatattcaaaggctaaaaatgtaaactcctcccagctagaacattcatattaaattcgtttgccggttatgtaaacaaaatctgcttctcatgggtctggctgaggtgatgccacccgcacgtacaaagttacatttcctctagtttttaatgggaaacttttaaaaaaattttatcaaaaaccaatcattt

SEQ ID NO: 3571 - DNA, 3229 bp, Zea Mays
cccagcaatgcccgccgccacgccatagctcaccgcgcgatgcccgcgcccgcgcccaaggcgctgccccgtctcctcgccgccatatccaccgccgcctcctcggccactgacctccgtcgtctctccctcctcctcctctccccctccgctcctgtgccccccatccggtgcctcaacaccctcctcatggcgctcgcccgccacggcatgctctcggacatggagtcgctcgccgcccgcatgcctgtccgcaacctccacacctacaccaccctcatcaacgcctattgccacgctggcgacctccccgctgccaagcgccatctgtcctcgctcctgcgcgccggcctcgcaccggactcccacgcgtacacgtccttcgtcctcgggtactgccgcacggggctgttcgcgcacgcctgccgattgttcttgctaatgccgcagcgggggtgcgcgcgcaccccgttcacgtacgcagccctgctccaggggctatgtggcgctgggatggtgcgcgaggcgatggcggttttcgctgggatgtggcctgatggctgtgcccctgattcgcacgtctacagcataatggtgcacgggttatgtggggcaggacgagctggagaggcggttgcgctgctcacagacgcaatggggaagggatttgtgccgaatgttgctgtatacaatgctttgatcgatggctactgcagtactggggacttggagctcgcaattgacatcttcaaggggatgcagagtaaagggtgcttgccgaacgtccgcacatatactcagctgatatgtgggttttgcaagtcggggaaagtagagagggccatggtactatacagtcggatgattgaggcaggtttagctccaaatgtggtgacatacacaaccttaatccagggacagtgcagcgaggggcacttggaacatgcttttaggctgcttcattcaatggaggcttgtgggctggcccctaatgagtggacttgcttagtgctgattgatgctttgtgcaaacatgggagaattgaggaagctcagcagtttctcgggtctcttgttcagaagggaattaaggtgaatcaggttatctacaccagtatgatagatgcattgtgcaagtcgggaaagtttgatggtgctcataatctgatgcagaaaataatcacagaagggtttgtgccagacgcccacatgtacagttcgcttattgatggactatgcagggaaaacaagctgttggaagcaatatcactattgaatgatatgattgagagtggagtacaggccaatgctgttccatttaccattctaattgataaacatctcagggagtttagatctgattccccaaaaatgatatccgataggatggctgcggcaggtgttaagcctgatgtcgtcacttatacagtttttatacgctcctactgtcaagatggaaggatggaagatgccgaatccatgatgattcagatgatcgatcatggtgttcgtccaaatttaaccacatataacacattgattaaaggatatgcaaatcttggactagttagtcaagcattttcatctcttaagaacatgattgataatggatgcaagccaaatgacgagtcttacacagttctccttggacttctactaaagaaaaattcctaccatgacttagttgctgattctattagtttatggaaaatagttgacatgaaagttctcgaggaacttttggaggaagtgattaagcttcagtgcagctcagccagctatgtttacgattgttttattagatgtttgagcaaagtcgacagattggaggaagcaaaaagttttctcgtagggatgcagagtgctaacttaaccccaagtgaggatgtatatacttgtatgatagaatgttgctacagaatgaaattgctaaaagaagctttaaggtttcttgattcaatggtgaaaagaaactatttaccacgtttagaatcttataggtttattatttgtgctctttgtgaggaaggaagctttcatactgctaaaagcatttttggtgacatactatcaaaggaatacaaccgtgatgagattgcttggaagattttgattgatggcttattacaaaaaggaaacactgctgactgctcccgtctgctatcattcatggaggaacagaattgccgtcctggttctgcaatatattctaggcttacaggcgaaataacagttacaagtgaagctcaggaaattgctacatgaatacggacaaaccaaccaaccttagtgttggtgttgatggttccatgaatcagtacaagatgggcaaattgaaagctaaaaagactttggctgtttgacattagcagtgcccctgtaattgtgaggaaggatgtggcaacacaaataatccctgatataagcaggtcctcttctcccagcatgagatcattttcctgtttcactgtcggtgcaacaaatcaaatagctggagggttgttgctctaatcttgagattagggatgcacaggtggatgatcgggtgattctgactaggtggtccaaggcttgaggctctgcaaaaaggcaacatatattctagaatggaagaaaaaaactatggaatctaaatcttctgcctgggaagtaacacaaattgtgaagtgtatatcaaaattgaagtctcattttgaagcgaatccaagggacattgggctcctatgggtatggacaagccccaaagacgaaaaagacacgggtttaagggaggatcagggagaagcagagatcctcttaaaactctctgctgagggaaaacgagggagacggaggagagatacagagggagaaccagatatatagaacaaatagtaagaagcgcggaaagttgattttgcaatgagtcttgccatcaaactcactcagttttgtaggcttgttttaagccacatgtcaaacttgtatcgttgacacttgaggaactgttgtttcggtgacacttgtagctaaggagtatatatttcattgcctgatggatattcaaaggctaaaaatgtaaactcctcccagctagaacattcatattaaattcgtttgccggttatgtaaacaaaatctgcttctcatgggtctggctgaggtgatgccacccgcacgtacaaagttacatttcctctagtttttaatgggaaacttttaaaaaaattttatcaaaaaccaatcattt

SEQ ID NO: 3572 - DNA, 3248 bp, Zea Mays
cccagcaatgcccgccgccacgccatagctcaccgcgcgatgcccgcgcccgcgcccaaggcgctgccccgtctcctcgccgccatatccaccgccgcctcctcggccactgacctccgtcgtctctccctcctcctcctctccccctccgctcctgtgccccccatccggtgcctcaacaccctcctcatggcgctcgcccgccacggcatgctctcggacatggagtcgctcgccgcccgcatgcctgtccgcaacctccacacctacaccaccctcatcaacgcctattgccacgctggcgacctccccgctgccaagcgccatctgtcctcgctcctgcgcgccggcctcgcaccggactcccacgcgtacacgtccttcgtcctcgggtactgccgcacggggctgttcgcgcacgcctgccgattgttcttgctaatgccgcagcgggggtgcgcgcgcaccccgttcacgtacgcagccctgctccaggggctatgtggcgctgggatggtgcgcgaggcgatggcggttttcgctgggatgtggcctgatggctgtgcccctgattcgcacgtctacagcataatggtgcacgggttatgtggggcaggacgagctggagaggcggttgcgctgctcacagacgcaatggggaagggatttgtgccgaatgttgctgtatacaatgctttgatcgatggctactgcagtactggggacttggagctcgcaattgacatcttcaaggggatgcagagtaaagggtgcttgccgaacgtccgcacatatactcagctgatatgtgggttttgcaagtcggggaaagtagagagggccatggtactatacagtcggatgattgaggcaggtttagctccaaatgtggtgacatacacaaccttaatccagggacagtgcagcgaggggcacttggaacatgcttttaggctgcttcattcaatggaggcttgtgggctggcccctaatgagtggacttgcttagtgctgattgatgctttgtgcaaacatgggagaattgaggaagctcagcagtttctcgggtctcttgttcagaagggaattaaggtgaatcaggttatctacaccagtatgatagatgcattgtgcaagtcgggaaagtttgatggtgctcataatctgatgcagaaaataatcacagaagggtttgtgccagacgcccacatgtacagttcgcttattgatggactatgcagggaaaacaagctgttggaagcaatatcactattgaatgatatgattgagagtggagtacaggccaatgctgttccatttaccattctaattgataaacatctcagggagtttagatctgattccccaaaaatgatatccgataggatggctgcggcaggtgttaagcctgatgtcgtcacttatacagtttttatacgctcctactgtcaagatggaaggatggaagatgccgaatccatgatgattcagatgatcgatcatggtgttcgtccaaatttaaccacatataacacattgattaaaggatatgcaaatcttggactagttagtcaagcattttcatctcttaagaacatgattgataatggatgcaagccaaatgacgagtcttacacagttctccttggacttctactaaagaaaaattcctaccatgacttagttgctgattctattagtttatggaaaatagttgacatgaaagttctcgaggaacttttggaggaagtgattaagcttcagtgcagctcagccagctatgtttacgattgttttattagatgtttgagcaaagtcgacagattggaggaagcaaaaagttttctcgtagggatgcagagtgctaacttaaccccaagtgaggatgtatatacttgtatgatagaatgttgctacagaatgaaattgctaaaagaagctttaaggtttcttgattcaatggtgaaaagaaactatttaccacgtttagaatcttataggtttattatttgtgctctttgtgaggaaggaagctttcatactgctaaaagcatttttggtgacatactatcaaaggaatacaaccgtgatgagattgcttggaagattttgattgatggcttattacaaaaaggaaacactgctgactgctcccgtctgctatcattcatggaggaacagaattgccgtcctggttctgcaatatattctaggcttacaggcgaaataacagttacaagtgaagctcaggaaattgctacatgaatacggacaaaccaaccaaccttagtgttggtgttgatggttccatgaatcagtacaagatgggcaaattgaaagctaaaaagactttggctgtttgacattagcagtgcccctgtaattgtgaggaaggatgtggcaacacaaataatccctgatataagcaggtggatgatcgggtgattctgactaggtggtccaaggcttgaggctctgcaaaaaggcaacatatattctagaatggaagaaaaaaactatggaatctaaatcttctgcctgggaagtaacacaaattgtgaagtgtatatcaaaattgaagtctcattttgaagcgaatccaagggacattgatttgctcaagcgtgataagttgataaacaacagggaaattcatgaactgatgcacacatgcgttatgttcctgactatctaattgaccctaaatcaaaagaagccattgtcaaactttccagggctcctatgggtatggacaagccccaaagacgaaaaagacacgggtttaagggaggatcagggagaagcagagatcctcttaaaactctctgctgagggaaaacgagggagacggaggagagatacagagggagaaccagatatatagaacaaatagtaagaagcgcggaaagttgattttgcaatgagtcttgccatcaaactcactcagttttgtaggcttgttttaagccacatgtcaaacttgtatcgttgacacttgaggaactgttgtttcggtgacacttgtagctaaggagtatatatttcattgcctgatggatattcaaaggctaaaaatgtaaactcctcccagctagaacattcatattaaattcgtttgccggttatgtaaacaaaatctgcttctcatgggtctggctgaggtgatgccacccgcacgtacaaagttacatttcctctagtttttaatgggaaacttttaaaaaaattttatcaaaaaccaatcattt

SEQ ID NO: 3573 - DNA, 2029 bp, Zea Mays
ttttttcgcccaactccacaggcgtgttgggtgcgatctactcaaacaatgtggccacaatatctgattcttccatgtaaaacatcaaagcaatagtgagtactgtactatcgatagtccaccttagtgagtactatcaatagtctaccttcacagaggggatggaccggtagctacatgcattgagtcggtggagcttggggtgttttgcgaaagctagtttatacacacagttgattttataatgctttctcattaaaaaaaacaacccttatttccttgcaggaggtttgcatatgcacttttcattttaacaccactggactataccacccagaccctcctcagcagattcgccgattcaccataaagtttattattactttagcaaacatcctttttgaaacatgaacctgaaacccaaatctcgcagttcttggcttgtgctggaccatccctgatgcggcaattccatgggcgacaaaggggactgaggtgaatgcagtgcaaattcctgagccgactattccctgctgtgtgcctctggaatcaacagatgctacccctcggacatcgagcttgtggctgttggcaagttcctagtgccaagtgctccgagcctccaaccaacggcgaagtgggcaaagctctccagacactgctgctccaagggcctccagaatttgctgtaagatttcgccctgataacatcattgtctattctcgagcaccaagacaacagggagaatcgccagctccagcatctgagttcattgaaaaggttaccaagaagatagacacccttgtacctgttccgatcattcagaaaaggagaaagaaaatgaactacccgacccgcctgccacggcgcacccgtcgaattgcctaactgccacctgaaaggctgaaactgacctagtttcagcatcagccgcttgccgtaagcttggcttgtcagatgaagaaggaaggatatctgatgaaacccttgagaggtacatcaaactctatgatgaggatagactatgccgcgagcttggcttgtcagatgaagaaggaaggatatctgatgaaacccttgagaggtacatcaaactctatgatgaggatagactattccgcgaccatgtggcagcgcttgctgctttatttggctgggacgcgcctcctgaaggacaagcttgtcttgccgacaacaccgtgttagttgtctgacagctcctatttttggtcctgcttctgattctgcgtcaatggatagatccaatatcttgatttggaatgtacggggtcttaatgataaatcaaggcgagataatcttcggaaagtcgttgatgcatccaaaccttctgtgattgaagtctcattttgaagcgaatccaagggacattgatttgctcaagcgtgataagttgataaacaacagggaaattcatgaactgatgcacacatgcgttatgttcctgactatctaattgaccctaaatcaaaagaagccattgtcaaactttccagggctcctatgggtatggacaagccccaaagacgaaaaagacacgggtttaagggaggatcagggagaagcagagatcctcttaaaactctctgctgagggaaaacgagggagacggaggagagatacagagggagaaccagatatatagaacaaatagtaagaagcgcggaaagttgattttgcaatgagtcttgccatcaaactcactcagttttgtaggcttgttttaagccacatgtcaaacttgtatcgttgacacttgaggaactgttgtttcggtgacacttgtagctaaggagtatatatttcattgcctgatggatattcaaaggctaaaaatgtaaactcctcccagctagaacattcatattaaattcgtttgccggttatgtaaacaaaatctgcttctcatgggtctggctgaggtgatgccacccgcacgtacaaagttacatttcctctagtttttaatgggaaacttttaaaaaaattttatcaaaaaccaatcattt

SEQ ID NO: 3574 - DNA, 2356 bp, Zea Mays
ggggtgcggcgctgcggtggcgcgagacgggctcggcacggcggcggtgtgacggcctcacgcggagtcgcggctgcgacgacggcgtgcatggactcgggtcagcacgggtccggtggagggccgtgcgcccgtgcctaggccgtgctgcccgtttcccatgtatcccttccccatatccatacctgtgttccatatgccatatccaaacgcctactcgcttctcccgtcgtcttccccgctcctacgacctgcgtttgtcgatgctctctccatggcaccctctcctctcccccgttgcacctcctgccatggagctacggtcaccgctgaactcacataactgctcccttacctcctccattagaccaccgccaccgcgctccttggcgcgggcgccccccacgctttccgccaccgcagcagccgtctcgtcgctgtccgccacctcagcggccatctcgtcgccttcctgtccaaagaagaaggttctcgtgcccatcgccatgggtacggaggagatggaggcggtcatcatcgccggtgtccttcggcgggcttccgctgatgtgacgcttgcctctgtggaggacggcctcgaggtggaggcgtcctgcggctcccgcatcatcgcggacacgcacattgcctcctgcgctgaccaagtgttcgatcttgtggctctcccaggaggaatgcctggttcagtgcgattgagagacagtgacatccttcagaggatcacagttagacaggctgaggagaaaagattgtatggtgctatatgtgctgcaccggcggttgttctagtgccgtggggtctccacaggagaaaaaaggagatctccctgcattccgggcagttgaatcaaatgttcaggtttcaggagagcttactacaagtcgtgggccagggacaacatttcagttcgctttatcatttgttgagcaattgtttgggcttcgtgcagctgaagatatggacaagattttgatggcacagactcatgacggtcttgaaaggagtgcagaagtcaatgagcttgagtggtcttgtggtcgcaatcctgatggaggacctgctggggctgagcagctgcacaggtccagaattctgaagaagttactcaaacaacaaatgcaagctggcaggatgtatggaggggtttgttctgctctgaaggttctgcagcaagaaggtttactcgaggataaaacagtgacagctcatcatgctgtagccagtgagctcacgtgccaagttatagaccaacccaatgttgtgatcgacggaaatttgatcactggtaaggggcttgggacagttgttgattttgccctagctatcatcaggaaattttttggccatggacgagccaaagctgtggcgaatggaatagtttttgagtaccctaagagctaaaccccaagaattgctgaaatcacgaaatctacaataaggactaatgaaacacattggctgtaattgaagatttggctatctatacttctgataaaaggtgagctgatgcttttgggatagcaaaagattcctctattgttgcctttctggacagctggactgaaatctccagatccactatatatgttggggtggaccaaatttacacgggaaagcttcagtggcagtcatttcatcagcttcatgacatgatttattggtggataaattacagagtggttgctaactgattatatgcgttcagaggaaactttactgtcttctgtgtgcctgtattggtttgggggcgtattttccaaggtttgaactctgaaggcattattcctcgatgttgccatcatgctatattgctgtgtttcccatctgtgaattcatctgagaagcttgacattctaattccggacttccccagatactgggtttcaagagtgcaggctagcaactgaatcagtatttaattaaatttcgaacttctgtgctgcgttttttttattggaagtcattttgccctctttttctgtgtattgctgatggattgcggttttagcttcatgggttgagcgggacataactgctcacatggttgtccctttaagaagtaacaacagttactgaatttaaattgcagttagcataacggagtagattattttgcttgctgtcttcacgctttcgcaagataaacttttggggtgaagccaagggtcgtgctcctgaaagactggtagtttctgtaaaagcgttgcaattgtagttagccagaagaggagctcctattattgtgtggccatagtcatcagacacaaataaccacagttctgcttgtggactcgtgccgagagagagcgcgagaacagtgcccctctgtttttg

SEQ ID NO: 3575 - DNA, 2844 bp, Zea Mays
ggggtgcggcgctgcggtggcgcgagacgggctcggcacggcggcggtgtgacggcctcacgcggagtcgcggctgcgacgacggcgtgcatggactcgggtcagcacgggtccggtggagggccgtgcgcccgtgcctaggccgtgctgcccgtttcccatgtatcccttccccatatccatacctgtgttccatatgccatatccaaacgcctactcgcttctcccgtcgtcttccccgctcctacgacctgcgtttgtcgatgctctctccatggcaccctctcctctcccccgttgcacctcctgccatggagctacggtcaccgctgaactcacataactgctcccttacctcctccattagaccaccgccaccgcgctccttggcgcgggcgccccccacgctttccgccaccgcagcagccgtctcgtcgctgtccgccacctcagcggccatctcgtcgccttcctgtccaaagaagaaggttctcgtgcccatcgccatgggtacggaggagatggaggcggtcatcatcgccggtgtccttcggcgggcttccgctgatgtgacgcttgcctctgtggaggacggcctcgaggtggaggcgtcctgcggctcccgcatcatcgcggacacgcacattgcctcctgcgctgaccaagtgttcgatcttgtggctctcccagtaactcacttcctcttcttttacaagtagcataaatggttcctgtggagtttagtgcatttaggataggaattagcaagggaaatgattcagaagcgcgtcaaccgttctaatatgtattttgacaacaacaaaaatttgacaatctttcgtaaaaaaactagcaatttgacaacacttctgctgatggtgagtgaccaatctctcacggtctcacctttttgttctgtggtgttacatggcagtgcacaaaatacagtatctgacccatgcattgctctgtgcagggaggaatgcctggttcagtgcgattgagagacagtgacatccttcagaggatcacagttagacaggctgaggagaaaagattgtatggtgctatatgtgctgcaccggcggttgttctagtgccgtggggtctccacaggagaaaaaaggagatctccctgcattccgggcagttgaatcaaatgttcaggtttcaggagagcttactacaagtcgtgggccagggacaacatttcagttcgctttatcatttgttgagcaattgtttgggcttcgtgcagctgaagatatggacaagattttgatggcacagactcatgacggtcttgaaaggagtgcagaagtcaatgagcttgagtggtcttgtggtcgcaatcctgatgtccttattccaattgcaaatgggtgtgaagagttggaaatcataattctggttgatattttaagacgggcaaagataaatgttgtattagcttcagttgaaaaatatccagctgttcttggatctcaaaggatgaagattgttgctgataaaagcattatgagtgcctctgattcgatatatgatctaattattcttcctggaggacctgctggggctgagcagctgcacaggtccagaattctgaagaagttactcaaacaacaaatgcaagctggcaggatgtatggaggggtttgttctgctctgaaggttctgcagcaagaaggtttactcgaggataaaacagtgacagctcatcatgctgtagccagtgagctcacgtgccaagttatagaccaacccaatgttgtgatcgacggaaatttgatcactggtaaggggcttgggacagttgttgattttgccctagctatcatcaggaaattttttggccatggacgagccaaagctgtggcgaatggaatagtttttgagtaccctaagagctaaaccccaagaattgctgaaatcacgaaatctacaataaggactaatgaaacacattggctgtaattgaagatttggctatctatacttctgataaaaggtgagctgatgcttttgggatagcaaaagattcctctattgttgcctttctggacagctggactgaaatctccagatccactatatatgttggggtggaccaaatttacacgggaaagcttcagtggcagtcatttcatcagcttcatgacatgatttattggtggataaattacagagtggttgctaactgattatatgcgttcagaggaaactttactgtcttctgtgtgcctgtattggtttgggggcgtattttccaaggtttgaactctgaaggcattattcctcgatgttgccatcatgctatattgctgtgtttcccatctgtgaattcatctgagaagcttgacattctaattccggacttccccagatactgggtttcaagagtgcaggctagcaactgaatcagtatttaattaaatttcgaacttctgtgctgcgttttttttattggaagtcattttgccctctttttctgtgtattgctgatggattgcggttttagcttcatgggttgagcgggacataactgctcacatggttgtccctttaagaagtaacaacagttactgaatttaaattgcagttagcataacggagtagattattttgcttgctgtcttcacgctttcgcaagataaacttttggggtgaagccaagggtcgtgctcctgaaagactggtagtttctgtaaaagcgttgcaattgtagttagccagaagaggagctcctattattgtgtggccatagtcatcagacacaaataaccacagttctgcttgtggactcgtgccgagagagagcgcgagaacagtgcccctctgtttttg

SEQ ID NO: 3576 - DNA, 3224 bp, Zea Mays
ggggtgcggcgctgcggtggcgcgagacgggctcggcacggcggcggtgtgacggcctcacgcggagtcgcggctgcgacgacggcgtgcatggactcgggtcagcacgggtccggtggagggccgtgcgcccgtgcctaggccgtgctgcccgtttcccatgtatcccttccccatatccatacctgtgttccatatgccatatccaaacgcctactcgcttctcccgtcgtcttccccgctcctacgacctgcgtttgtcgatgctctctccatggcaccctctcctctcccccgttgcacctcctgccatggagctacggtcaccgctgaactcacataactgctcccttacctcctccattagaccaccgccaccgcgctccttggcgcgggcgccccccacgctttccgccaccgcagcagccgtctcgtcgctgtccgccacctcagcggccatctcgtcgccttcctgtccaaagaagaagggaggaatgcctggttcagtgcgattgagagacagtgacatccttcagaggatcacagttagacaggctgaggagaaaagattgtatggtgctatatgtgctgcaccggcggttgttctagtgccgtggggtctccacaggagaaaaaagatcacctgtcacccatcttttataggagatctccctgcattccgggcagttgaatcaaatgttcaggtttcaggagagcttactacaagtcgtgggccagggacaacatttcagttcgctttatcatttgttgagcaattgtttgggcttcgtgcagctgaagatatggacaagattttggtttgtcaaaagaaactttaatacttttgtatttcacataatagatttaagcgaatgagtctatagccttatggtcataagagtcttaatagcacctcaggtcgtgcgttcgactttctataggatcgaatttaagtaggctaggttaaaaacaccactcattggtcgtgttcctaagttatatgtgaccacctgagtcactttcagtgagatgcacatggtcgtgtccttggccctttgtggcatgttcagggtagccagccttcagggtgtttctcagattgcatgtgagaagtttcttcttaatgcactgccacatggctctcttttcccacaggtcaagtccttttttcttcattttgtagtctttttgttgatgagagcgctgagaatatctgtgtgcagatcctccagatgagaggctcgtttcaggacctccctaaggacttgtttggctttgtgggaaattaactagttttccacctcaatacatgtggattgcagtgcaatcaaacaagccttaaggattggatgctccaaggacaaaccctggggcgcatggtatggtgtgtgtgtggtagtggtggtggtggggggggggggagtgtgtttccccattggagttattccttttagctgattaggttgtttgacataggaattcagtctgaatagctgttgtagtcaaggtcatgggtcctactcccctaccagattaaattaataaaaaatctgagacacataattcctccttttcattcgtgccccgccccccaacctatgtactcaaactactcagtttttgtttatcaatgatgacggttattttgtatattcgtctagatggcacagactcatgacggtcttgaaaggagtgcagaagtcaatgagcttgagtggtcttgtggtcgcaatcctgatgtccttattccaattgcaaatgggtgtgaagagttggaaatcataattctggttgatattttaagacgggcaaagataaatgttgtattagcttcagttgaaaaatatccagctgttcttggatctcaaaggatgaagattgttgctgataaaagcattatgagtgcctctgattcgatatatgatctaattattcttcctggaggacctgctggggctgagcagctgcacaggtccagaattctgaagaagttactcaaacaacaaatgcaagctggcaggatgtatggaggggtttgttctgctctgaaggttctgcagcaagaaggtttactcgaggataaaacagtgacagctcatcatgctgtagccagtgagctcacgtgccaagttatagaccaacccaatgttgtgatcgacggaaatttgatcactggtaaggggcttgggacagttgttgattttgccctagctatcatcaggaaattttttggccatggacgagccaaagctgtggcgaatggaatagtttttgagtaccctaagagctaaaccccaagaattgctgaaatcacgaaatctacaataaggactaatgaaacacattggctgtaattgaagatttggctatctatacttctgataaaaggtgagctgatgcttttgggatagcaaaagattcctctattgttgcctttctggacagctggactgaaatctccagatccactatatatgttggggtggaccaaatttacacgggaaagcttcagtggcagtcatttcatcagcttcatgacatgatttattggtggataaattacagagtggttgctaactgattatatgcgttcagaggaaactttactgtcttctgtgtgcctgtattggtttgggggcgtattttccaaggtttgaactctgaaggcattattcctcgatgttgccatcatgctatattgctgtgtttcccatctgtgaattcatctgagaagcttgacattctaattccggacttccccagatactgggtttcaagagtgcaggctagcaactgaatcagtatttaattaaatttcgaacttctgtgctgcgttttttttattggaagtcattttgccctctttttctgtgtattgctgatggattgcggttttagcttcatgggttgagcgggacataactgctcacatggttgtccctttaagaagtaacaacagttactgaatttaaattgcagttagcataacggagtagattattttgcttgctgtcttcacgctttcgcaagataaacttttggggtgaagccaagggtcgtgctcctgaaagactggtagtttctgtaaaagcgttgcaattgtagttagccagaagaggagctcctattattgtgtggccatagtcatcagacacaaataaccacagttctgcttgtggactcgtgccgagagagagcgcgagaacagtgcccctctgtttttg

SEQ ID NO: 3577 - DNA, 2458 bp, Zea Mays
ggggtgcggcgctgcggtggcgcgagacgggctcggcacggcggcggtgtgacggcctcacgcggagtcgcggctgcgacgacggcgtgcatggactcgggtcagcacgggtccggtggagggccgtgcgcccgtgcctaggccgtgctgcccgtttcccatgtatcccttccccatatccatacctgtgttccatatgccatatccaaacgcctactcgcttctcccgtcgtcttccccgctcctacgacctgcgtttgtcgatgctctctccatggcaccctctcctctcccccgttgcacctcctgccatggagctacggtcaccgctgaactcacataactgctcccttacctcctccattagaccaccgccaccgcgctccttggcgcgggcgccccccacgctttccgccaccgcagcagccgtctcgtcgctgtccgccacctcagcggccatctcgtcgccttcctgtccaaagaagaaggttctcgtgcccatcgccatgggtacggaggagatggaggcggtcatcatcgccggtgtccttcggcgggcttccgctgatgtgacgcttgcctctgtggaggacggcctcgaggtggaggcgtcctgcggctcccgcatcatcgcggacacgcacattgcctcctgcgctgaccaagtgttcgatcttgtggctctcccaggaggaatgcctggttcagtgcgattgagagacagtgacatccttcagaggatcacagttagacaggctgaggagaaaagattgtatggtgctatatgtgctgcaccggcggttgttctagtgccgtggggtctccacaggagaaaaaagatcacctgtcacccatcttttataggagatctccctgcattccgggcagttgaatcaaatgttcaggtttcaggagagcttactacaagtcgtgggccagggacaacatttcagttcgctttatcatttgttgagcaattgtttgggcttcgtgcagctgaagatatggacaagattttgatggcacagactcatgacggtcttgaaaggagtgcagaagtcaatgagcttgagtggtcttgtggtcgcaatcctgatgtccttattccaattgcaaatgggtgtgaagagttggaaatcataattctggttgatattttaagacgggcaaagataaatgttgtattagcttcagttgaaaaatatccagctgttcttggatctcaaaggatgaagattgttgctgataaaagcattatgagtgcctctgattcgatatatgatctaattattcttcctggaggacctgctggggctgagcagctgcacaggtccagaattctgaagaagttactcaaacaacaaatgcaagctggcaggatgtatggaggggtttgttctgctctgaaggttctgcagcaagaaggtttactcgaggataaaacagtgacagctcatcatgctgtagccagtgagctcacgtgccaagttatagaccaacccaatgttgtgatcgacggaaatttgatcactggtaaggggcttgggacagttgttgattttgccctagctatcatcaggaaattttttggccatggacgagccaaagctgtggcgaatggaatagtttttgagtaccctaagagctaaaccccaagaattgctgaaatcacgaaatctacaataaggactaatgaaacacattggctgtaattgaagatttggctatctatacttctgataaaagtggcagtcatttcatcagcttcatgacatgatttattggtggataaattacagagtggttgctaactgattatatgcgttcagaggaaactttactgtcttctgtgtgcctgtattggtttgggggcgtattttccaaggtttgaactctgaaggcattattcctcgatgttgccatcatgctatattgctgtgtttcccatctgtgaattcatctgagaagcttgacattctaattccggacttccccagatactgggtttcaagagtgcaggctagcaactgaatcagtatttaattaaatttcgaacttctgtgctgcgttttttttattggaagtcattttgccctctttttctgtgtattgctgatggattgcggttttagcttcatgggttgagcgggacataactgctcacatggttgtccctttaagaagtaacaacagttactgaatttaaattgcagttagcataacggagtagattattttgcttgctgtcttcacgctttcgcaagataaacttttggggtgaagccaagggtcgtgctcctgaaagactggtagtttctgtaaaagcgttgcaattgtagttagccagaagaggagctcctattattgtgtggccatagtcatcagacacaaataaccacagttctgcttgtggactcgtgccgagagagagcgcgagaacagtgcccctctgtttttg

SEQ ID NO: 3578 - DNA, 2439 bp, Zea Mays
ggggtgcggcgctgcggtggcgcgagacgggctcggcacggcggcggtgtgacggcctcacgcggagtcgcggctgcgacgacggcgtgcatggactcgggtcagcacgggtccggtggagggccgtgcgcccgtgcctaggccgtgctgcccgtttcccatgtatcccttccccatatccatacctgtgttccatatgccatatccaaacgcctactcgcttctcccgtcgtcttccccgctcctacgacctgcgtttgtcgatgctctctccatggcaccctctcctctcccccgttgcacctcctgccatggagctacggtcaccgctgaactcacataactgctcccttacctcctccattagaccaccgccaccgcgctccttggcgcgggcgccccccacgctttccgccaccgcagcagccgtctcgtcgctgtccgccacctcagcggccatctcgtcgccttcctgtccaaagaagaaggttctcgtgcccatcgccatgggtacggaggagatggaggcggtcatcatcgccggtgtccttcggcgggcttccgctgatgtgacgcttgcctctgtggaggacggcctcgaggtggaggcgtcctgcggctcccgcatcatcgcggacacgcacattgcctcctgcgctgaccaagtgttcgatcttgtggctctcccaggaggaatgcctggttcagtgcgattgagagacagtgacatccttcagaggatcacagttagacaggctgaggagaaaagattgtatggtgctatatgtgctgcaccggcggttgttctagtgccgtggggtctccacaggagaaaaaaggagatctccctgcattccgggcagttgaatcaaatgttcaggtttcaggagagcttactacaagtcgtgggccagggacaacatttcagttcgctttatcatttgttgagcaattgtttgggcttcgtgcagctgaagatatggacaagattttgatggcacagactcatgacggtcttgaaaggagtgcagaagtcaatgagcttgagtggtcttgtggtcgcaatcctgatgtccttattccaattgcaaatgggtgtgaagagttggaaatcataattctggttgatattttaagacgggcaaagataaatgttgtattagcttcagttgaaaaatatccagctgttcttggatctcaaaggatgaagattgttgctgataaaagcattatgagtgcctctgattcgatatatgatctaattattcttcctggaggacctgctggggctgagcagctgcacaggtccagaattctgaagaagttactcaaacaacaaatgcaagctggcaggatgtatggaggggtttgttctgctctgaaggttctgcagcaagaaggtttactcgaggataaaacagtgacagctcatcatgctgtagccagtgagctcacgtgccaagttatagaccaacccaatgttgtgatcgacggaaatttgatcactggtaaggggcttgggacagttgttgattttgccctagctatcatcaggaaattttttggccatggacgagccaaagctgtggcgaatggaatagtttttgagtaccctaagagctaaaccccaagaattgctgaaatcacgaaatctacaataaggactaatgaaacacattggctgtaattgaagatttggctatctatacttctgataaaagcttcagtggcagtcatttcatcagcttcatgacatgatttattggtggataaattacagagtggttgctaactgattatatgcgttcagaggaaactttactgtcttctgtgtgcctgtattggtttgggggcgtattttccaaggtttgaactctgaaggcattattcctcgatgttgccatcatgctatattgctgtgtttcccatctgtgaattcatctgagaagcttgacattctaattccggacttccccagatactgggtttcaagagtgcaggctagcaactgaatcagtatttaattaaatttcgaacttctgtgctgcgttttttttattggaagtcattttgccctctttttctgtgtattgctgatggattgcggttttagcttcatgggttgagcgggacataactgctcacatggttgtccctttaagaagtaacaacagttactgaatttaaattgcagttagcataacggagtagattattttgcttgctgtcttcacgctttcgcaagataaacttttggggtgaagccaagggtcgtgctcctgaaagactggtagtttctgtaaaagcgttgcaattgtagttagccagaagaggagctcctattattgtgtggccatagtcatcagacacaaataaccacagttctgcttgtggactcgtgccgagagagagcgcgagaacagtgcccctctgtttttg

SEQ ID NO: 3579 - DNA, 2464 bp, Zea Mays
ggggtgcggcgctgcggtggcgcgagacgggctcggcacggcggcggtgtgacggcctcacgcggagtcgcggctgcgacgacggcgtgcatggactcgggtcagcacgggtccggtggagggccgtgcgcccgtgcctaggccgtgctgcccgtttcccatgtatcccttccccatatccatacctgtgttccatatgccatatccaaacgcctactcgcttctcccgtcgtcttccccgctcctacgacctgcgtttgtcgatgctctctccatggcaccctctcctctcccccgttgcacctcctgccatggagctacggtcaccgctgaactcacataactgctcccttacctcctccattagaccaccgccaccgcgctccttggcgcgggcgccccccacgctttccgccaccgcagcagccgtctcgtcgctgtccgccacctcagcggccatctcgtcgccttcctgtccaaagaagaaggttctcgtgcccatcgccatgggtacggaggagatggaggcggtcatcatcgccggtgtccttcggcgggcttccgctgatgtgacgcttgcctctgtggaggacggcctcgaggtggaggcgtcctgcggctcccgcatcatcgcggacacgcacattgcctcctgcgctgaccaagtgttcgatcttgtggctctcccaggaggaatgcctggttcagtgcgattgagagacagtgacatccttcagaggatcacagttagacaggctgaggagaaaagattgtatggtgctatatgtgctgcaccggcggttgttctagtgccgtggggtctccacaggagaaaaaagatcacctgtcacccatcttttataggagatctccctgcattccgggcagttgaatcaaatgttcaggtttcaggagagcttactacaagtcgtgggccagggacaacatttcagttcgctttatcatttgttgagcaattgtttgggcttcgtgcagctgaagatatggacaagattttgatggcacagactcatgacggtcttgaaaggagtgcagaagtcaatgagcttgagtggtcttgtggtcgcaatcctgatgtccttattccaattgcaaatgggtgtgaagagttggaaatcataattctggttgatattttaagacgggcaaagataaatgttgtattagcttcagttgaaaaatatccagctgttcttggatctcaaaggatgaagattgttgctgataaaagcattatgagtgcctctgattcgatatatgatctaattattcttcctggaggacctgctggggctgagcagctgcacaggtccagaattctgaagaagttactcaaacaacaaatgcaagctggcaggatgtatggaggggtttgttctgctctgaaggttctgcagcaagaaggtttactcgaggataaaacagtgacagctcatcatgctgtagccagtgagctcacgtgccaagttatagaccaacccaatgttgtgatcgacggaaatttgatcactggtaaggggcttgggacagttgttgattttgccctagctatcatcaggaaattttttggccatggacgagccaaagctgtggcgaatggaatagtttttgagtaccctaagagctaaaccccaagaattgctgaaatcacgaaatctacaataaggactaatgaaacacattggctgtaattgaagatttggctatctatacttctgataaaagcttcagtggcagtcatttcatcagcttcatgacatgatttattggtggataaattacagagtggttgctaactgattatatgcgttcagaggaaactttactgtcttctgtgtgcctgtattggtttgggggcgtattttccaaggtttgaactctgaaggcattattcctcgatgttgccatcatgctatattgctgtgtttcccatctgtgaattcatctgagaagcttgacattctaattccggacttccccagatactgggtttcaagagtgcaggctagcaactgaatcagtatttaattaaatttcgaacttctgtgctgcgttttttttattggaagtcattttgccctctttttctgtgtattgctgatggattgcggttttagcttcatgggttgagcgggacataactgctcacatggttgtccctttaagaagtaacaacagttactgaatttaaattgcagttagcataacggagtagattattttgcttgctgtcttcacgctttcgcaagataaacttttggggtgaagccaagggtcgtgctcctgaaagactggtagtttctgtaaaagcgttgcaattgtagttagccagaagaggagctcctattattgtgtggccatagtcatcagacacaaataaccacagttctgcttgtggactcgtgccgagagagagcgcgagaacagtgcccctctgtttttg

SEQ ID NO: 3580 - DNA, 2535 bp, Zea Mays
ggggtgcggcgctgcggtggcgcgagacgggctcggcacggcggcggtgtgacggcctcacgcggagtcgcggctgcgacgacggcgtgcatggactcgggtcagcacgggtccggtggagggccgtgcgcccgtgcctaggccgtgctgcccgtttcccatgtatcccttccccatatccatacctgtgttccatatgccatatccaaacgcctactcgcttctcccgtcgtcttccccgctcctacgacctgcgtttgtcgatgctctctccatggcaccctctcctctcccccgttgcacctcctgccatggagctacggtcaccgctgaactcacataactgctcccttacctcctccattagaccaccgccaccgcgctccttggcgcgggcgccccccacgctttccgccaccgcagcagccgtctcgtcgctgtccgccacctcagcggccatctcgtcgccttcctgtccaaagaagaaggttctcgtgcccatcgccatgggtacggaggagatggaggcggtcatcatcgccggtgtccttcggcgggcttccgctgatgtgacgcttgcctctgtggaggacggcctcgaggtggaggcgtcctgcggctcccgcatcatcgcggacacgcacattgcctcctgcgctgaccaagtggaggaatgcctggttcagtgcgattgagagacagtgacatccttcagaggatcacagttagacaggctgaggagaaaagattgtatggtgctatatgtgctgcaccggcggttgttctagtgccgtggggtctccacaggagaaaaaaggagatctccctgcattccgggcagttgaatcaaatgttcaggtttcaggagagcttactacaagtcgtgggccagggacaacatttcagttcgctttatcatttgttgagcaattgtttgggcttcgtgcagctgaagatatggacaagattttgatggcacagactcatgacggtcttgaaaggagtgcagaagtcaatgagcttgagtggtcttgtggtcgcaatcctgatgtccttattccaattgcaaatgggtgtgaagagttggaaatcataattctggttgatattttaagacgggcaaagataaatgttgtattagcttcagttgaaaaatatccagctgttcttggatctcaaaggatgaagattgttgctgataaaagcattatgagtgcctctgattcgatatatgatctaattattcttcctggaggacctgctggggctgagcagctgcacaggtccagaattctgaagaagttactcaaacaacaaatgcaagctggcaggatgtatggaggggtttgttctgctctgaaggttctgcagcaagaaggtttactcgaggataaaacagtgacagctcatcatgctgtagccagtgagctcacgtgccaagttatagaccaacccaatgttgtgatcgacggaaatttgatcactggtaaggggcttgggacagttgttgattttgccctagctatcatcaggaaattttttggccatggacgagccaaagctgtggcgaatggaatagtttttgagtaccctaagagctaaaccccaagaattgctgaaatcacgaaatctacaataaggactaatgaaacacattggctgtaattgaagatttggctatctatacttctgataaaaggtgagctgatgcttttgggatagcaaaagattcctctattgttgcctttctggacagctggactgaaatctccagatccactatatatgttggggtggaccaaatttacacgggaaagcttcagtggcagtcatttcatcagcttcatgacatgatttattggtggataaattacagagtggttgctaactgattatatgcgttcagaggaaactttactgtcttctgtgtgcctgtattggtttgggggcgtattttccaaggtttgaactctgaaggcattattcctcgatgttgccatcatgctatattgctgtgtttcccatctgtgaattcatctgagaagcttgacattctaattccggacttccccagatactgggtttcaagagtgcaggctagcaactgaatcagtatttaattaaatttcgaacttctgtgctgcgttttttttattggaagtcattttgccctctttttctgtgtattgctgatggattgcggttttagcttcatgggttgagcgggacataactgctcacatggttgtccctttaagaagtaacaacagttactgaatttaaattgcagttagcataacggagtagattattttgcttgctgtcttcacgctttcgcaagataaacttttggggtgaagccaagggtcgtgctcctgaaagactggtagtttctgtaaaagcgttgcaattgtagttagccagaagaggagctcctattattgtgtggccatagtcatcagacacaaataaccacagttctgcttgtggactcgtgccgagagagagcgcgagaacagtgcccctctgtttttg

SEQ ID NO: 3581 - DNA, 3368 bp, Zea Mays
ggggtgcggcgctgcggtggcgcgagacgggctcggcacggcggcggtgtgacggcctcacgcggagtcgcggctgcgacgacggcgtgcatggactcgggtcagcacgggtccggtggagggccgtgcgcccgtgcctaggccgtgctgcccgtttcccatgtatcccttccccatatccatacctgtgttccatatgccatatccaaacgcctactcgcttctcccgtcgtcttccccgctcctacgacctgcgtttgtcgatgctctctccatggcaccctctcctctcccccgttgcacctcctgccatggagctacggtcaccgctgaactcacataactgctcccttacctcctccattagaccaccgccaccgcgctccttggcgcgggcgccccccacgctttccgccaccgcagcagccgtctcgtcgctgtccgccacctcagcggccatctcgtcgccttcctgtccaaagaagaaggttctcgtgcccatcgccatgggtacggaggagatggaggcggtcatcatcgccggtgtccttcggcgggcttccgctgatgtgacgcttgcctctgtggaggacggcctcgaggtggaggcgtcctgcggctcccgcatcatcgcggacacgcacattgcctcctgcgctgaccaagtggaggaatgcctggttcagtgcgattgagagacagtgacatccttcagaggatcacagttagacaggctgaggagaaaagattgtatggtgctatatgtgctgcaccggcggttgttctagtgccgtggggtctccacaggagaaaaaaggagatctccctgcattccgggcagttgaatcaaatgttcaggtttcaggagagcttactacaagtcgtgggccagggacaacatttcagttcgctttatcatttgttgagcaattgtttgggcttcgtgcagctgaagatatggacaagattttggtttgtcaaaagaaactttaatacttttgtatttcacataatagatttaagcgaatgagtctatagccttatggtcataagagtcttaatagcacctcaggtcgtgcgttcgactttctataggatcgaatttaagtaggctaggttaaaaacaccactcattggtcgtgttcctaagttatatgtgaccacctgagtcactttcagtgagatgcacatggtcgtgtccttggccctttgtggcatgttcagggtagccagccttcagggtgtttctcagattgcatgtgagaagtttcttcttaatgcactgccacatggctctcttttcccacaggtcaagtccttttttcttcattttgtagtctttttgttgatgagagcgctgagaatatctgtgtgcagatcctccagatgagaggctcgtttcaggacctccctaaggacttgtttggctttgtgggaaattaactagttttccacctcaatacatgtggattgcagtgcaatcaaacaagccttaaggattggatgctccaaggacaaaccctggggcgcatggtatggtgtgtgtgtggtagtggtggtggtggggggggggggagtgtgtttccccattggagttattccttttagctgattaggttgtttgacataggaattcagtctgaatagctgttgtagtcaaggtcatgggtcctactcccctaccagattaaattaataaaaaatctgagacacataattcctccttttcattcgtgccccgccccccaacctatgtactcaaactactcagtttttgtttatcaatgatgacggttattttgtatattcgtctagatggcacagactcatgacggtcttgaaaggagtgcagaagtcaatgagcttgagtggtcttgtggtcgcaatcctgatgtccttattccaattgcaaatgggtgtgaagagttggaaatcataattctggttgatattttaagacgggcaaagataaatgttgtattagcttcagttgaaaaatatccagctgttcttggatctcaaaggatgaagattgttgctgataaaagcattatgagtgcctctgattcgatatatgatctaattattcttcctggaggacctgctggggctgagcagctgcacaggtccagaattctgaagaagttactcaaacaacaaatgcaagctggcaggatgtatggaggggtttgttctgctctgaaggttctgcagcaagaaggtttactcgagtgacagctcatcatgctgtagccagtgagctcacgtgccaagttatagaccaacccaatgttgtgatcgacggaaatttgatcactggtaaggggcttgggacagttgttgattttgccctagctatcatcaggaaattttttggccatggacgagccaaagctgtggcgaatggaatagtttttgagtaccctaagagctaaaccccaagaattgctgaaatcacgaaatctacaataaggactaatgaaacacattggctgtaattgaagatttggctatctatacttctgataaaaggtgagctgatgcttttgggatagcaaaagattcctctattgttgcctttctggacagctggactgaaatctccagatccactatatatgttggggtggaccaaatttacacgggaaagcttcagtggcagtcatttcatcagcttcatgacatgatttattggtggataaattacagagtggttgctaactgattatatgcgttcagaggaaactttactgtcttctgtgtgcctgtattggtttgggggcgtattttccaaggtttgaactctgaaggcattattcctcgatgttgccatcatgctatattgctgtgtttcccatctgtgaattcatctgagaagcttgacattctaattccggacttccccagatactgggtttcaagagtgcaggctagcaactgaatcagtatttaattaaatttcgaacttctgtgctgcgttttttttattggaagtcattttgccctctttttctgtgtattgctgatggattgcggttttagcttcatgggttgagcgggacataactgctcacatggttgtccctttaagaagtaacaacagttactgaatttaaattgcagttagcataacggagtagattattttgcttgctgtcttcacgctttcgcaagataaacttttggggtgaagccaagggtcgtgctcctgaaagactggtagtttctgtaaaagcgttgcaattgtagttagccagaagaggagctcctattattgtgtggccatagtcatcagacacaaataaccacagttctgcttgtggactcgtgccgagagagagcgcgagaacagtgcccctctgtttttg

SEQ ID NO: 3582 - DNA, 3143 bp, Zea Mays
ggggtgcggcgctgcggtggcgcgagacgggctcggcacggcggcggtgtgacggcctcacgcggagtcgcggctgcgacgacggcgtgcatggactcgggtcagcacgggtccggtggagggccgtgcgcccgtgcctaggccgtgctgcccgtttcccatgtatcccttccccatatccatacctgtgttccatatgccatatccaaacgcctactcgcttctcccgtcgtcttccccgctcctacgacctgcgtttgtcgatgctctctccatggcaccctctcctctcccccgttgcacctcctgccatggagctacggtcaccgctgaactcacataactgctcccttacctcctccattagaccaccgccaccgcgctccttggcgcgggcgccccccacgctttccgccaccgcagcagccgtctcgtcgctgtccgccacctcagcggccatctcgtcgccttcctgtccaaagaagaaggttctcgtgcccatcgccatgggtacggaggagatggaggcggtcatcatcgccggtgtccttcggcgggcttccgctgatgtgacgcttgcctctgtggaggacggcctcgaggtggaggcgtcctgcggctcccgcatcatcgcggacacgcacattgcctcctgcgctgaccaagtgttcgatcttgtggctctcccaggaggaatgcctggttcagtgcgattgagagacagtgacatccttcagaggatcacagttagacaggctgaggagaaaagattgtatggtgctatatgtgctgcaccggcggttgttctagtgccgtggggtctccacaggagaaaaaagatcacctgtcacccatcttttataggagatctccctgcattccgggcagttgaatcaaatgttcaggtttcaggagagcttactacaagtcgtgggccagggacaacatttcagttcgctttatcatttgttgagcaattgtttgggcttcgtgcagctgaagatatggacaagattttggtttgtcaaaagaaactttaatacttttgtatttcacataatagatttaagcgaatgagtctatagccttatggtcataagagtcttaatagcacctcaggtcgtgcgttcgactttctataggatcgaatttaagtaggctaggttaaaaacaccactcattggtcgtgttcctaagttatatgtgaccacctgagtcactttcagtgagatgcacatggtcgtgtccttggccctttgtggcatgttcagggtagccagccttcagggtgtttctcagattgcatgtgagaagtttcttcttaatgcactgccacatggctctcttttcccacaggtcaagtccttttttcttcattttgtagtctttttgttgatgagagcgctgagaatatctgtgtgcagatcctccagatgagaggctcgtttcaggacctccctaaggacttgtttggctttgtgggaaattaactagttttccacctcaatacatgtggattgcagtgcaatcaaacaagccttaaggattggatgctccaaggacaaaccctggggcgcatgatggcacagactcatgacggtcttgaaaggagtgcagaagtcaatgagcttgagtggtcttgtggtcgcaatcctgatgtccttattccaattgcaaatgggtgtgaagagttggaaatcataattctggttgatattttaagacgggcaaagataaatgttgtattagcttcagttgaaaaatatccagctgttcttggatctcaaaggatgaagattgttgctgataaaagcattatgagtgcctctgattcgatatatgatctaattattcttcctggaggacctgctggggctgagcagctgcacaggtccagaattctgaagaagttactcaaacaacaaatgcaagctggcaggatgtatggaggggtttgttctgctctgaaggttctgcagcaagaaggtttactcgaggataaaacagtgacagctcatcatgctgtagccagtgagctcacgtgccaagttatagaccaacccaatgttgtgatcgacggaaatttgatcactggtaaggggcttgggacagttgttgattttgccctagctatcatcaggaaattttttggccatggacgagccaaagctgtggcgaatggaatagtttttgagtaccctaagagctaaaccccaagaattgctgaaatcacgaaatctacaataaggactaatgaaacacattggctgtaattgaagatttggctatctatacttctgataaaaggtgagctgatgcttttgggatagcaaaagattcctctattgttgcctttctggacagctggactgaaatctccagatccactatatatgttggggtggaccaaatttacacgggaaagcttcagtggcagtcatttcatcagcttcatgacatgatttattggtggataaattacagagtggttgctaactgattatatgcgttcagaggaaactttactgtcttctgtgtgcctgtattggtttgggggcgtattttccaaggtttgaactctgaaggcattattcctcgatgttgccatcatgctatattgctgtgtttcccatctgtgaattcatctgagaagcttgacattctaattccggacttccccagatactgggtttcaagagtgcaggctagcaactgaatcagtatttaattaaatttcgaacttctgtgctgcgttttttttattggaagtcattttgccctctttttctgtgtattgctgatggattgcggttttagcttcatgggttgagcgggacataactgctcacatggttgtccctttaagaagtaacaacagttactgaatttaaattgcagttagcataacggagtagattattttgcttgctgtcttcacgctttcgcaagataaacttttggggtgaagccaagggtcgtgctcctgaaagactggtagtttctgtaaaagcgttgcaattgtagttagccagaagaggagctcctattattgtgtggccatagtcatcagacacaaataaccacagttctgcttgtggactcgtgccgagagagagcgcgagaacagtgcccctctgtttttg

SEQ ID NO: 3583 - DNA, 2105 bp, Zea Mays
agaaactttaatacttttgtatttcacataatagatttaagcgaatgagtctatagccttatggtcataagagtcttaatagcacctcaggtcgtgcgttcgactttctataggatcgaatttaagtaggctaggttaaaaacaccactcattggtcgtgttcctaagttatatgtgaccacctgagtcactttcagtgagatgcacatggtcgtgtccttggccctttgtggcatgttcagggtagccagccttcagggtgtttctcagattgcatgtgagaagtttcttcttaatgcactgccacatggctctcttttcccacaggtcaagtccttttttcttcattttgtagtctttttgttgatgagagcgctgagaatatctgtgtgcagatcctccagatgagaggctcgtttcaggacctccctaaggacttgtttggctttgtgggaaattaactagttttccacctcaatacatgtggattgcagtgcaatcaaacaagccttaaggattggatgctccaaggacaaaccctggggcgcatgactcatgacggtcttgaaaggagtgcagaagtcaatgagcttgagtggtcttgtggtcgcaatcctgatgtccttattccaattgcaaatgggtgtgaagagttggaaatcataattctggttgatattttaagacgggcaaagataaatgttgtattagcttcagttgaaaaatatccagctgttcttggatctcaaaggatgaagattgttgctgataaaagcattatgagtgcctctgattcgatatatgatctaattattcttcctggaggacctgctggggctgagcagctgcacaggtccagaattctgaagaagttactcaaacaacaaatgcaagctggcaggatgtatggaggggtttgttctgctctgaaggttctgcagcaagaaggtttactcgaggataaaacagtgacagctcatcatgctgtagccagtgagctcacgtgccaagttatagaccaacccaatgttgtgatcgacggaaatttgatcactggtaaggggcttgggacagttgttgattttgccctagctatcatcaggaaattttttggccatggacgagccaaagctgtggcgaatggaatagtttttgagtaccctaagagctaaaccccaagaattgctgaaatcacgaaatctacaataaggactaatgaaacacattggctgtaattgaagatttggctatctatacttctgataaaaggtgagctgatgcttttgggatagcaaaagattcctctattgttgcctttctggacagctggactgaaatctccagatccactatatatgttggggtggaccaaatttacacgggaaagcttcagtggcagtcatttcatcagcttcatgacatgatttattggtggataaattacagagtggttgctaactgattatatgcgttcagaggaaactttactgtcttctgtgtgcctgtattggtttgggggcgtattttccaaggtttgaactctgaaggcattattcctcgatgttgccatcatgctatattgctgtgtttcccatctgtgaattcatctgagaagcttgacattctaattccggacttccccagatactgggtttcaagagtgcaggctagcaactgaatcagtatttaattaaatttcgaacttctgtgctgcgttttttttattggaagtcattttgccctctttttctgtgtattgctgatggattgcggttttagcttcatgggttgagcgggacataactgctcacatggttgtccctttaagaagtaacaacagttactgaatttaaattgcagttagcataacggagtagattattttgcttgctgtcttcacgctttcgcaagataaacttttggggtgaagccaagggtcgtgctcctgaaagactggtagtttctgtaaaagcgttgcaattgtagttagccagaagaggagctcctattattgtgtggccatagtcatcagacacaaataaccacagttctgcttgtggactcgtgccgagagagagcgcgagaacagtgcccctctgtttttg

SEQ ID NO: 3584 - DNA, 1884 bp, Zea Mays
cggcgtggcagtggccagtgggtgtgcgggcgcgtgcaccggcgcagacgatccgggcgagctcggcacttttttatacgtacgcagcggcgctggtaggggacacctgtccgccgccgcactctgacccccgcccccgccgcagcgagacgagatcgcccgcaccaaagcaagccgaggcggcgagcgggacaggtagcggctgcctaccaccgccagcctccgcccacccaacaacagcaccaccaccaccaccacagtccggtcccgtgccttccaattcggtcgtcccacgcatcgattgcgcccgcgcacgcgcccgtcgctttgccgtcttcgaccacccgcaagcaacctatatagcgcgccgcgaattccgcccggcttcctcgtcgcccgccgcagtgagtgagaggaggaggtcgatggatctcaaggacagcgagaggaggggggcggcggggccggggccgctgtcgaggcaggggtcgatctactcgctcacgttcgacgagttccagaacacgctcggcgggacggggggagggctcggcaaggacttcggctccatgaacatggacgagctgctgcggagcatctggacggcagaggagagccaggccatggcgtcggcctcggagcccgcggcgggggcggccggcgacggcggggcggcgctgcagaggcaggggtctctcaccctgccgcgcacgctcagcgtcaagacggtggacgaggtctggcgggacttcgcgcgggaggggacggctggcggtccggagccgcagcccaatcgacagccgaccctcggggagatgacgctggaggacttcctggtcagggcgggggtcgtccgtgacaaccctgccgccgctgctgctgctgctgctgctgtccccgcgcagccggttgcgacgcggccgcttcaggcggtcaataatggcgcctccatctttttcggcaactttggaggcgccaatgacgccggggctggagcgatggggtttgcgccggtagggatcggggatcaggccatgggcaacggcctgatgcctggggtggctgggatggcggctggtgcggtcactgttagtccggtggatatgtcggtggcccaactagattctatgggcaaggggaatggggatctgtcatcgccgatggctccagtgccctacccctttgagggagtgataaggggaaggcggagcggtgcgggtgtggagaaggtcgtggagcggcggcagagaaggatgatcaagaacagggagtctgcagctagatcccgtgcccgcttatacaatggagttggaagccgaagttcagaaactgaaggaacaaaacgaagaattgcagaagaagcaggaagaaataatggagatgcagaaaaaccaggtcgtggaagtgatcagcaatccatacgcacaaaagaaacggtgcctgcggagaacattgacaggtccctggtaaccgagctgttgacgaccgaccgggcttgacaggatatttaacattatggcacctgtacatatataccttgaggatttggagaacccgagtttccggtgtatattagcgaccaacagagtgtgagtgtacctgcgcttgacttatgctgccactgtgcctccttgactagcttctgcgctctcgtgctcctttgcactcacatcaatgagcgactagtacccatgggatttcatagatgggtctcaggcctcaatctcgccttctaaaggcaagtccggaggcgtcttgcagcttataatgggctctgtattgtatctggtgcggaagttggagacggaggaactcctgctgataatttaggagctggaagtggtgagcttgagggaaaatcatccaatgtttggactggctaaa

SEQ ID NO: 3585 - DNA, 1854 bp, Zea Mays
cggcgtggcagtggccagtgggtgtgcgggcgcgtgcaccggcgcagacgatccgggcgagctcggcacttttttatacgtacgcagcggcgctggtaggggacacctgtccgccgccgcactctgacccccgcccccgccgcagcgagacgagatcgcccgcaccaaagcaagccgaggcggcgagcgggacaggtagcggctgcctaccaccgccagcctccgcccacccaacaacagcaccaccaccaccaccacagtccggtcccgtgccttccaattcggtcgtcccacgcatcgattgcgcccgcgcacgcgcccgtcgctttgccgtcttcgaccacccgcaagcaacctatatagcgcgccgcgaattccgcccggcttcctcgtcgcccgccgcagtgagtgagaggaggaggtcgatggatctcaaggacagcgagaggaggggggcggcggggccggggccgctgtcgaggcaggggtcgatctactcgctcacgttcgacgagttccagaacacgctcggcgggacggggggagggctcggcaaggacttcggctccatgaacatggacgagctgctgcggagcatctggacggcagaggagagccaggccatggcgtcggcctcggagcccgcggcgggggcggccggcgacggcggggcggcgctgcagaggcaggggtctctcaccctgccgcgcacgctcagcgtcaagacggtggacgaggtctggcgggacttcgcgcgggaggggacggctggcggtccggagccgcagcccaatcgacagccgaccctcggggagatgacgctggaggacttcctggtcagggcgggggtcgtccgtgacaaccctgccgccgctgctgctgctgctgctgctgtccccgcgcagccggttgcgacgcggccgcttcaggcggtcaataatggcgcctccatctttttcggcaactttggaggcgccaatgacgccggggctggagcgatggggtttgcgccggtagggatcggggatcaggccatgggcaacggcctgatgcctggggtggctgggatggcggctggtgcggtcactgttagtccggtggatatgtcggtggcccaactagattctatgggcaaggggaatggggatctgtcatcgccgatggctccagtgccctacccctttgagggagtgataaggggaaggcggagcggtgcgggtgtggagaaggtcgtggagcggcggcagagaaggatgatcaagaacagggagtctgcagctagatcccgtgcccgtaagcaggcttatacaatggagttggaagccgaagttcagaaactgaaggaacaaaacgaagaattgcagaagaagcaggaagaaataatggagatgcagaaaaaccaggtcgtggaagtgatcagcaatccatacgcacaaaagaaacggtgcctgcggagaacattgacaggtccctggtgtgattcaaacgggaaaggcggagaggaacctgctaccgcaccggagaacgaccctccgctgttcatccaggtccccccacgtctctgtacctctggtgtcacggcatcggcatccacatctgccccaaatcgcgtacctatgcctgtcagtctgtcatgtacgatacatgtccacgtcgtgctttaatcttgtctttataataaattgcatctacacccgtccaaacagatgttactaccagtaccaggtaccagcggccatggcgtagctgccccacgaacaggcacccgttcgttcgtccgtccggttagttcacgaacagtctctgtcggagcgcgcgggccgccttgccgggcaaaggagagatcttcccggt

SEQ ID NO: 3586 - DNA, 1967 bp, Zea Mays
cgtggtgcccatcccacatgcctgcttctcgccggcgcccgtctgtctgtacgagtacgactcgtccctcgtccgtgccaatggagaattggagccggccgaacagaaccaaatccgtgcccgtgcgaggaagatctcagcggctgctggcgcggggggtcgttggctcgttccaaactcgcctgactccgcccaccgtctcttggtcgccccacacgatctctccaccactccccacccggcgccggcgaggcgcgaggagggccagcaatgatggtctcctcccactcgcagtcgcaggcgggccgccggcggcgatggaggtgcttgctgccgctcctcgtaggcgccgccttcctcgccgagatcgccttcctcggccgcctcgacatggcgaagaacgccgaggtggtcgagagctggaccacctccttttaccgccgctcctcccattggggtgaatccgtgggccggggcgcggtcccgagggcagacggcgacggcgacggcgaggacgaagagatccggcggtgcgagcagcggctcgagagggaggacgccgtgccctacgaccgcgactttgacagggatcccgtgcttgtcggtggcgctgccaaggactggagtaaatgctatgtaggatgtcaatttggtttttctgccagtaagacacctgatgctacttttggaattgcaccagatccttctgtagagggtatcctgagatcaatggaatcatctcaatattattcagagaataatattgatgtggctcgagggtaggagagggtacaagattgtgatgacaaccagcctttcttcagatgtcccagttggctacttttcatgggctgaatatgatatcatggcacctgtgcctccaaagactgaagaagctcttgctgtagcctttatttctaactgtggtgcacggaacttccgtttgcaagcccttgagatgcttgaaaatttggatgtcaaaatagattcatatggtagttgtcatcgtaaccgtgatggcaaagtggacaaagtggacaccttgaagcgctacagattcagcttggcatttgagaattctaatgaggaggattacgtaacagaaaagttttttcagtcactggtagcaggttctattccagttgttgttggtgctccaaatattcaggagctttctcctggagaaggcgcaatattacacattaaggagcttgatgatgttgtttcagttgctaagacaatgaaaaatattgcttcaaatcctgacgccttcaatcaatctttgaggtggaagtatgatgggccatctgattctttcaaagctcttatcgacatggcagcggttcattcatcttgtcgtctttgtatacatattgctaccaagattcatttaaaggaggaaaggactccaaaatttacaaatcgtccttgtagctgttccagcaaaaaggggacagtttaccacttgtttatccgagagagagggcggtttaagtcagagagcatttatatgagatcgggccagttaacactgggagccttggaatctgcagtgctcggtaaatttaggtccctcaaccacgttcctgtatggaaggatgaaaggccaccgagtattagaggtggggatgacctgaaactatacagaatttacccagtcggtctaacgcaacgtcaggctttgtacggtttcagatttagagatgattctaaactcgagcaatacatcaaagaccatccctgtgcaaagcttgaagtgatttttgtgtaactatgctctaggcttacgttcgcccccgattcttactgaactccgtgtgcggagtttcagttatactgtaatgtatggtgtcttgtgtagcaaacaaactcatgctagtacagatcatctgccggatgaaaattttccttgacagcgaacatcagtgcattcagcaacaacagcaaaggaattgacacgtttctac

SEQ ID NO: 3587 - DNA, 2159 bp, Zea Mays
cgtggtgcccatcccacatgcctgcttctcgccggcgcccgtctgtctgtacgagtacgactcgtccctcgtccgtgccaatggagaattggagccggccgaacagaaccaaatccgtgcccgtgcgaggaagatctcagcggctgctggcgcggggggtcgttggctcgttccaaactcgcctgactccgcccaccgtctcttggtcgccccacacgatctctccaccactccccacccggcgccggcgaggcgcgaggagggccagcaatgatggtctcctcccactcgcagtcgcaggcgggccgccggcggcgatggaggtgcttgctgccgctcctcgtaggcgccgccttcctcgccgagatcgccttcctcggccgcctcgacatggcgaagaacgccgaggtggtcgagagctggaccacctccttttaccgccgctcctcccattggggtgaatccgtgggccggggcgcggtcccgagggcagacggcgacggcgacggcgaggacgaagagatccggcggtgcgagcagcggctcgagagggaggacgccgtgccctacgaccgcgactttgacagggatcccgtgcttgtcggtggcgctgccaaggactggagtaaatgctatgtaggatgtcaatttggtttttctgccagtaagacacctgatgctacttttggaattgcaccagatccttctgtagagggtatcctgagatcaatggaatcatctcaatattattcagagaataatattgatgtggctcgagggtaggtaaggaccaagttgttctgatcggtgatttcctatgatttctttggccatttgaattgccattcggaatttggtacacatagacatccccaaatcaaggccacaaccttctctgtgccttagcacctgccaattccccaagcctggcatccccaaatcaaggccacaacattttgataatcaatgttactggagagggtacaagattgtgatgacaaccagcctttcttcagatgtcccagttggctacttttcatgggctgaatatgatatcatggcacctgtgcctccaaagactgaagaagctcttgctgtagcctttatttctaactgtggtgcacggaacttccgtttgcaagcccttgagatgcttgaaaatttggatgtcaaaatagattcatatggtagttgtcatcgtaaccgtgatggcaaagtggacaaagtggacaccttgaagcgctacagattcagcttggcatttgagaattctaatgaggaggattacgtaacagaaaagttttttcagtcactggtagcaggttctattccagttgttgttggtgctccaaatattcaggagctttctcctggagaaggcgcaatattacacattaaggagcttgatgatgttgtttcagttgctaagacaatgaaaaatattgcttcaaatcctgacgccttcaatcaatctttgaggtggaagtatgatgggccatctgattctttcaaagctcttatcgacatggcagcggttcattcatcttgtcgtctttgtatacatattgctaccaagattcatttaaaggaggaaaggactccaaaatttacaaatcgtccttgtagctgttccagcaaaaaggggacagtttaccacttgtttatccgagagagagggcggtttaagtcagagagcatttatatgagatcgggccagttaacactgggagccttggaatctgcagtgctcggtaaatttaggtccctcaaccacgttcctgtatggaaggatgaaaggccaccgagtattagaggtggggatgacctgaaactatacagaatttacccagtcggtctaacgcaacgtcaggctttgtacggtttcagatttagagatgattctaaactcgagcaatacatcaaagaccatccctgtgcaaagcttgaagtgatttttgtgtaactatgctctaggcttacgttcgcccccgattcttactgaactccgtgtgcggagtttcagttatactgtaatgtatggtgtcttgtgtagcaaacaaactcatgctagtacagatcatctgccggatgaaaattttccttgacagcgaacatcagtgcattcagcaacaacagcaaaggaattgacacgtttctac

SEQ ID NO: 3588 - DNA, 2033 bp, Zea Mays
aaagtatcaaaatcatagtattttctctctctaaaattccaaaaatattttacatctaaagttgatgtcttggcctcccgcgctgttttaccttcctcctctggacaccaaccacaggccgacaaccgagtaagccggtcaattttggtatcctgctcatgactcatatcaggcggtagccgagcagccgcccagctttctcatgccagagcaaacccataggtccagtccaaatccaatccctgttgccatcagaatttcaggggcagccatggccgaaaaggagagcaacggagtgcgggtgtgcgtcaccggaggagccgggttcatcggctcctggctcgtcaggaagctcctcgagaaaggctacaccgtccacgccaccctgcggaacaccggggacgaggcgaaggcggggctgctgcgtcggctggtccccggcgcggcggagcggctgcggttgttccaggccgacctcttcgacgccgccaccttcgcgccggcgatcgctgggtgccagttcgtcttcctcgtcgccacgccattcgggctcgatagcgccggctcccaggtgaagcttgccgtcgcgttcgctcccttcactgttttactagtcaacgagtggtcaggcggcgacgcgccgtgctgtctcttcttaattttaagttgtggaaaattactgtccttgcaaaggaaaaatttgatcagactgagtatgagtaaagaccagtaagacagcacaaggattgcgagctgcgactgcgagcagaggaaacgtcttcacagttattcttgtctgccttgtttttctctatctgaagcaaaatcttgtggtgcccatcgaccgcgtatagcagtataagagcacggcggaagctgtggtggacgcggtgcgcgcgatcctccggcaatgcgaggagtcccggacggtgaagcgagtgatccacacagcctccgtagcggccgcctcgccgttgctggaggaggaggtctccgcctccggcgtcgggtacagagacttcatcgacgaatcttgttggacttcgctcaacgttgactatcctctccgaagcgcacacttcgacaagtacatactgtcgaagctgcggtcagagcaggagctcctgagctacaacggcggcgagagcccggcgttcgaggtggtgaccctgccgctggggctcgtggcgggcgacacggtcctcggccgcgccccggagacggtggagagcgccgtggcgcccgtgtcccgcagcgagccctgcttcggcctcctgcgcatactgcagcagctcctggggtcgctgccgctggtgcacgtggacgacgtctgcgacgcgctcgtcttctgcatggagcggcgcccctccgtcgccggccgcttcctctgcgccgccgcgtacccgacgatccacgacgtggtcgcccactacgccagcaagttccctcacctcgacatcttgaaagagacggaggcggtggcgacggtgcggcctgcccgggacaggttgggcgagctgggcttcaagtacaagtacggcatggaagagattctggatagcagcgttgcctgtgcggcgagattaggttcccttgacgcatccaagctcggcctacagaaaggataaaagctcgaagcttactcataagcaccatggggaacttggattgttcgctgtccactatacgcgttcgaaatttggaaactagacatactccaataaaacaagaggtaaagaaacgtgggctaactgatacgcgttgagcagttgagctagcctagtttagtccacctgtgtgcagggtttaaaacttcgacgaaattttatgacttgcgataattttaggcctctaaatatcaaccatacactctaaattgtatatgtgcatacacatatagccatatggacgctctgatctagcatcctacacctatgcacctctctaagaacaactccaacagcctcactaaatatatcagattcggtaaaaaaaaacccagttaaaattgtatccaatagtctcgttttatt

SEQ ID NO: 3589 - DNA, 1671 bp, Zea Mays
cacaggccgacaaccgagtaagccggtcaattttggtatcctgctcatgactcatatcaggcggtagccgagcagccgcccagctttctcatgccagagcaaacccataggtccagtccaaatccaatccctgttgccatcagaatttcaggggcagccatggccgaaaaggagagcaacggagtgcgggtgtgcgtcaccggaggagccgggttcatcggctcctggctcgtcaggaagctcctcgagaaaggctacaccgtccacgccaccctgcggaacaccggggacgaggcgaaggcggggctgctgcgtcggctggtccccggcgcggcggagcggctgcggttgttccaggccgacctcttcgacgccgccaccttcgcgccggcgatcgctgggtgccagttcgtcttcctcgtcgccacgccattcgggctcgatagcgccggctcccagcaaaatcttgtggtgcccatcgaccgcgtatagcagtataagagcacggcggaagctgtggtggacgcggtgcgcgcgatcctccggcaatgcgaggagtcccggacggtgaagcgagtgatccacacagcctccgtagcggccgcctcgccgttgctggaggaggaggtctccgcctccggcgtcgggtacagagacttcatcgacgaatcttgttggacttcgctcaacgttgactatcctctccgaagcgcacacttcgacaagtacatactgtcgaagctgcggtcagagcaggagctcctgagctacaacggcggcgagagcccggcgttcgaggtggtgaccctgccgctggggctcgtggcgggcgacacggtcctcggccgcgccccggagacggtggagagcgccgtggcgcccgtgtcccgcagcgagccctgcttcggcctcctgcgcatactgcagcagctcctggggtcgctgccgctggtgcacgtggacgacgtctgcgacgcgctcgtcttctgcatggagcggcgcccctccgtcgccggccgcttcctctgcgccgccgcgtacccgacgatccacgacgtggtcgcccactacgccagcaagttccctcacctcgacatcttgaaagagacggaggcggtggcgacggtgcggcctgcccgggacaggttgggcgagctgggcttcaagtacaagtacggcatggaagagattctggatagcagcgttgcctgtgcggcgagattaggttcccttgacgcatccaagctcggcctacagaaaggataaaagctcgaagcttactcataagcaccatggggaacttggattgttcgctgtccactatacgcgttcgaaatttggaaactagacatactccaataaaacaagaggtaaagaaacgtgggctaactgatacgcgttgagcagttgagctagcctagtttagtccacctgtgtgcagggtttaaaacttcgacgaaattttatgacttgcgataattttaggcctctaaatatcaaccatacactctaaattgtatatgtgcatacacatatagccatatggacgctctgatctagcatcctacacctatgcacctctctaagaacaactccaacagcctcactaaatatatcagattcggtaaaaaaaaacccagttaaaattgtatccaatagtctcgttttatt

SEQ ID NO: 3590 - DNA, 2512 bp, Zea Mays
gtcaaaccaaactctcgaccaagttaatcgcgtagtcgtccgttcgtccgaactctgttccactctgttccgcgtacagacgaaatccgcaggaacatttttattccggaaaaataaattagcgcgacccgatttcatgttttggggccaagcccattctagcccggcccagcccactaagaaaaccctaaccctagagctcatctataaataggacccctctccccttgcacttggaaattttgcattcccacccctatctttttttcagccgccacttccttttccctgccttcttcttcctccagcgagcagcaagcgcagggagcagcagctttcccagcgccccctctctcccatggctgagcagcagctctgctcgccccctcccatggcgcctccgcctccctgcgtgctctttcctcgctccttggcgcagcagcaaattaccatggtgcctccctctgctgtccacgaagagcagccaagcgccccactgttgaagctccctggatggcgcctagaatttcagcagagagcttcttctccatggccagccgcccctctgttgctgccgagctccagctctggccagcagccatggcgccgaggattacctgcaggcgagcagctcggcccttcttccctgcgcccagctattctccctgcgcagcacctccttcttctacctcttgccggcgcccagcagcagctcaccccatggatggcgcccagaaaatttcagccggcgccccttctttttcccctgctcgttctccctcgcgcagcagcagctcgccccacctcacctcgctgcgcagctcctcggcgaaacgccgctgttcctgcagccccggcacatcccccagcttcctcgctgctaccgctgcgcgcatgccaagtgctcggcataatgtcgagggagatgtgttgttgcagcacgccgtgacgctcgctgggtgttcaatgtttttggcgcagccccgctcgcgacgccgttgaaacccgtgctagccgtcaatcgccattcgtcacgcacgcgcgttcgatacaagaccggtcgggtgaaccacgtgcttgcataactcaaatccgatcccgctcaggttgattgatttatagtttaccatacgtatgatttggttgatgtcatgcaatgcgcgtatatgtggggatatgtgtataaaatgtcttgattatacgcattagtaggttcgcatttgcggttggagaacaagaagttgtttgatgtgtgcgatttgtagtttgtctaaatacgtttggtcgatgtggtgtgtattggtgtttgaatatatgtggctgcgatgattcatttatgcgtcacaaggatggttcgtggatggtgttagtcgtttgttaaaatacttcgtcataaagcagtgtgttagtcggggtaaatctaataaaaagtaaaacatgtttggcgatttccgcagtcggctaatgagttagtctatgtaaatatattttatgtattcatcatggtgtaggttagagtgggttgaaaatataagattatgtcacatatgattagtgttttaaaggcggatgtacgaataatcagttggtgtttcactcgtctagtcgctaagtgttgtcatagacaattgtgctaaaagtggttataagaatgcagtggtcacgtggtgtggttggctgcgataagtagactggaagtgtgggcttgtctgagcacgatattgtcaaacgtgtatgtcgaattgcgttatagtagtaatttcgttaagttgaatcgaagagtctcgagtgcacgccacaacatggttgtatgcgagacagagtaaaataaagtgtgctcgacataaatgttcagtcgttgtaggtggaatttgtccttacttgatttagagaggtggtgacatgccgaagtagtcatcgcttactccatgtttataagtcgagtcaaaatgcggggtactagtagtacgctaggcaggcggtgttccaaatagataaatcgggtgatgtggtagttgtcaagcgtgatagaggttgtgtcacttaggttataaattgatgctcgacaggtggggtctcctaaaatatggcgttttaagtgacttgtgtgttgtccagtttaagttgagaaaatggttaagaaaaactaattaacctgctcccacctatgtttttgagttgcgaagtctaaaatactttgctaagttttatactagttaaccaacttgttagatgtctttagttaagtttgtagtcgcgatgaattgcttgttgtggtctaaatgtgtatggttatggttgcgaatgaaaagtattagtgctcctgtgatgtctaagttaaaacgcaaatggttgggtacttatcggggagaatgtgtcgttgatgggttgtggtagtttttagtgcactaaatgacttgaataaaatttgcgagtcaaattattggttctaatttgattgtcttaactcaaacaaatagtaaagcgttagagtaattcaagtctttcgaac

SEQ ID NO: 3591 - DNA, 2705 bp, Zea Mays
ctcccattccggttatggtgggtacaagtgcggtcactgcacgacggccagtcggggtcagtgaggcattgtacgccaaggcgatgagccctgttctgctgacggggaatcgatggggacggttgacgtgtgtggggacggagtgcccctacatgtcgtgtgtttaggtttaccttgcaaggtttaaaaactcgatttgaatcgtctgcttctcgcagctaatgagactgcttgatccatgctactacattgagtaataagtggaaatgtggtgactggcaaaagatgttggttgataaaaatgtttgataccatgtatgattagctaggtacacatctagttaaaaaggagcatactaaaacttgaaaagctaaaatataattttagactcagctagtgcttttggcaaaccaaaccctcagccaaacaactgcatgtctagaggtagaggagtagactcctcacaccgggtaagtctagctgagtattagtatactcagccttgcttatggcataatttttgcaggtactccttaggatgatttgttgatggtgtgacttggccttcatccctgccaccgggatagacggtcgagtgggttactgcttccgcaggaaaggaccaggcggagtagcgtggccaggcttcgccatgttactcggttcttctccgttagttatttccgctgcattaaaatttatggttattatttctgaaactccgacaatgtaatcactaatgatacttattaaatttgtggtattatgttttattgtatttctctgtgcctcaccttcgagtgagctagtggtattcgatcctggataagtggcctcgtcggactagatccgagggactgacgatttattcctatttaagtgtggtctagcctttaaaacgggacttaggcacttaagttggaataattcgggcagttccgccacagctggtatcggagcgaataccagtacagagaagtcaataagtcatgattccaaccttttctaaagtaaaatttgcttagaaaccaaagttggatagacatcaggacgataaggataaacctaggacgtgaagccttacgaaatagatgggtagctaggtggctatttatataggccataaaggctactattgctactagcaggatgctgtagaagcttccaaaaaattagttaggtctgagaagacgactagaatgagcatgcatcatgattgtcgcattataattgtctcttgtgcatcaacatgcttctttcacctttattctaataacaagaacttgtgaataatgtgatgtactgctatgttctgaaaactataagaaatgctttaccttgtgtcggattggtaagccttgactaggtcgtgatatgtgtttctcttgccttgctttctagaaggtacgatagttgttcagtccgttttgcctctaaaaaaaaattgttgtctgtcctgctcataaaagacccccttccccaaataatctagtggttccctagtgaaaccaaaaaaaaaatcaaatcacgtgcttgtttggggtgtttctagcccttgtgtgttttacgcttgaagttacacctgcacagcttatagacccccacagcttgaccgctggaccaacccaagtccccttgtgcacttgttgtgtcaaaaaaattgctgggtgtctagttgcacaaaccctatcaaggccatgttactttccataaatcctatctcctaaaacttcatagcattcctgttgatcatcctagctgatcctgtttgccgacctctcttttcacctggatctagtactctttttccttgtgaattatgttgtgactttatcatacaaatctctggatccttcatcgattcggccccgtatctggttatctgttgtaacccgttctcaaatatcgaatgttgatcttgcctaaatctctcattctaatcattctcatactctttctccaaggatcatgacgtcattttatcaacatatctctaatcagtgtatccatttagttcaatggatttcattgttgtccttggatctcttatgtctctaaaagcttatcagtcccgatctcatggttggttcctcctcatattaaataccgtatcgatctttggctgataatccccgtgatgatcataaaaatagttctctgagatgaagaaaattctcctgtgatgctcttttgccagcaatctctgcttcaattctgatcatattttttatttgctgagccatactctcatgggttccatctaattatgccaagtgaatttttcattggttacgtttagtaatggtgtcatgactaacgactgatggtgtcgcgacgagaacgagagcctactatggtgcacacatggttgagctgctcggcacgcgctggtatcgcggtcactagtcgtgatccattacgagactatactgatgtgctaccttttgtgaacattctctcagagcgatcgctgcattttgtctcaacatgccgcgatattctccccaaatctatcttcagtatcttgtcagatcacatctcaaaaatttccatctatcttcagcttgggagttacatgcttctccacccttaagagtccttgttcgaatctcgggacgagattctttttaaggggggaaggctgtgacaccccaggtgtctatttcgggttatgacggaagaattaccctaatcttgaatgctc

SEQ ID NO: 3592 - DNA, 2399 bp, Zea Mays
tctgcccgctccgcgcaggtcgacacggttattttgatgcccacgcacgcggtccagtccagatcaagaacccaccacgccacgctcaaacgagacgacgacgaatccagccaccgtcaccatcgccaccgccgacacaatcccgccgcagccccccgcgcactggtgtccgaacccagcccaatccgcgctgccgaattctggtctctgccctgcccgccccgcggcgcggccttcccaccgcctctccgtcctgctcccatccgccgcgctcgctagcgaaaccgctccccgagctccaggtggtgtggtgcctggcgcgcttcacaacgccataaatgccacccatcaaggctcctcccgccatctagccctcttctccctgaccctgcgcccgcggctcggtgcggttaccgtttccttggcgcgcgcgtcagcactccgccgatgcacgcgccgttggaggccatgaacgggagggcgcggaggccggcggcggcgcgcggcgccgccccgaggaacgagaaagcgatggagaaggagcagaggaggccacccagctcgaagacggcgccggtgtccatgaaggcgtcgcccgcaaatgcgacgccgcaatgcatgaagaacaggaaaattgcactgcagcaggacgtggacaagctgaggatgaaactgcggcacgaggagaacgtccaccgagctctggagcgggcgttcacgaggccgctcggcgctctacctcgcctccctcctttcctgccgtctcaaacgttggagcttctggccgaagtcgccgtcctggaggaggaggtcgtccggctggaggagcaggtcgtcaatttccggcaaggactgtaccgggagaccgtcatcaccacctccatggcggcgaagagcgtgtacttcccggacggttaccggagcacgccggcacggcacaagccacctgcacaaccgcagagtccagagctgtctacctcgacgcgccaaggctccgatcaagatgccgctgattggctgccatctttgaggcgagccaccaatgcgatgtggacaccaagaaggcccggtcgttccctgagccaaggcgacagtccggggaaggagaaccagtcgttcggcagtggcactaattcgtgcagagagttcggcctggcgcccttgagtaaagtgccaggatgcagggtagtacaggtagcggagacacgcgcaggttttcagacaacgagtgcagtggaagaccacaaagctgttgagggcagcaatggcactggtccaagcaaggcctcaacggcggcgaacgaagtctcggaggagctactggcgtgcctgctggccatcttctcgcagaagagcgcatccagcggccaagacgaggagcgggtgtcgctgccgccggtctccggctcctgcggaagcagctcagcagacccctactgtgtcccagaattcgggtggcgggatattggccggtacaagcagttccggtcagtcgacatgaacacttgtgccggcgacgactccgctcttggccagagactgaaggcactgctccggaagctctccttggttgacctagcgggcctctcccaccagcataataggctggcgttctggatcaacacctactactcctgcatgatgaacgcatttctcgagcagggagcgcctagcgacccccgtatgctggtggccatgatgcccaaggcgaccatcaacgtcggcgggcgcgtgctgagcgccgtggcgatcgagcacttcattctccggctgccccactacgacgatgacgacgcaaaagcacgtgcacactgactgaagcgaggaatggcgacggccaggccgtgctcgggctggactggccggagccgctgctgacgttcgcgctctcctccggcagacggtcgtcgccggtgagggtctacgcggccggccggagtcgacgagaagctggaggcggtgaagcgggagtacctgcaggccgcggtgggcgtctcgccggcgagcgggctgccgaacctcctccttcactggtacctgctggctgcttgactccgccaaggacgtggaccgggtgtgcctgcagctgtcccgcgacccgtgtgcgccctgccggataccttctgcttctggccctgttgtcgtagaacgttggagtgtgtacacagttttggttgggccgtgattctttttgctgtttcaaccgtgaatttgttgtttgcttacgttgtacacacagttttcagttttggactacaggtctgcagagataaggccgtaagagcatgtacagtggagagacatcaaaacagttctccaagtacatgagacaacaaagagactctattgtacaattgagtgtctataaacgtagtttattaataaatacagaattaaat

SEQ ID NO: 3593 - DNA, 2417 bp, Zea Mays
tctgcccgctccgcgcaggtcgacacggttattttgatgcccacgcacgcggtccagtccagatcaagaacccaccacgccacgctcaaacgagacgacgacgaatccagccaccgtcaccatcgccaccgccgacacaatcccgccgcagccccccgcgcactggtgtccgaacccagcccaatccgcgctgccgaattctggtctctgccctgcccgccccgcggcgcggccttcccaccgcctctccgtcctgctcccatccgccgcgctcgctagcgaaaccgctccccgagctccaggtggtgtggtgcctggcgcgcttcacaacgccataaatgccacccatcaaggctcctcccgccatctagccctcttctccctgaccctgcgcccgcggctcggtgcggttaccgtttccttggcgcgcgcgtcagcactccgccgatgcacgcgccgttggaggccatgaacgggagggcgcggaggccggcggcggcgcgcggcgccgccccgaggaacgagaaagcgatggagaaggagcagaggaggccacccagctcgaagacggcgccggtgtccatgaaggcgtcgcccgcaaatgcgacgccgcaatgcatgaagaacaggaaaattgcactgcagcaggacgtggacaagctgaggatgaaactgcggcacgaggagaacgtccaccgagctctggagcgggcgttcacgaggccgctcggcgctctacctcgcctccctcctttcctgccgtctcaaacgttggagcttctggccgaagtcgccgtcctggaggaggaggtcgtccggctggaggagcaggtcgtcaatttccggcaaggactgtaccgggagaccgtcatcaccacctccatggcggcgaagagcgtgtacttcccggacggttaccggagcacgccggcacggcacaagccacctgcacaaccgcagagtccagagctgtctacctcgacgcgccaaggctccgatcaagatgccgctgattggctgccatctttgaggcgagccaccaatgcgatgtggacaccaagaaggcccggtcgttccctgagccaaggcgacagtccggggaaggagaaccagtcgttcggcagtggcactaattcgtgcagagagttcggcctggcgcccttgagtaaagtgccaggatgcagggtagtacaggtagcggagacacgcgcaggttttcagacaacgagtgcagtggaagaccacaaagctgttgagggcagcaatggcactggtccaagcaaggcctcaacggcggcgaacgaagtctcggaggagctactggcgtgcctgctggccatcttctcgcagaagagcgcatccagcggccaagacgaggagcgggtgtcgctgccgccggtctccggctcctgcggaagcagctcagcagacccctactgtgtcccagaattcgggtggcgggatattggccggtacaagcagttccggtcagtcgacatgaacacttgtgccggcgacgactccgctcttggccagagactgaagtgagtttccattgatcgggcactgctccggaagctctccttggttgacctagcgggcctctcccaccagcataataggctggcgttctggatcaacacctactactcctgcatgatgaacgcatttctcgagcagggagcgcctagcgacccccgtatgctggtggccatgatgcccaaggcgaccatcaacgtcggcgggcgcgtgctgagcgccgtggcgatcgagcacttcattctccggctgccccactacgacgatgacgacgcaaaagcacgtgcacactgactgaagcgaggaatggcgacggccaggccgtgctcgggctggactggccggagccgctgctgacgttcgcgctctcctccggcagacggtcgtcgccggtgagggtctacgcggccggccggagtcgacgagaagctggaggcggtgaagcgggagtacctgcaggccgcggtgggcgtctcgccggcgagcgggctgccgaacctcctccttcactggtacctgctggctgcttgactccgccaaggacgtggaccgggtgtgcctgcagctgtcccgcgacccgtgtgcgccctgccggataccttctgcttctggccctgttgtcgtagaacgttggagtgtgtacacagttttggttgggccgtgattctttttgctgtttcaaccgtgaatttgttgtttgcttacgttgtacacacagttttcagttttggactacaggtctgcagagataaggccgtaagagcatgtacagtggagagacatcaaaacagttctccaagtacatgagacaacaaagagactctattgtacaattgagtgtctataaacgtagtttattaataaatacagaattaaat

SEQ ID NO: 3594 - DNA, 2074 bp, Zea Mays
tctgcccgctccgcgcaggtcgacacggttattttgatgcccacgcacgcggtccagtccagatcaagaacccaccacgccacgctcaaacgagacgacgacgaatccagccaccgtcaccatcgccaccgccgacacaatcccgccgcagccccccgcgcactggtgtccgaacccagcccaatccgcgctgccgaattctggcgatggagaaggagcagaggaggccacccagctcgaagacggcgccggtgtccatgaaggcgtcgcccgcaaatgcgacgccgcaatgcatgaagaacaggaaaattgcactgcagcaggacgtggacaagctgaggatgaaactgcggcacgaggagaacgtccaccgagctctggagcgggcgttcacgaggccgctcggcgctctacctcgcctccctcctttcctgccgtctcaaacgttggagcttctggccgaagtcgccgtcctggaggaggaggtcgtccggctggaggagcaggtcgtcaatttccggcaaggactgtaccgggagaccgtcatcaccacctccatggcggcgaagagcgtgtacttcccggacggttaccggagcacgccggcacggcacaagccacctgcacaaccgcagagtccagagctgtctacctcgacgcgccaaggctccgatcaagatgccgctgattggctgccatctttgaggcgagccaccaatgcgatgtggacaccaagaaggcccggtcgttccctgagccaaggcgacagtccggggaaggagaaccagtcgttcggcagtggcactaattcgtgcagagagttcggcctggcgcccttgagtaaagtgccaggatgcagggtagtacaggtagcggagacacgcgcaggttttcagacaacgagtgcagtggaagaccacaaagctgttgagggcagcaatggcactggtccaagcaaggcctcaacggcggcgaacgaagtctcggaggagctactggcgtgcctgctggccatcttctcgcagaagagcgcatccagcggccaagacgaggagcgggtgtcgctgccgccggtctccggctcctgcggaagcagctcagcagacccctactgtgtcccagaattcgggtggcgggatattggccggtacaagcagttccggtcagtcgacatgaacacttgtgccggcgacgactccgctcttggccagagactgaaggcactgctccggaagctctccttggttgacctagcgggcctctcccaccagcataataggctggcgttctggatcaacacctactactcctgcatgatgaacgcatttctcgagcagggagcgcctagcgacccccgtatgctggtggccatgatgcccaaggcgaccatcaacgtcggcgggcgcgtgctgagcgccgtggcgatcgagcacttcattctccggctgccccactacgacgatgacgacgcaaaagcacgtgcacactgactgaagcgaggaatggcgacggccaggccgtgctcgggctggactggccggagccgctgctgacgttcgcgctctcctccggcagacggtcgtcgccggtgagggtctacgcggccggccggagtcgacgagaagctggaggcggtgaagcgggagtacctgcaggccgcggtgggcgtctcgccggcgagcgggctgccgaacctcctccttcactggtacctgctggctgcttgactccgccaaggacgtggaccgggtgtgcctgcagctgtcccgcgacccgtgtgcgccctgccggataccttctgcttctggccctgttgtcgtagaacgttggagtgtgtacacagttttggttgggccgtgattctttttgctgtttcaaccgtgaatttgttgtttgcttacgttgtacacacagttttcagttttggactacaggtctgcagagataaggccgtaagagcatgtacagtggagagacatcaaaacagttctccaagtacatgagacaacaaagagactctattgtacaattgagtgtctataaacgtagtttattaataaatacagaattaaat

SEQ ID NO: 3595 - DNA, 2504 bp, Zea Mays
tctgcccgctccgcgcaggtcgacacggttattttgatgcccacgcacgcggtccagtccagatcaagaacccaccacgccacgctcaaacgagacgacgacgaatccagccaccgtcaccatcgccaccgccgacacaatcccgccgcagccccccgcgcactggtgtccgaacccagcccaatccgcgctgccgaattctggtctctgccctgcccgccccgcggcgcggccttcccaccgcctctccgtcctgctcccatccgccgcgctcgctagcgaaaccgctccccgagctccaggtggtgtggtgcctggcgcgcttcacaacgccataaatgccacccatcaaggctcctcccgccatctagccctcttctccctgaccctgcgcccgcggctcggtgcggttaccgtttccttggcgcgcgcgtcagcactccgccgatgcacgcgccgttggaggccatgaacgggagggcgcggaggccggcggcggcgcgcggcgccgccccgaggaacgagaaagcgatggagaaggagcagaggaggccacccagctcgaagacggcgccggtgtccatgaaggcgtcgcccgcaaatgcgacgccgcaatgcatgaagaacaggaaaattgcactgcagcaggacgtggacaagctgaggatgaaactgcggcacgaggagaacgtccaccgagctctggagcgggcgttcacgaggccgctcggcgctctacctcgcctccctcctttcctgccgtctcaaacgttggagcttctggccgaagtcgccgtcctggaggaggaggtcgtccggctggaggagcaggtcgtcaatttccggcaaggactgtaccgggagaccgtcatcaccacctccatggcggcgaagagcgtgtacttcccggacggttaccggagcacgccggcacggcacaagccacctgcacaaccgcagagtccagagctgtctacctcgacgcgccaaggctccgatcaagatgccgctgattggctgccatctttgaggcgagccaccaatgcgatgtggacaccaagaaggcccggtcgttccctgagccaaggcgacagtccggggaaggagaaccagtcgttcggcagtggcactaattcgtgcagagagttcggcctggcgcccttgagtaaagtgccaggatgcagggtagtacaggtagcggagacacgcgcaggttttcagacaacgagtgcagtggaagaccacaaagctgttgagggcagcaatggcactggtccaagcaaggcctcaacggcggcgaacgaagtctcggaggagctactggcgtgcctgctggccatcttctcgcagaagagcgcatccagcggccaagacgaggagcgggtgtcgctgccgccggtctccggctcctgcggaagcagctcagcagacccctactgtgtcccagaattcgggtggcgggatattggccggtacaagcagttccggtcagtcgacatgaacacttgtgccggcgacgactccgctcttggccagagactgaagtgagtttccattgatcgggcactgctccggaagctctccttggttgacctagcgggcctctcccaccagcataataggctggcgttctggatcaacacctactactcctgcatgatgaacgcatttctcgagcagggagcgcctagcgacccccgtatgctggtggccatgatgcccaaggcgaccatcaacgtcggcgggcgcgtgctgagcgccgtggcgatcgagcacttcattctccggctgccccactacgacgatgacgacgcaaaagcacgtgcacactgactgaagcgaggaatggcgacggccaggccgtgctcgggctggactggccggagccgctgctgacgttcgcgctctcctccggcagacggtcgtcgccggtgctctggactggacgcccggtctgtcctccgagctgtctcctcaaggcaaatgattttagccgccaccgcttcttgtctctgaaggtgagggtctacgcggccggccggagtcgacgagaagctggaggcggtgaagcgggagtacctgcaggccgcggtgggcgtctcgccggcgagcgggctgccgaacctcctccttcactggtacctgctggctgcttgactccgccaaggacgtggaccgggtgtgcctgcagctgtcccgcgacccgtgtgcgccctgccggataccttctgcttctggccctgttgtcgtagaacgttggagtgtgtacacagttttggttgggccgtgattctttttgctgtttcaaccgtgaatttgttgtttgcttacgttgtacacacagttttcagttttggactacaggtctgcagagataaggccgtaagagcatgtacagtggagagacatcaaaacagttctccaagtacatgagacaacaaagagactctattgtacaattgagtgtctataaacgtagtttattaataaatacagaattaaat

SEQ ID NO: 3596 - DNA, 2796 bp, Zea Mays
tgcttttctgagccaaacgtggttctaccgcccgttggaaatgggctcggcgatggagaaggagcagaggaggccacccagctcgaagacggcgccggtgtccatgaaggcgtcgcccgcaaatgcgacgccgcaatgcatgaagaacaggaaaattgcactgcagcaggacgtggacaagctgaggatgaaactgcggcacgaggagaacgtccaccgagctctggagcgggcgttcacgaggccgctcggcgctctacctcgcctccctcctttcctgccgtctcaaacgttggagcttctggccgaagtcgccgtcctggaggaggaggtcgtccggctggaggagcaggtcgtcaatttccggcaaggactgtaccgggagaccgtcatcaccacctccatggcggcgaagagcgtgtacttcccggacggttaccggagcacgccggcacggcacaagccacctgcacaaccgcagagtccagagctgtctacctcgacgcgccaaggctccgatcaagatgccgctgattggctgccatctttgaggcgagccaccaatgcgatgtggacaccaagaaggcccggtcgttccctgagccaaggcgacagtccggggaaggagaaccagtcgttcggcagtggcactaattcgtgcagagagttcggcctggcgcccttgagtaaagtgccaggatgcagggtagtacaggtagcggagacacgcgcaggttttcagacaacgagtgcagtggaagaccacaaagctgttgagggcagcaatggcactggtccaagcaaggcctcaacggcggcgaacgaagtctcggaggagctactggcgtgcctgctggccatcttctcgcagaagagcgcatccagcggccaagacgaggagcgggtgtcgctgccgccggtctccggctcctgcggaagcagctcagcagacccctactgtgtcccagaattcgggtggcgggatattggccggtacaagcagttccggtcagtcgacatgaacacttgtgccggcgacgactccgctcttggccagagactgaaggcactgctccggaagctctccttggttgacctagcgggcctctcccaccagcataataggctggcgttctggatcaacacctactactcctgcatgatgaacgcatttctcgagcagggagcgcctagcgacccccgtatgctggtggccatgatgcccaaggcgaccatcaacgtcggcgggcgcgtgctgagcgccgtggcgatcgagcacttcattctccggctgccccactacgacgatgacgacgcaaaagcacgtaaggttgctggcctggccggctggccgcatcattcatcgccgccgtgtcgtcgtctttcctccactgaagacgctcgagcaccgtcgtatatataggactacgaatgagctctgacagtggacgttttggttggcatggggcatgccaggtgcacactgactgaagcgaggaatggcgacggccaggccgtgctcgggctggactggccggagccgctgctgacgttcgcgctctcctccggcagacggtcgtcgccggtgagtttcgatcggcttggttccgtccgtgccatgtacctgctagctgctgcatttcttttgctcgtagagcgctagctagctagctagctgtgccccgatccaggaccgactggcagaaggaaaaggtgccgtccagtccttgctgctccctttcaactgctattgattgataggtaccgagccaagcatgtgccagtgttgagcaagtcgcattttaattagtaccgcgcagcttataaataggggtacaaaccgaaactgttagttgaactttaataagaagtgaggagacaatattctaatatccgtttatccattggagtagaacatttagttcatatatataccctaatatatggagtaaataatcatcgggaatcgagtcgcgggtacccgttgtcatgtctgctacgggcttggatgactgcaatgcaaggacgggcttggatgactgcaatgcaaggaccaaggagcacataaacatcactgttcatttatattataatccagctgtttgtatagtctgctgtaattctccgtcccatgagagctgcctgttcatcaaagcactttggccatgaaattgagagacatcatgacacaggcaattacgacggcactttttacttttttaggtgctctggactggacgcccggtctgtcctccgagctgtctcctcaaggcaaatgattttagccgccaccgcttcttgtctctgaaggtgagggtctacgcggccggccggagtcgacgagaagctggaggcggtgaagcgggagtacctgcaggccgcggtgggcgtctcgccggcgagcgggctgccgaacctcctccttcactggtacctgctggctgcttgactccgccaaggacgtggaccgggtgtgcctgcagctgtcccgcgacccgtgtgcgccctgccggataccttctgcttctggccctgttgtcgtagaacgttggagtgtgtacacagttttggttgggccgtgattctttttgctgtttcaaccgtgaatttgttgtttgcttacgttgtacacacagttttcagttttggactacaggtctgcagagataaggccgtaagagcatgtacagtggagagacatcaaaacagttctccaagtacatgagacaacaaagagactctattgtacaattgagtgtctataaacgtagtttattaataaatacagaattaaat

SEQ ID NO: 3597 - DNA, 696 bp, Zea Mays
cacctcccccctggctgcggggctgttaaaagcaacggagaaaccgagggagaggggacaacggacaaccgcccttctccatccggtctccaagccaacgactcgagtcgttcaaaactggacacagcagtgaaccggagctgcttgcttgctgtctcgccaagaagcaagagtaggaggagcagctggtctctcgccaagtcgcgcctctccctcctctcttctcttttctccctcgcgtcgcgcgctccacatgctgagcctgaggtcagtatccggctccaactcctcgaggggcatcgccgccgtggtcggcgtcggccccaggctgggctcggcggtggcgcgcaagttcgcctccgagggctacaccatcgccatcctctcgcgcgacctcgagaagctgtcgcagctggcggaggagatcgcgcaggcggccaaggcgcaggtgttcgcgctgcgggtggactgcgccgacgcccggtccgtgcgcgaggccttcgagggcgtgctctccctcggccccgtcgaggtgctcgtctacaacgcctgcgagccgcctgcagccaacgaggacgcgcgccccgcgcccttcctcgccgtcacccccgacgccttccaccgcgccctcgccgtgtccgccggaggggccttccactgcgcgcaacagtcactgcgcgtgccgccctgcgctgc

SEQ ID NO: 3598 - DNA, 1681 bp, Zea Mays
cacctcccccctggctgcggggctgttaaaagcaacggagaaaccgagggagaggggacaacggacaaccgcccttctccatccggtctccaagccaacgactcgagtcgttcaaaactggacacagcagtgaaccggagctgcttgcttgctgtctcgccaagaagcaagagtaggaggagcagctggtctctcgccaagtcgcgcctctccctcctctcttctcttttctccctcgcgtcgcgcgctccacatgctgagcctgaggtcagtatccggctccaactcctcgaggggcatcgccgccgtggtcggcgtcggccccaggctgggctcggcggtggcgcgcaagttcgcctccgagggctacaccatcgccatcctctcgcgcgacctcgtgagtaagtaagcaagtgacacgagaggtgcgtgcgcgtggttgcagagaagctgtcgcagctggcggaggagatcgcgcaggcggccaaggcgcaggtgttcgcgctgcgggtggactgcgccgacgcccggtccgtgcgcgaggccttcgagggcgtgctctccctcggccccgtcgaggtgctcgtctacaacgcctgcgagccgcctgcagccaacgaggacgcgcgccccgcgcccttcctcgccgtcacccccgacgccttccaccgcgccctcgccgtgtccgccggaggggccttccactgcgcgcaacaggtcgctgacgaggagcagcagggccggcggcgacacggcgggcgcgggcgcggacccggacgcggtggcgcagagctactggcacgtccacgcccaggacaagagcgcttggacgcaggagatggacatccggtcgccgtccttcatgtagcagcagcagctagccgccgctgctgtacgtacggtccctggaatctttagtggactgctaccggccgggcgcgttcccgatcaagcaggagagagggacaagtgggtcttgttgtgtatgtatacgtcgtgccctgtaaatcgtgtgtgcgcgcgcgcggctgcgggccgggaatcgtgtccccgtcccgcgccgcacgttggcgcggctctagctagcccccccttttctcatcatttggtgtgagatgcccgtcgctggtccgaccgcgggttctgtgcgtcgattgcggccgagagcgaccgcgcgtgcgtctccgtcgcatcctgtacccgtcgccgccgccgccggcgaccggcctccggaaagctctcatgtgtgatggatgtgtgcgcccgttgttacacatgagctagtccgtatatgtggaggattgtgcttagtggtcgctacccacttgaattgagcagcatccgtgagactctgactattgtatcctgggctacgtacgtgcatactgcatacatggttggttgacttcgcctctctttgtactggccgttatggctgcacagagtattccagccgcacttttaggtggaagagaagggctgcatttgtgccaagcgtggcacgcgacgagtggttaccagtacaggactgcaatcatggtgtacttttggacgaaagggacgtcatgatgtgtccctggaagctccagcttccacgtcgacgcacagcatctgtcggtgctggtttcgctcgcagagcctcacaagtcaagtgccttcagaagcagaagcaactactgac

SEQ ID NO: 3599 - DNA, 594 bp, Zea Mays
cttcccgcccgggaacagggaccaaaccccgtggacctccctcgtttggaaagaagcccagcccacaaaaaaacgtgcattcggttaacccccgtatggaccgtatcccggtatttcctcttcgttccagaccgagaaccacgcccggtccctgcggggtggaaaatatctcacgcaaaggagctgaggcatcacaaatgaagggcacgaggcggcggcggtggcggcgacggctctccggcgttgatctaccctgcgtccgtgttcttataggagtggcccctctggagttgtatgtggagttgtaaactctcttttatcctagaagagtttctaaggcgcggtataagtccatgatcatagactaagaggatttgactctaattactatccgttttatttatgtagtcctatgagaacatagagtatttgcacattgctttattagtttattaaagttaaagattgtatgtgatgagtatgtatcaactcttgttggaagtgtcttgcaatttccaaccatatattgtgtgtgtatatatatattgtgtatatacaatggaagcttgaaaattgtgtgaacttgagttccct

SEQ ID NO: 3600 - DNA, 1597 bp, Zea Mays
ccgatttcttctcctacctacaagcggttgaaaggaacagcttgctttgtgtgccatcggaatcgcgaaatggcaagcgctagttctgcacaaggcgcacacgagacagaccctgagaaggtgaagctcgtcaccgtcctgagcatcgacggtggcggcgtcagagggatcatccccgccaccatcctcgccttcctagaagagaagctgcaagaactggatggaccggacgctaggatcgccgactacttcgacgtcgttgccggcacgagcaccggtggtctcctggcggcgatgctcacggcccctggccaggaccatgacggacgtcgacggccactcttcgacgccaaggatctggcgcagttctacatcgaccactcgcccaaaatcttcccacagaagaactggatcctgtccaagatcgccggcacgctgaggatggtgagggggcccaagtacgacggcaagtacctccatggcctgcttcgccagcacctcggcgacatgaggctggacaaggcgctcaccaacgtggtcatcccgaccttcgacatcgcgctcctgcagcccacgattttctcaagcttcgagctgaagcgccggccgtcgaagaatgcactcctggcggacatctgcatcagcacctcggccgcgccgaccttcttcccggcacactacttcgagacggaagacggggacgggaggaccagggccttcaacctcgtcgacggaggcctcgccgctaacaatcccacactgtgcgccatgggccaggtgtccaaggacatcatcctcggggacgacgacttcttcccggtgaagccggcggactacggcaagttcatggtcatctccgttggctgtgggtcgaaccgggaccgcaggtacagcgccaaggccgccgccaagtggggcatcttcaactggctcatcaaggacggcacggctcccatcatcgacatgttcaactccgccagcgccgacatggtcgacatccacctctgcgtcctcttcagggccctccattccagcgaaaactacctgcgcattcagtatgatcaactgacgggcagcgcgggctccatcgacgactgctccaaggagaacatggataagctggtgcagatcgggaaggaccttctcagccagaacgtctcccgggtggacctagagactggcaagaacatggacgtccccagcgcgggcacaaacgccgagcagctcgccaagttcgcgaagcagctctctgacgagcgacgccggcgccagaagctttcaaagtagcggtactgaaaagaaaaaaagaagaaataaagattttgtaacgacgcttcaactgccgatcatgcatagggcattggtttaaacattctccagctgcttgcactttcatgctctggaacgtgtgttccgttcatttcatggcgcttttgttgtcacgtagtattattacctggtttgcattgatcagatactatcaataaggtcatcggttttacttgtgaaagttgctttgtcaggtcttaagtgcatgcacacagcagcactcatcatttttctgtgcgaatacgaggttgaaagattggtttgtgat

SEQ ID NO: 3601 - DNA, 1845 bp, Zea Mays
cttctcctacctacaagcggttgaaaggaacaggtaggcttctaccgaggagagaaatataatcaggtcagctggccatcacagcatcactcgcattactttgacgaccctgtataaccctgcagctgaggcaacattgttgcttcttcctcgagttaatccaggctcctgcatgtgtttatataaagacgaccttaataatgctcgctctgcttctcagtactacctccacgacatcgtgttccttgtcaagttctcataactcatagtgcatacatacatatatagcttgctttgtgtgccatcggaatcgcgaaatggcaagcgctagttctgcacaaggcgcacacgagacagaccctgagaaggtgaagctcgtcaccgtcctgagcatcgacggtggcggcgtcagagggatcatccccgccaccatcctcgccttcctagaagagaagctgcaagaactggatggaccggacgctaggatcgccgactacttcgacgtcgttgccggcacgagcaccggtggtctcctggcggcgatgctcacggcccctggccaggaccatgacggacgtcgacggccactcttcgacgccaaggatctggcgcagttctacatcgaccactcgcccaaaatcttcccacagaagaactggatcctgtccaagatcgccggcacgctgaggatggtgagggggcccaagtacgacggcaagtacctccatggcctgcttcgccagcacctcggcgacatgaggctggacaaggcgctcaccaacgtggtcatcccgaccttcgacatcgcgctcctgcagcccacgattttctcaagcttcgagctgaagcgccggccgtcgaagaatgcactcctggcggacatctgcatcagcacctcggccgcgccgaccttcttcccggcacactacttcgagacggaagacggggacgggaggaccagggccttcaacctcgtcgacggaggcctcgccgctaacaatcccacactgtgcgccatgggccaggtgtccaaggacatcatcctcggggacgacgacttcttcccggtgaagccggcggactacggcaagttcatggtcatctccgttggctgtgggtcgaaccgggaccgcaggtacagcgccaaggccgccgccaagtggggcatcttcaactggctcatcaaggacggcacggctcccatcatcgacatgttcaactccgccagcgccgacatggtcgacatccacctctgcgtcctcttcagggccctccattccagcgaaaactacctgcgcattcagtatgatcaactgacgggcagcgcgggctccatcgacgactgctccaaggagaacatggataagctggtgcagatcgggaaggaccttctcagccagaacgtctcccgggtggacctagagactggcaagaacatggacgtccccagcgcgggcacaaacgccgagcagctcgccaagttcgcgaagcagctctctgacgagcgacgccggcgccagaagctttcaaagtagcggtactgaaaagaaaaaaagaagaaataaagattttgtaacgacgcttcaactgccgatcatgcatagggcattggtttaaacattctccagctgcttgcactttcatgctctggaacgtgtgttccgttcatttcatggcgcttttgttgtcacgtagtattattacctggtttgcattgatcagatactatcaataaggtcatcggttttacttgtgaaagttgctttgtcaggtcttaagtgcatgcacacagcagcactcatcatttttctgtgcgaatacgaggttgaaagattggtttgtgat

SEQ ID NO: 3602 - DNA, 1325 bp, Zea Mays
ctatggcccggcttcggtcgtggtcgtttcatggaatgtcttaccgtgcaggcggtgacaacaaagggacctcaaagaagacctcttctagaaaagccagaaaacaagaaggtctgaagcaacaatataatggagaggaagaccaaaatggtgggagcaatgcaactactggaggtgctcggaaaaaaaagggtgggcatgtaagacaatcaagtgctactcatgatgccattgataaaaattatagtggcagttcagctgaaggtttaaggaacaagagacagaagtctgctgctcaaagcgcttcggtaggcagaagggaagggttgaggcaacgatctgatgccaagcaacatccagatgcagccgagggcagtacagaaccactcgctgatgtacctggaagcgatggtgcagctcaaggttcaatgcaacatggaacttcggctcctcataccgaaataaaagcgatggtcaggaacatactgttcaaggacatcgttgacaaggagcacgatgctgagatggcttatgtggaagaagtgatcaatggcatctgtaacgctactgacagcatggtcggcggcggcggcggtgatgcttccgcgaaaggtggacgaggctccaagcagagcggcagcggagtggagggtgagtctagcaatgccacagaaaggcgaagagatgaagcaactgagaatgccctcgccgtgaaagggaatacccctgtaagttgatcccatttgcccacacccgcacttcccaactgcttttatgacctcccaaatttttacttgctagtttgacgaaatttcctcagagcaggggaacaatggcgatgacgccggggcagcttagcgcacgccaaaataggcagaacaggatcatgcaaaccctagctctgatccctccatcaggatctccgtttggcaggaatgaagaggttgcagccagccgtcaaaaactctaattcacttatgagcgccctaagaaacagtccgtgagcccccctagcgttttgcagtcctgtcctctgcgcaccatgcctagtatcgctgctgccattcagcttgcttttgggagacgcctatatattgcgcctgatctgctgaattacgtagcagttgctattaatctatccagaagacttggactgagtttgattgctatgtaaccacgcggttggttctgtacttctacgcaactgtgcgacattggccaatgtggtgccgttgaaccttatgtattattgtgcacccccatcaccatgttattactagcccccttcggcatttcagttcagcattcagcagttttgcatgttc

SEQ ID NO: 3603 - DNA, 1530 bp, Zea Mays
tcttcacaggcatcgcccaagagcaaaacatctctaatacacccaaagcaaatacgcacgcagtgatagccatggctcgtggcggatctggttgccgtcttctcgccctgctcctagtcttgactgccttcaatggcagctttgcagctcgacatctcttggacacagcagctgcgccagaggccacgcctgctcagccgtccattccagcggttccaaccaaactgcctccagtgccgaccataccagcggttccaaccacgctgacgctgcctccaatgccttccattccggaggtccccaagatgacaatcccaccaatcccgtccattcctatcccaaagctagccctgccaccaacagctgctggcgcaatcccatctctcccaaacccggtggttccaaccaccgtaccagctatttctgcagtcccggttaccctgccaccaatgccctcgattcccactaccttgccatccattccaactacgattccaacaacaatccctaccattcccggactccaggtgcctccattcaccgccccatccccacaaaccaccagcccttgaagttcgatgtagcaggagacttttctttacatgctgttagtcaggagtttggctcatcgtatatggtcgttttcagtgtgtgtgccatgtttgttctgctattttgatgatagtggctagcatgtggtgtgcttgtgattgcagccagtctattgtaccactttgttttgctgttattgaagtattacttggtctttatacattactgagccaaatgagattcctacattattcttgtccagtaacactattggcagcatgatgttcctagtgcatataccaaagctaaaaaataccaattcccctgtgcggaatgatctcctcaaaattaaacatatctatctaaaaggaaggggaatgatagagggtaacggaagcaatactgacttttggtctgagacttgtggcaacgtgtccctgaaggacaatttccaggcttgttcaatatttgcaatgaacaagaatgttctgcacagtaaatccatagtaagagatgcacttgaccttaagactatggtttgattaagagttacaaccagcaactaacaagattgcatgacatagggggtgtttgtttgggattataatctggccagattatataatccaacacattttgaactaagctgaccagcaatgtgtttgtttgggttctgcggcgacaaactggtggcgccgtgctggcgcacggcagctggctggaacgtgaaagagatgaggagataaatcccttctttatattaactctcctctgtcctttatttgttacaatcctatggctcaacaactaacaatgcatctcctatctagtaacaactcctaatctaagaggatctcctatttttcctccctagtaaaaaatcctatcctaactaggccgacggcttagcttcttgtggcctgctatagtcttaggcctcctggcatataattgccggtcataaacagatagtgtggc

SEQ ID NO: 3604 - DNA, 1428 bp, Zea Mays
tctcacgctctctcctccatcccaacgtctccagtctcgcgctctctccccccaaaaacctcgtcttcctccgctcgtctgcgttctcggccatcggtactctccaccggcgctccagagttcatcggtactctctagcggcgctccagagttccagcatgccatagcgtacgccgagggcgataaataatatggtgcaaaatccagcattaatgtttgggagcccaagattcagcaggctaacaaatttggcttgtcctagctctggatctttgggggttcatttaaggaggatgtcaacagtatagaggctggttgatagaaatagaataatgcgtaccaggccacagggtgctagatgttgtgctctggttttattcagataaacaccaagatggctatcgcgactagcattctcaacatctcaaactacgcaggctcccaatgtgatatcagcatcttgatctagaaggttccatggtacgggaggccgggagctggaggttggagggataaaaacggtcggaaacggtatttattcgggcagcggatttctcgagggactacgacgggatgcctctagatgtacaaccccgactcccacttcttcctcttcctcatgtactggaccgattgcagcctagctggcgcgcttgggctactcaagatcctaatctacaaggtggtttctgctccacacaattcctgcgatgtggtgttaccgtgttacatgctcaggaagctttgttatgcaggtttatgtagatgggagtaccaccgtgacttgggagctaacttggataatgatctcttagttctcaagatcagttccaataacatgtggcactactccagtgatatgaccctccttattataactgccaacatataagttacctttcttacaatatattttagtccgctacagcgcccgatagggtgctattttttctagtttaattaaggctcccttggaacaatggatataaaagtactgtgtccatcctatgatataaggcactgtaaccaatttttagttttgttccatgatataagggcatgtacaagctagatgttataatggtgtttgggatagctccaggttctagctccagtgtggagtatttttaatctaaataataaataaaatgacttatctaaatgtattttaaaggtttacagttctagctccacgattttctcaagcatctagttacatgctctactaactccaccaatttttctggagctaaagttttccaaagagggcttatgttttggttctcaagacaatagatagtagatacatctaagaatctctatacaaccaatgtaattaagggcttatttgggaacacggtatttttgtagttccaagacaatattgtggtatttgtgcataccatggtattttagactaaatgtttg

SEQ ID NO: 3605 - DNA, 1415 bp, Zea Mays
ctctctcctccatcccaacgtctccagtctcgcgctctctccccccaaaaacctcgtcttcctccgctcgtctgcgttctcggccatcggtactctccaccggcgctccagagttcatcggtactctctagcggcgctccagagttccagcatgccatagcgtacgccgagggcgataaataatatggtgcaaaatccagcattaatgtttgggagcccaagattcagcaggctaacaaatttggcttgtcctagctctggatctttgggggttcatttaaggaggatgtcaacagtatagaggctggttgatagaaatagaataatgcgtaccaggccacagggtgctagatgttgtgctctggttttattcagataaacaccaagatggctatcgcgactagcattctcaacatctcaaactacgcaggctcccaatgtgatatcagcatcttgatctagaagggcagcggatttctcgagggactacgacgggatgcctctagatgtacaaccccgactcccacttcttcctcttcctcatgtactggaccgattgcagcctagctggcgcgcttgggctactcaagatcctaatctacaaggtttatgtagatgggagtaccaccgtgacttgggagctaacttggataatgatctcttagttctcaagactgtaaattaccttttcctgcaccaagttgtgaagttgtttcctctgagatgaagcaaaaccaataagtatcttttcaaatttcagaaatcgcactgaagccatgagtgcttcatggaattcagtcatctgttgggatcagttccaataacatgtggcactactccagtgatatgaccctccttattataactgccaacatataagttacctttcttacaatatattttagtccgctacagcgcccgatagggtgctattttttctagtttaattaaggctcccttggaacaatggatataaaagtactgtgtccatcctatgatataaggcactgtaaccaatttttagttttgttccatgatataagggcatgtacaagctagatgttataatggtgtttgggatagctccaggttctagctccagtgtggagtatttttaatctaaataataaataaaatgacttatctaaatgtattttaaaggtttacagttctagctccacgattttctcaagcatctagttacatgctctactaactccaccaatttttctggagctaaagttttccaaagagggcttatgttttggttctcaagacaatagatagtagatacatctaagaatctctatacaaccaatgtaattaagggcttatttgggaacacggtatttttgtagttccaagacaatattgtggtatttgtgcataccatggtattttagactaaatgtttg

SEQ ID NO: 3606 - DNA, 1113 bp, Zea Mays
ctctctcctccatcccaacgtctccagtctcgcgctctctccccccaaaaacctcgtcttcctccgctcgtctgcgttctcggccatcggtactctccaccggcgctccagagttcatcggtactctctagcggcgctccagagttccagaaatagaataatgcgtaccaggccacagggtgctagatgttgtgctctggttttattcagataaacaccaagatggctatcgcgactagcattctcaacatctcaaactacgcaggctcccaatgtgatatcagcatcttgatctagaagggcagcggatttctcgagggactacgacgggatgcctctagatgtacaaccccgactcccacttcttcctcttcctcatgtactggaccgattgcagcctagctggcgcgcttgggctactcaagatcctaatctacaaggtttatgtagatgggagtaccaccgtgacttgggagctaacttggataatgatctcttagttctcaagatcagttccaataacatgtggcactactccagtgatatgaccctccttattataactgccaacatataagttacctttcttacaatatattttagtccgctacagcgcccgatagggtgctattttttctagtttaattaaggctcccttggaacaatggatataaaagtactgtgtccatcctatgatataaggcactgtaaccaatttttagttttgttccatgatataagggcatgtacaagctagatgttataatggtgtttgggatagctccaggttctagctccagtgtggagtatttttaatctaaataataaataaaatgacttatctaaatgtattttaaaggtttacagttctagctccacgattttctcaagcatctagttacatgctctactaactccaccaatttttctggagctaaagttttccaaagagggcttatgttttggttctcaagacaatagatagtagatacatctaagaatctctatacaaccaatgtaattaagggcttatttgggaacacggtatttttgtagttccaagacaatattgtggtatttgtgcataccatggtattttagactaaatgtttg

SEQ ID NO: 3607 - DNA, 1213 bp, Zea Mays
cctccatcccaacgtctccagtctcgcgctctctccccccaaaaacctcgtcttcctccgctcgtctgcgttctcggccatcggtactctccaccggcgctccagagttcatcggtactctctagcggcgctccagagttccaggtaatcgcgctccctcctccaccccatccgctccatcccattccggtttcccattgctaaggtttacggtagacacagtgacggtggcggcggcgccgacttctccggtagtactcgctgtcctcctccctcaccttgcgcgccgcggactcggaggaggaagacaacccctgggtgcttaccaacgcgccagtggcctcctcggcgccggagaaccgcggcggccggtccgtggagtcgtcactcggcgcctagatgtatctgctgctcatctactggtgcgtcctgcccgcatttccgccaccagaaatagaataatgcgtaccaggccacagggtgctagatgttgtgctctggttttattcagataaacaccaagatggctatcgcgactagcattctcaacatctcaaactacgcaggctcccaatgtgatatcagcatcttgatctagaaggttccatggtacgggaggccgggagctggaggttggagggataaaaacggtcggaaacggtatttattcgggcagcggatttctcgagggactacgacgggatgcctctagatgtacaaccccgactcccacttcttcctcttcctcatgtactggaccgattgcagcctagctggcgcgcttgggctactcaagatcctaatctacaaggtttatgtagatgggagtaccaccgtgacttgggagctaacttggataatgatctcttagttctcaagactgtaaattaccttttcctgcaccaagttgtgaagttgtttcctctgagatgaagcaaaaccaataagtatcttttcaaatttcagaaatcgcactgaagccatgagtgcttcatggaattcagtcatctgttggggtacaaatatgaactatagtttgcccccaaattttctctctttattttttcagtgcattaacattgatagtattggttttttcctaggaaattatgtctaaatagaagttcataactaattctgtaactttgatattaagatgggtgttcgcctgatgatttttaaatggaaaaggagaatacgatgagttttaaaa

SEQ ID NO: 3608 - DNA, 1479 bp, Zea Mays
cctccatcccaacgtctccagtctcgcgctctctccccccaaaaacctcgtcttcctccgctcgtctgcgttctcggccatcggtactctccaccggcgctccagagttcatcggtactctctagcggcgctccagagttccagacacagtgacggtggcggcggcgccgacttctccggtagtactcgctgtcctcctccctcaccttgcgcgccgcggactcggaggaggaagacaacccctgggtgcttaccaacgcgccagtggcctcctcggcgccggagaaccgcggcggccggtccgtggagtcgtcactcggcgcctagatgtatctgctgctcatctactggtgcgtcctgcccgcatttccgccaccagaaatagaataatgcgtaccaggccacagggtgctagatgttgtgctctggttttattcagataaacaccaagatggctatcgcgactagcattctcaacatctcaaactacgcaggctcccaatgtgatatcagcatcttgatctagaagggcagcggatttctcgagggactacgacgggatgcctctagatgtacaaccccgactcccacttcttcctcttcctcatgtactggaccgattgcagcctagctggcgcgcttgggctactcaagatcctaatctacaaggtttatgtagatgggagtaccaccgtgacttgggagctaacttggataatgatctcttagttctcaagactgtaaattaccttttcctgcaccaagttgtgaagttgtttcctctgagatgaagcaaaaccaataagtatcttttcaaatttcagaaatcgcactgaagccatgagtgcttcatggaattcagtcatctgttgggatcagttccaataacatgtggcactactccagtgatatgaccctccttattataactgccaacatataagttacctttcttacaatatattttagtccgctacagcgcccgatagggtgctattttttctagtttaattaaggctcccttggaacaatggatataaaagtactgtgtccatcctatgatataaggcactgtaaccaatttttagttttgttccatgatataagggcatgtacaagctagatgttataatggtgtttgggatagctccaggttctagctccagtgtggagtatttttaatctaaataataaataaaatgacttatctaaatgtattttaaaggtttacagttctagctccacgattttctcaagcatctagttacatgctctactaactccaccaatttttctggagctaaagttttccaaagagggcttatgttttggttctcaagacaatagatagtagatacatctaagaatctctatacaaccaatgtaattaagggcttatttgggaacacggtatttttgtagttccaagacaatattgtggtatttgtgcataccatggtattttagactaaatgtttg

SEQ ID NO: 3609 - DNA, 1271 bp, Zea Mays
ctccatcccaacgtctccagtctcgcgctctctccccccaaaaacctcgtcttcctccgctcgtctgcgttctcggccatcggtactctccaccggcgctccagagttcatcggtactctctagcggcgctccagagttccagcatgccatagcgtacgccgagggcgataaataatatggtgcaaaatccagcattaatgtttgggagcccaagattcagcaggctaacaaatttggcttgtcctagctctggatctttgggggttcatttaaggaggatgtcaacagtatagaggctggttgatagaaatagaataatgcgtaccaggccacagggtgctagatgttgtgctctggttttattcagataaacaccaagatggctatcgcgactagcattctcaacatctcaaactacgcaggctcccaatgtgatatcagcatcttgatctagaagggcagcggatttctcgagggactacgacgggatgcctctagatgtacaaccccgactcccacttcttcctcttcctcatgtactggaccgattgcagcctagctggcgcgcttgggctactcaagatcctaatctacaaggtttatgtagatgggagtaccaccgtgacttgggagctaacttggataatgatctcttagttctcaagatcagttccaataacatgtggcactactccagtgatatgaccctccttattataactgccaacatataagttacctttcttacaatatattttagtccgctacagcgcccgatagggtgctattttttctagtttaattaaggctcccttggaacaatggatataaaagtactgtgtccatcctatgatataaggcactgtaaccaatttttagttttgttccatgatataagggcatgtacaagctagatgttataatggtgtttgggatagctccaggttctagctccagtgtggagtatttttaatctaaataataaataaaatgacttatctaaatgtattttaaaggtttacagttctagctccacgattttctcaagcatctagttacatgctctactaactccaccaatttttctggagctaaagttttccaaagagggcttatgttttggttctcaagacaatagatagtagatacatctaagaatctctatacaaccaatgtaattaagggcttatttgggaacacggtatttttgtagttccaagacaatattgtggtatttgtgcataccatggtattttagactaaatgtttg

SEQ ID NO: 3610 - DNA, 1431 bp, Zea Mays
ctccagtctcgcgctctctccccccaaaaacctcgtcttcctccgctcgtctgcgttctcggccatcggtactctccaccggcgctccagagttcatcggtactctctagcggcgctccagagttccagaaatagaataatgcgtaccaggccacagggtgctagatgttgtgctctggttttattcagataaacaccaagatggctatcgcgactagcattctcaacatctcaaactacgcaggctcccaatgtgatatcagcatcttgatctagaagctgggttccatggtgtgggtgtggttttggcgatagatggagactcaagcgtgggtggttgtgggcacgaggagccacacgaaagctggatgccacagcgaggaggaggaagagaaggagatggtcgtctcctccatatgcgcaagtcgttcaaggactcgctcaaggtgctcgaggccgacatccaacatgccaacaccctggcagcggatttctcgagggactacgacgggatgcctctagatgtacaaccccgactcccacttcttcctcttcctcatgtactggaccgattgcagcctagctggcgcgcttgggctactcaagatcctaatctacaaggtttatgtagatgggagtaccaccgtgacttgggagctaacttggataatgatctcttagttctcaagactgtaaattaccttttcctgcaccaagttgtgaagttgtttcctctgagatgaagcaaaaccaataagtatcttttcaaatttcagaaatcgcactgaagccatgagtgcttcatggaattcagtcatctgttgggatcagttccaataacatgtggcactactccagtgatatgaccctccttattataactgccaacatataagttacctttcttacaatatattttagtccgctacagcgcccgatagggtgctattttttctagtttaattaaggctcccttggaacaatggatataaaagtactgtgtccatcctatgatataaggcactgtaaccaatttttagttttgttccatgatataagggcatgtacaagctagatgttataatggtgtttgggatagctccaggttctagctccagtgtggagtatttttaatctaaataataaataaaatgacttatctaaatgtattttaaaggtttacagttctagctccacgattttctcaagcatctagttacatgctctactaactccaccaatttttctggagctaaagttttccaaagagggcttatgttttggttctcaagacaatagatagtagatacatctaagaatctctatacaaccaatgtaattaagggcttatttgggaacacggtatttttgtagttccaagacaatattgtggtatttgtgcataccatggtattttagactaaatgtttg

SEQ ID NO: 3611 - DNA, 1210 bp, Zea Mays
ccccccaaaaacctcgtcttcctccgctcgtctgcgttctcggccatcggtactctccaccggcgctccagagttcatcggtactctctagcggcgctccagagttccagaaatagaataatgcgtaccaggccacagggtgctagatgttgtgctctggttttattcagataaacaccaagatggctatcgcgactagcattctcaacatctcaaactacgcaggctcccaatgtgatatcagcatcttgatctagaagggcagcggatttctcgagggactacgacgggatgcctctagatgtacaaccccgactcccacttcttcctcttcctcatgtactggaccgattgcagcctagctggcgcgcttgggctactcaagatcctaatctacaaggtttatgtagatgggagtaccaccgtgacttgggagctaacttggataatgatctcttagttctcaagactgtaaattaccttttcctgcaccaagttgtgaagttgtttcctctgagatgaagcaaaaccaataagtatcttttcaaatttcagaaatcgcactgaagccatgagtgcttcatggaattcagtcatctgttgggatcagttccaataacatgtggcactactccagtgatatgaccctccttattataactgccaacatataagttacctttcttacaatatattttagtccgctacagcgcccgatagggtgctattttttctagtttaattaaggctcccttggaacaatggatataaaagtactgtgtccatcctatgatataaggcactgtaaccaatttttagttttgttccatgatataagggcatgtacaagctagatgttataatggtgtttgggatagctccaggttctagctccagtgtggagtatttttaatctaaataataaataaaatgacttatctaaatgtattttaaaggtttacagttctagctccacgattttctcaagcatctagttacatgctctactaactccaccaatttttctggagctaaagttttccaaagagggcttatgttttggttctcaagacaatagatagtagatacatctaagaatctctatacaaccaatgtaattaagggcttatttgggaacacggtatttttgtagttccaagacaatattgtggtatttgtgcataccatggtattttagactaaatgtttg

SEQ ID NO: 3612 - DNA, 1206 bp, Zea Mays
atagcacgtgttcgaagggtacgatcccaatcataagaaataagaaggatgacttgcttcgagcagctccattaagcgcatgccatagcgtacgccgagggcgataaataatatggtgcaaaatccagcattaatgtttgggagcccaagattcagcaggctaacaaatttggcttgtcctagctctggatctttgggggttcatttaaggaggatgtcaacagtatagaggctggttgatagaaatagaataatgcgtaccaggccacagggtgctagatgttgtgctctggttttattcagataaacaccaagatggctatcgcgactagcattctcaacatctcaaactacgcaggctcccaatgtgatatcagcatcttgatctagaagggcagcggatttctcgagggactacgacgggatgcctctagatgtacaaccccgactcccacttcttcctcttcctcatgtactggaccgattgcagcctagctggcgcgcttgggctactcaagatcctaatctacaaggtttatgtagatgggagtaccaccgtgacttgggagctaacttggataatgatctcttagttctcaagatcagttccaataacatgtggcactactccagtgatatgaccctccttattataactgccaacatataagttacctttcttacaatatattttagtccgctacagcgcccgatagggtgctattttttctagtttaattaaggctcccttggaacaatggatataaaagtactgtgtccatcctatgatataaggcactgtaaccaatttttagttttgttccatgatataagggcatgtacaagctagatgttataatggtgtttgggatagctccaggttctagctccagtgtggagtatttttaatctaaataataaataaaatgacttatctaaatgtattttaaaggtttacagttctagctccacgattttctcaagcatctagttacatgctctactaactccaccaatttttctggagctaaagttttccaaagagggcttatgttttggttctcaagacaatagatagtagatacatctaagaatctctatacaaccaatgtaattaagggcttatttgggaacacggtatttttgtagttccaagacaatattgtggtatttgtgcataccatggtattttagactaaatgtttg

SEQ ID NO: 3613 - DNA, 2468 bp, Zea Mays
cgctccggatgtctccagtttcggcgtaccgccgcgtgcgcttcccaaaacactcccgtctccccgtgcccgatacaaagcgcgagggggcgaaagcacgccacaactgcaccgcactctctgcctccctccgtccgtccgtcctcccgtcctcttccttgtgccttgtcctgcttctccactcgccactgccgcattctgcccaagtttgccgtactgccgcattccaccagccacccaccaggccaccacccagcactccagccgccagaacagagtctacggcgccgccgtcgcacgacaggagagggagagggagagagacgcgggctttgacttgccgccggtgcgtccgtgcgtgcctggtgggaggagtgggagacgccggtacagtacaggagccatggcgccgagctgctacgacgcggcagcgtccatgctcctctgcgccgaggagcacagcagcatcctgtggtacgacgaggaggaggaggagctggaggcggtcgggagaaggagaggccggtcgccgggctacggggacgacttcggcgcggacttgttcccgccgcagtcggaggaatgcgtggccggtctggtggagcgggaacgggaccacatgccggggccgtgctacggcgacaggctgcgcggcggcggcggctgtctctgcgtccgccgggaggccgtcgactggatttggaaggcttacacgcaccacaggttccgccctctcactgcctacttggcagtgaactacctcgatcgcttcctctcgctgtctgaggtgccggactgcaaggactggatgacgcagctcctcgcggtggcgtgcgtttctctggccgccaagatggaggaaaccgccgtcccgcagtgcctggaccttcaggaggtcggagacgcgcggtacgtgttcgaggcgaagacggtccagaggatggagctcctggttctaacaaccctcaactggaggatgcatgccgtgacgccgttctcctacgtggattacttcctgaacaagctcaacaacggcggcagcacggcgccgaggagctgctggctcttgcagtccgcggagcttatcttgcgtgcggccagaggaaccggctgcgtcgggttcaggccgtccgagatcgccgccgcggttgcagccgccgtggccggagacgtggacgacgcggacggcgtcgagaacgcctgctgcgctcacgtagataaggtacgtagtgcattgaaggcagcaaagcgccgccatgcatgcggaatgcgatgcgaactcggttccgtcgtctagtttgtttaagctagtaaaacaaatgcgatcgaggccacacggggtcggttcgagatccagacccattcatggctggaaatctcgtactagccgtgcttggcgtaaacgcgccggccccggtaacagatgcgtacgtgaagcgcatttatgcccgcgcgtttgggtgtgtgagctccattgggtggcgggttatttaatgcgcgctgttgcctgcctctgtggtctgtgctgtgtctgcaggagcgggtgttgcggtgccaggaagcgatcgggtccatggcgtcctcggcggccattgacgacgctaccgtgccaccgaaatctgcgagacgcaggagctcccccgtgcccgtgccgcagagccctgtgggggtgctggacgcggctccctgcctcagctacaggagcgaagaggcagcgactgcgactgcgactgcgacttctgctgcctcacatggggcccctggctcttcaagctcgtcctcgacctccccggtgaccagcaaaaggaggaaactcgccagccgatgtgatggatcgtgcagtgaccggtcaaagcgcgcgcccgcccaatggaccaaagagtgaattgactagggcgtctgcttgctttctgatcaaagagtgcattgagaggcggcaaaatggaggaataaaggggattttggcatgacgagggcaaaggagttgatgaataaagacgcgacgaggtggacaacacctaaattgccgatcttttctttgcaaggggagtaggggacctgcttgggcctgggggagggtagtagacagcccagcacaaaaacctggttggtgtgccacgaccacaatgggcgcgccagccatggctttgtaggaaacacaagggcgctagaggagatccgatgggatgactcagaataaagatagtggagggaccagaccgtatgcagtatgtgcaacaactaggcactggcatgcttatgctcaagtaatctgataacttgaatgttgtgtatccgacaaactgcttctgtgaagagagaaatgcaggtagacgatgaatgtatgtgacaaaaagaatgtccgacccagatgagaaaataaaatatgaatccatgacaaggggatgtgggtttagttctatccatcatttgtttttaattttaacttaatattgtcctgcctgcct

SEQ ID NO: 3614 - DNA, 138 bp, Zea Mays
gtcaagtggttcgttacacgtgatgcgaaggacaagagccgagttgatctcaaaatgatgctggtgaacgaacctaaagatggatgatctgatagagtgccagaatggaagatgctcaccaagtggtcatcatctaac

SEQ ID NO: 3615 - DNA, 1248 bp, Zea Mays
tgatagaattagttaaattttgattgttgaagactggtttaatatagtggtgatagtaatccatgctaggctttagtagtattatattctctattaatgaccggttaaataccttagataaatatttattagtgcagtataattcatcttcatgtgggtatatatattacttgttgaattctaatgtaaactagaatgggttacgtcttctggtatatctccgtattatttccaaaccagtatattcatatattcatcttgttagatagtacacttagattttagacaataatatattaatctgtaatgtaccatttaagtttagaaggctagctgtaatgcttctgtccttattctaagataggttctatcagtattgttatacttctttgatttatttgaacacgataatgctttactagtagtctttatactaaatgtttagtgaacgattagataccttgatttgatgttgcttgctaccctgagtgtctaaaaacgagtagtatcaataagccgatttcaactgaaacatgagaattttgtgatggttagtgcacataagtgctttaaatcttcaaatttgttgagcctattgttttacagaatactaggctatttgacaatattttgggtgtagagttagaggtgtctagtgtttatgcatacaagtgttttaggcctttaagttaagataatttttattccatagaattctatgcttgttaataatgagttgttcattaatactaagagtggtgttaatccttcggtaggatactctagttcatgagattaagatttatgtgcagccttttgaggcttgatgcttgagttaaagaagcgagattatggtttttagccatttatcgatgtctagcgtttacttatgggtgttgtttgcgcctcaccattaagtgtttagctttctactgtagcattgtttatcttgtgctattcctgctcataagcattcatgtgcattatgcatatcattcaggttcgttacacgtgatgcgaaggacaagagccgagttgatctcaaaatgatgctggtgaacgaacctaaagatggatgatctgatagagtgccagaatggaagatgctcaccaagtggtcatcatctaacaacactaacgtagtgttatcccaggcaagccccggtgcatttgccacctccttgttgttataaaacttttatcacttatatgttgcattaggtgataggagttgagtgatgaaacaat

SEQ ID NO: 3616 - DNA, 878 bp, Zea Mays
atatcatatcaagcattaagccattaacgacacatcccatcaaaccataaagggatttggagtaagggaattctagtcatctatacaataaaatactaatatgaaagatatacgaactcatacccttcctatatgtgcaagtgtgtcaaatttatcttcaaattgcgtagaatctaaagcctatcctctgataccaactgtaacatcccggaatccacaaacaccccggaatgctactgaactacacttctgacatccgtatataaaatttcgacagcatctcctttgcaaaatagcataaaggagggggcaacagtgtataaacatgtatcatgacaaaaaaacatactaagtattattaaacggctagcaaaggaaagttaaacatatgacatgaactgaattaaccagtgcgcatgactagtaaaaaaacaaacatcctttgacatcaagtttctaattaaatcatggatgcgcttgggcagccttaatattagagtgaaagtggacgtgctgctactcccctcattcccaacatatatcaagtacctgcattgagtaatgcaagagtgagatgacacatctcagcaagtaaaataataacaaactgtttaaccacataagaacattgttttaccaccatttgatttcgcaaccttcttattacgaaggtgcagcacgaatacaacgtacaacacacctagttaccacacctcgcaggtagaaaccacaatagtaacatagtaatgtcacacttcatatatacctcatgagtgcaaatgtctgcaaatgcaaagatgacttctgccttcatacctctaaggatatgaagccgcatcgtacccctcctcgggcaacgtacgatgctaaaagtgtac

SEQ ID NO: 3617 - DNA, 1226 bp, Zea Mays
ggttggaattgtgcgtaggtgcggcgttgtttattagcgtttgttatgttgatttgtacactaaggtgtgtgtcaaaaacaggtggtggacttccggatcgtacttagtaccattccaaattctcggtgaaggcaagtaaatacagtggtggttgctaccgtttggtttgcatcctatgccttgtcattgagtatgcataagtattaaatgtgttaatcattgaattctatgatgaagtttatttgttcgaaagaattaattctcaattgtctaatattgaggatgatcatgatttgagaatgatatatgtggttgatttccatcttggatgaagttgaagtatctttttgaatcatgttgtatgaagtgttgtaggcatgtcatgcacatcgcatcatccatattgcattttgaagttatgtcgtgatcttatggtccgaccgtaccggtacacttttagcatcgtacgttgcccgaggaggggtacgatgcggcttcatatccttagaggtatgaaggcagaagtcatctttgcatttgcagacatttgcactcatgaggtatatatgaagtgtgacattactatgttactattgtggtttctacctgcaggtgtggtaactaggtgtgttgtacgttgtattcgtgctgcaccttcgtaataagaaggttgcgaaatcaaatggtggtaaaacaatgttcttatgtggttaaacagtttgttattattttacttgctgagatgtgtcatctcactcttgcattactcaatgcaggtacttgatatatgttgggaatgaggggagtagcagcacgtccactttcactctcatattaaggctgcccaagcgcatccatgatttaattagaaacttgatatcaaaggatgtttgtttttttactagtcatgcgcactggttaattcagttcatgtcatatgtttaactttcctttgctagccgtttaataatacttagtatgtttttttgtcatgatacatgtttatacactgttgccccctcctttatgctattttgcaaaggagatgctgtcgaaattttatatacggatgtcagaagtgtagttcagtagcattccggggtgtttgtggattccgggatgttacacctctgcaaagatgtgttcaatagagtaagaaatcataaaaatgctcatgatttgtggatggacatttgtgctctacacgaaggaactagaagtgaac

SEQ ID NO: 3618 - DNA, 4205 bp, Zea Mays
aaaaaacttcacttattgaagggtaaattctaaaaggagcgaggggcaaattctgaaaaatctgggctgtccgctagtccactcttctggtcctctcgcttttgcgctcccttggtcgtcttcgtcccctgctcgtctcccgtccgttttcggatgcccactccgaccaaaaccctagctacttcgtgaaggtggaggggaggagatggcggcagcggatgggcgcagcggcgacttccgggtcaggggtggcagcgttgggggtcggatcgaccgactggtggtggagaacttcaagtcgtacaagggtgagcagacgattgggcctttcgtcgacttcacagccatcatcggccctaacggcgccggcaagtccaacctgatggacgccatcagcttcgtgctgggcgtgcgctcaacgcaccttcgaggcgcgcagctcaaggacctcatttacgccctcgacgaccgcgacaaggaggccaagggccgcaaggcttccgtccgcctcttctactgccaacccaaccaggaggagctctgcttcacccgcagcatcaccggcgccggcggcagtgagtaccgcatcgaccgcaaccaagtcacctgggacgtctacaacgccaagctcaggtccctcggcatcctcgtcaaggcccgcaacttcctcgtctttcagggtgatgtagaatccattgcctccaagaaccccaaggagctcaccgctctcctggagcagatctcaggctctgatgagcttaggagggagtatgacgagctggaggagcagaaagccagggccgaagagaagtctgctcttgtgtatcaagagaaaaggaccattgtcatggagcggaagcagaagaaggtgcaaaaagaggaggcagagaagcatctacgccttcaacaggacctgaaactgttgaagacagagcattacctttggcaactctataccatcgaaaaagacatagagaaaattgaagctgagcttgtggaggatagagaatctcttcagcaagtgcaggaagagaatcgatccagtgactatgaactgactgcaaaaaagaaggagcaaagtgcatttctcaagaaaatcacattgtctgagaaaagcataaccaagaaaaagcttgaactcgacaagaagcaacctgagcttcttaaattaaaagagcaaatatctcgtctcaaatcaaaaatcaaaagttgcaagaaagagattgacaaaaagaaggatgatcacaaaaaacatcttggagagctgagaaggctgcaaagtgatctggttgaggtcacagaagctattgaggaattgaatgagcaaggacaagatacaagtggaaaactgttattagccgacgaccaactccaggagtatcatagaattaaggaggatgcaggaatgaagacagcaaagctaagagatgagaaagaagttatagaaaaaaaattaaatgctgatgctgaagcaaaaaagaatttagtggagaacatgcagcagctggaaagccgtaaagatgagatatcatcacaagaacgtgaactgcagacaaaacttagcaagattctccattctattcccaagcttgaaaatgagctcacacacttgcatgaggaacacaacaaaattgcaaaggaacgccaatcttcaggatctgaataccaaatgctgaagcagagattggatgaaatagaaacacaactacgggagcttaaagctgacaaacatgaaagtgagcgtgatgctcggttaaaagaaaccgttggacgtctaaagcggctattccctggagtccatggccgcatgcttgaactttgcaggccctcgcagaagaaatataaccttgctgttactgttgccatgggaaagttcatggatgcagttgtagtggaagacgagaacactggaaaggaatgcattaagtatctgaaggagcagcggcatcctccgcagacatttattcccttgcaatcagtccgtgtgaagccgataattgagaagctgcgaactcttggtggatctgcacagttagtttttgatgtcattcattttgaccgagttttggagaaagcagttctgtatgctgttggaaatacacttgtctgtgataaacttgatgaagctaaagccttaagttggagtggtgaaaggtataaagttgttactgtcgatgggattctgctgactaaatctggcacaatgactggtggaacaagtggggggatggaagctagatcaaacaaatgggatgacagcacaatagaatctttgaagaagaagaaaaatctgttggaaaataaaatgtcagaacttggttcccccagggagttgcagagaaaagagcttgccatatctgagaaaataactggacttgagaaaaagttgcactactcgaatgttgaacagaataaccttagagggaaactagctaaattagcatctgagaggagtaatattgagacagagattaatcgtctgaagcctggagaggaggagctcgagacccgtattggtaaaagggaagcagaagcaagaaaacttgagaaaaaaattaatgacattgtggacaaggtgtacagagattttagcatttcagttggtgtgaagaatatccgcgagtatgaagaaaagcagctaaaagatgctcaagcactacaggagaggaagctaagcctaagtaaccaaatgtcaaaattgaaataccagcttgaatatgaacaaaagcgagatatgcatgcaccaattgtgaagttaacggagacacatgagtccttagagaaagagcttaagggcttacaggagagagagtctggtgctaaggctgaagctgaacaaattttggctcagatggaagaactgaagactgaggctgatgactggaaatccaagtcggatgaatgtgagaaggttattgatgaattgaaggagcagaatggtaatgttgcatctacattggcaaagatggatcgccaagtgaaatcaaaggagggacaacttgcacaacttatatcacgccagcgagaggttcatgagaagtgtgaacttgaacagttgaagcttcctactgtaaacgacccaatggataccggaacatcctcacaagaaccaatccttgattacagccagcttagcaaaagccatctgcaggatatacgaccttctgaacgtgacaaacatgaggcagagttcaaaaaaagaactggtgtgctactagctgatattgagcgcactgctcctaatctaaaagccctggatcagtatgatgcactccaacaaaaggaaaaggaggttactgaaaggtttgaagcagctaggaaagaagaacgagagatatctgacaaatataactcagtcaagcaaaggaggtatgagctgtttatggaggccttcgatcacatatctaaaggcatcgacaaaatctataagcagctgacaaaaagccatacacatccactcggaggaacagcatatttaaatctagaaaatgaagacgaaccgtttcttaatggaatcaagtacacagctatgccacctaccaagcggtttagagatatggaacagttatccggtggggagaagactgttgcagcactggctttgctttttgccattcacagttttaggccatcaccgttcttcatattggacgaagtagatgctgctctggacaatttaaatgtggccaaggttgccgggtttatcagatcaaaatcatgtgaacgtgttggtgatgaacaaggcagcgatggcgagagtggttttcagagcatagttatatctctgaaggacagtttctatgacaaggccgaggcacttgttggtgtttatagggactcagaacgaagttgctcgaggactctcaccttcgacctgagaaagtatagggaatcgtgaagcagcttttgttgaatgtttgtactatgtgtgtagttgcctgctccatcagcttgctagatagctgtcgtgagccttcgatgttttaactatctgtatactcctagtcctacataagtgctagctgaacaaggaccctgaaatattcatttggtaggtggataactgatgtttcgaacacgcataaacttttttacctgttgtatgaagccatttctccgaattactataatctgtttaattatttcgtggtgttcaatttatctccacggttcgctcagtagtcacttgctgaagtgtgcagtgg

SEQ ID NO: 3619 - DNA, 2399 bp, Zea Mays
gcaaattctgaaaaatctgggctgtccgctagtccactcttctggtcctctcgcttttgcgctcccttggtcgtcttcgtcccctgctcgtctcccgtccgttttcggatgcccactccgaccaaaaccctagctacttcgtgaaggtggaggggaggagatggcggcagcggatgggcgcagcggcgacttccgggtcaggggtggcagcgttgggggtcggatcgaccgactggtggtggagaacttcaagtcgtacaagggtgagcagacgattgggcctttcgtcgacttcacagccatcatcggccctaacggcgccggcaagtccaacctgatggacgccatcagcttcgtgctgggcgtgcgctcaacgcaccttcgaggcgcgcagctcaaggacctcatttacgccctcgacgaccgcgacaaggaggccaagggccgcaaggcttccgtccgcctcttctactgccaacccaaccaggaggagctctgcttcacccgcagcatcaccggcgccggcggcagtgagtaccgcatcgaccgcaaccaagtcacctgggacgtctacaacgccaagctcaggtccctcggcatcctcgtcaaggcccgcaacttcctcgtctttcagggtgatgtagaatccattgcctccaagaaccccaaggagctcaccgctctcctggagcagatctcaggctctgatgagcttaggagggagtatgacgagctggaggagcagaaagccagggccgaagagaagtctgctcttgtgtatcaagagaaaaggaccattgtcatggagcggaagcagaagaaggtgcaaaaagaggaggcagagaagcatctacgccttcaacaggacctgaaactgttgaagacagagcattacctttggcaactctataccatcgaaaaagacatagagaaaattgaagctgagcttgtggaggatagagaatctcttcagcaagtgcaggaagagaatcgatccagtgactatgaactgactgcaaaaaagaaggagcaaagtgcatttctcaagaaaatcacattgtctgagaaaagcataaccaagaaaaagcttgaactcgacaagaagcaacctgagcttcttaaattaaaagagcaaatatctcgtctcaaatcaaaaatcaaaagttgcaagaaagagattgacaaaaagaaggatgatcacaaaaaacatcttggagagctgagaaggctgcaaagtgatctggttgaggtcacagaagctattgaggaattgaatgagcaaggacaagatacaagtggaaaactgttattagccgacgaccaactccaggagtatcatagaattaaggaggatgcaggaatgaagacagcaaagctaagagatgagaaagaagttatagaaaaaaaattaaatgctgatgctgaagcaaaaaagaatttagtggagaacatgcagcagctggaaagccgtaaagatgagatatcatcacaagaacgtgaactgcagacaaaacttagcaagattctccattctattcccaagcttgaaaatgagctcacacacttgcatgaggaacacaacaaaattgcaaaggaacgccaatcttcaggatctgaataccaaatgctgaagcagagattggatgaaatagaaacacaactacgggagcttaaagctgacaaacatgaaagtgagcgtgatgctcggttaaaagaaaccgttggacgtctaaagcggctattccctggagtccatggccgcatgcttgaactttgcaggccctcgcagaagaaatataaccttgctgttactgttgccatgggaaagttcatggatgcagttgtagtggaagacgagaacactggaaaggaatgcattaagtatctgaaggagcagcggcatcctccgcagacatttattcccttgcaatcagtccgtgtgaagccgataattgagaagctgcgaactcttggtggatctgcacagttagtttttgatgtcattcattttgaccgagttttggagaaagcagttctgtatgctgttggaaatacacttgtctgtgataaacttgatgaagctaaagccttaagttggagtggtgaaaggtataaagttgttactgtcgatgggattctgctgactaaatctggcacaatgactggtggaacaagtggggggatggaagctagatcaaacaaatgggatgacagcacaatagaatctttgaagaagaagaaaaatctgttggaaaataaaatgtcagaacttggttcccccagggagttgcagagaaaagagcttgccatatctgagaaaataactggacttgagaaaaagttgcactactcgaatgttgaacagatatttgtttagtatggctcttggtcttggatac

SEQ ID NO: 3620 - DNA, 4116 bp, Zea Mays
ctgggctgtccgctagtccactcttctggtcctctcgcttttgcgctcccttggtcgtcttcgtcccctgctcgtctcccgtccgttttcggatgcccactccgaccaaaaccctagctacttcgtgaaggtggaggggaggagatggcggcagcggatgggcgcagcggcgacttccgggtcaggggtggcagcgttgggggtcggatcgaccgactggtggtggagaacttcaagtcgtacaagggtgagcagacgattgggcctttcgtcgacttcacagccatcatcggccctaacggcgccggcaagtccaacctgatggacgccatcagcttcgtgctgggcgtgcgctcaacgcaccttcgaggcgcgcagctcaaggacctcatttacgccctcgacgaccgcgacaaggaggccaagggccgcaaggcttccgtccgcctcttctactgccaacccaaccaggaggagctctgcttcacccgcagcatcaccggcgccggcggcagtgagtaccgcatcgaccgcaaccaagtcacctgggacgtctacaacgccaagctcaggtccctcggcatcctcgtcaaggcccgcaacttcctcgtctttcagggtgatgtagaatccattgcctccaagaaccccaaggagctcaccgctctcctggagcagatctcaggctctgatgagcttaggagggagtatgacgagctggaggagcagaaagccagggccgaagagaagtctgctcttgtgtatcaagagaaaaggaccattgtcatggagcggaagcagaagaaggtgcaaaaagaggaggcagagaagcatctacgccttcaacaggacctgaaactgttgaagacagagcattacctttggcaactctataccatcgaaaaagacatagagaaaattgaagctgagcttgtggaggatagagaatctcttcagcaagtgcaggaagagaatcgatccagtgactatgaactgactgcaaaaaagaaggagcaaagtgcatttctcaagaaaatcacattgtctgagaaaagcataaccaagaaaaagcttgaactcgacaagaagcaacctgagcttcttaaattaaaagagcaaatatctcgtctcaaatcaaaaatcaaaagttgcaagaaagagattgacaaaaagaaggatgatcacaaaaaacatcttggagagctgagaaggctgcaaagtgatctggttgaggtcacagaagctattgaggaattgaatgagcaaggacaagatacaagtggaaaactgttattagccgacgaccaactccaggagtatcatagaattaaggaggatgcaggaatgaagacagcaaagctaagagatgagaaagaagttatagaaaaaaaattaaatgctgatgctgaagcaaaaaagaatttagtggagaacatgcagcagctggaaagccgtaaagatgagatatcatcacaagaacgtgaactgcagacaaaacttagcaagattctccattctattcccaagcttgaaaatgagctcacacacttgcatgaggaacacaacaaaattgcaaaggaacgccaatcttcaggatctgaataccaaatgctgaagcagagattggatgaaatagaaacacaactacgggagcttaaagctgacaaacatgaaagtgagcgtgatgctcggttaaaagaaaccgttggacgtctaaagcggctattccctggagtccatggccgcatgcttgaactttgcaggccctcgcagaagaaatataaccttgctgttactgttgccatgggaaagttcatggatgcagttgtagtggaagacgagaacactggaaaggaatgcattaagtatctgaaggagcagcggcatcctccgcagacatttattcccttgcaatcagtccgtgtgaagccgataattgagaagctgcgaactcttggtggatctgcacagttagtttttgatgtcattcattttgaccgagttttggagaaagcagttctgtatgctgttggaaatacacttgtctgtgataaacttgatgaagctaaagccttaagttggagtggtgaaaggtataaagttgttactgtcgatgggattctgctgactaaatctggcacaatgactggtggaacaagtggggggatggaagctagatcaaacaaatgggatgacagcacaatagaatctttgaagaagaagaaaaatctgttggaaaataaaatgtcagaacttggttcccccagggagttgcagagaaaagagcttgccatatctgagaaaataactggacttgagaaaaagttgcactactcgaatgttgaacagaataaccttagagggaaactagctaaattagcatctgagaggagtaatattgagacagagattaatcgtctgaagcctggagaggaggagctcgagacccgtattggtaaaagggaagcagaagcaagaaaacttgagaaaaaaattaatgacattgtggacaaggtgtacagagattttagcatttcagttggtgtgaagaatatccgcgagtatgaagaaaagcagctaaaagatgctcaagcactacaggagaggaagctaagcctaagcttgaatatgaacaaaagcgagatatgcatgcaccaattgtgaagttaacggagacacatgagtccttagagaaagagcttaagggcttacaggagagagagtctggtgctaaggctgaagctgaacaaattttggctcagatggaagaactgaagactgaggctgatgactggaaatccaagtcggatgaatgtgagaaggttattgatgaattgaaggagcagaatggtaatgttgcatctacattggcaaagatggatcgccaagtgaaatcaaaggagggacaacttgcacaacttatatcacgccagcgagaggttcatgagaagtgtgaacttgaacagttgaagcttcctactgtaaacgacccaatggataccggaacatcctcacaagaaccaatccttgattacagccagcttagcaaaagccatctgcaggatatacgaccttctgaacgtgacaaacatgaggcagagttcaaaaaaagaactggtgtgctactagctgatattgagcgcactgctcctaatctaaaagccctggatcagtatgatgcactccaacaaaaggaaaaggaggttactgaaaggtttgaagcagctaggaaagaagaacgagagatatctgacaaatataactcagtcaagcaaaggaggtatgagctgtttatggaggccttcgatcacatatctaaaggcatcgacaaaatctataagcagctgacaaaaagccatacacatccactcggaggaacagcatatttaaatctagaaaatgaagacgaaccgtttcttaatggaatcaagtacacagctatgccacctaccaagcggtttagagatatggaacagttatccggtggggagaagactgttgcagcactggctttgctttttgccattcacagttttaggccatcaccgttcttcatattggacgaagtagatgctgctctggacaatttaaatgtggccaaggttgccgggtttatcagatcaaaatcatgtgaacgtgttggtgatgaacaaggcagcgatggcgagagtggttttcagagcatagttatatctctgaaggacagtttctatgacaaggccgaggcacttgttggtgtttatagggactcagaacgaagttgctcgaggactctcaccttcgacctgagaaagtatagggaatcgtgaagcagcttttgttgaatgtttgtactatgtgtgtagttgcctgctccatcagcttgctagatagctgtcgtgagccttcgatgttttaactatctgtatactcctagtcctacataagtgctagctgaacaaggaccctgaaatattcatttggtaggtggataactgatgtttcgaacacgcataaacttttttacctgttgtatgaagccatttctccgaattactataatctgtttaattatttcgtggtgttcaatttatctccacggttcgctcagtagtcacttgctgaagtgtgcagtgg

SEQ ID NO: 3621 - DNA, 3373 bp, Zea Mays
ctagtccactcttctggtcctctcgcttttgcgctcccttggtcgtcttcgtcccctgctcgtctcccgtccgttttcggatgcccactccgaccaaaaccctagctacttcgtgaaggtggaggggaggagatggcggcagcggatgggcgcagcggcgacttccgggtcaggggtggcagcgttgggggtcggatcgaccgactggtggtggagaacttcaagtcgtacaagggtgagcagacgattgggcctttcgtcgacttcacagccatcatcggccctaacggcgccggcaagtccaacctgatggacgccatcagcttcgtgctgggcgtgcgctcaacgcaccttcgaggcgcgcagctcaaggacctcatttacgccctcgacgaccgcgacaaggaggccaagggccgcaaggcttccgtccgcctcttctactgccaacccaaccaggaggagctctgcttcacccgcagcatcaccggcgccggcggcagtgagtaccgcatcgaccgcaaccaagtcacctgggacgtctacaacgccaagctcaggtccctcggcatcctcgtcaaggcccgcaacttcctcgtctttcagggtgatgtagaatccattgcctccaagaaccccaaggagctcaccgctctcctggagcagatctcaggctctgatgagcttaggagggagtatgacgagctggaggagcagaaagccagggccgaagagaagtctgctcttgtgtatcaagagaaaaggaccattgtcatggagcggaagcagaagaaggtgcaaaaagaggaggcagagaagcatctacgccttcaacaggacctgaaactgttgaagacagagcattacctttggcaactctataccatcgaaaaagacatagagaaaattgaagctgagcttgtggaggatagagaatctcttcagcaagtgcaggaagagaatcgatccagtgactatgaactgactgcaaaaaagaaggagcaaagtgcatttctcaagaaaatcacattgtctgagaaaagcataaccaagaaaaagcttgaactcgacaagaagcaacctgagcttcttaaattaaaagagcaaatatctcgtctcaaatcaaaaatcaaaagttgcaagaaagagattgacaaaaagaaggatgatcacaaaaaacatcttggagagctgagaaggctgcaaagtgatctggttgaggtcacagaagctattgaggaattgaatgagcaaggacaagatacaagtggaaaactgttattagccgacgaccaactccaggagtatcatagaattaaggaggatgcaggaatgaagacagcaaagctaagagatgagaaagaagttatagaaaaaaaattaaatgctgatgctgaagcaaaaaagaatttagtggagaacatgcagcagctggaaagccgtaaagatgagatatcatcacaagaacgtgaactgcagacaaaacttagcaagattctccattctattcccaagcttgaaaatgagctcacacacttgcatgaggaacacaacaaaattgcaaaggaacgccaatcttcaggatctgaataccaaatgctgaagcagagattggatgaaatagaaacacaactacgggagcttaaagctgacaaacatgaaagtgagcgtgatgctcggttaaaagaaaccgttggacgtctaaagcggctattccctggagtccatggccgcatgcttgaactttgcaggccctcgcagaagaaatataaccttgctgttactgttgccatgggaaagttcatggatgcagttgtagtggaagacgagaacactggaaaggaatgcattaagtatctgaaggagcagcggcatcctccgcagacatttattcccttgcaatcagtccgtgtgaagccgataattgagaagctgcgaactcttggtggatctgcacagttagtttttgatgtcattcattttgaccgagttttggagaaagcagttctgtatgctgttggaaatacacttgtctgtgataaacttgatgaagctaaagccttaagttggagtggtgaaaggtataaagttgttactgtcgatgggattctgctgactaaatctggcacaatgactggtggaacaagtggggggatggaagctagatcaaacaaatgggatgacagcacaatagaatctttgaagaagaagaaaaatctgttggaaaataaaatgtcagaacttggttcccccagggagttgcagagaaaagagcttgccatatctgagaaaataactggacttgagaaaaagttgcactactcgaatgttgaacagaataaccttagagggaaactagctaaattagcatctgagaggagtaatattgagacagagattaatcgtctgaagcctggagaggaggagctcgagacccgtattggtaaaagggaagcagaagcaagaaaacttgagaaaaaaattaatgacattgtggacaaggtgtacagagattttagcatttcagttggtgtgaagaatatccgcgagtatgaagaaaagcagctaaaagatgctcaagcactacaggagaggaagctaagcctaagtaaccaaatgtcaaaattgaaataccagcttgaatatgaacaaaagcgagatatgcatgcaccaattgtgaagttaacggagacacatgagtccttagagaaagagcttaagggcttacaggagagagagtctggtgctaaggctgaagctgaacaaattttggctcagatggaagaactgaagactgaggctgatgactggaaatccaagtcggatgaatgtgagaaggttattgatgaattgaaggagcagaatggtaatgttgcatctacattggcaaagatggatcgccaagtgaaatcaaaggagggacaacttgcacaacttatatcacgccagcgagaggttcatgagaagtgtgaacttgaacagttgaagcttcctactgtaaacgacccaatggataccggaacatcctcacaagaaccaatccttgattacagccagcttagcaaaagccatctgcaggatatacgaccttctgaacgtgacaaacatgaggcagagttcaaaaaaagaactggtgtgctactagctgatattgagcgcactgctcctaatctaaaagccctggatcagtatgatgcactccaacaaaaggaaaaggaggttactgaaaggtttgaagcagctaggaaagaagaacgagagatatctgacaaatataactcagtcaagcaaaggaggatgctatatcttatgtaaggacttgcaagatttcttccactgcactttggaggactgatgctatcttttttcgtta

SEQ ID NO: 3622 - DNA, 2569 bp, Zea Mays
cggactacggaggaagaagtagtagaggaagaggagcaggagacacattaaattgagcaagggagagaggggcgaccctgagcctgagctgcacacctcatcatgacagcgcagcgcagcgcagactgtggcagcagagcagagtgtgcgcccagcgtcctcgtggtgagggagcgccagcattgcaagcggctggttctctgctgaaatagaattcaaggcatggccagctcggtaggtgagggtggtggtcaacatcgaatgccctcactcactcacaaacactctggtgctcatcgtctatctgtcgtcagatgctcatcttaaaacctttacatcttgagccgagctgagctgactagcagagggccatcttctactcttctctcccgtctctcccagcccccttgtccaacggttcagcctgctcaattttagtgaccagttacggcaaatgcagccctcggcggacagcaggaagaagaagcggcggcggcggcggcggaggaggctggcggcatgctgctcatcgagacctgctgccggcgccgctcaaggtcagtgtcagtgcggctcctctagccccggtggcggcggcggaagcggcagcctcgtggcaagaacaccgcgcgcgttctctagctgctcaagcgccgccgcctcgtctgcctgcgcgccggcggcggccgtccatctcggcacccagcacaagctgacggcgctcctcgtcgcgctcgcgctcctcctcgtcctccctcgccctcctctcgtggcaggggtcccggtgtcgccccgcaggatggcgaggatccgcagccacgtggagaggatcaacaagacccccgtgcgctccatccgggtaagaacacgacaacagcgcggggaggccgaaccaatcgatcggttattccaacgatccatccatggatgaagcgacaacaactgtgtttttgtttttcgtttttctgtctgtctcccggttgacgaccacgcatacatacatacatgcatggctgatggacggtggggggtcgtcggctatcgtttgtttcagagccaggacggcgacaccatcgactgcgtggcggcgcacgagcagcacggcctggaccacccgctcctcagggcgcacgccgtccagacggagccgcccgaggcgccgaggggcggcggcgcgctctccttcccgtctggctctgcgacgaacgggagcgggagcggcagcggcagcggcgcaggcaaggacagcaggcggggcgcgtggcagacgtggcaccacggcgggcactgtccccggggcacggtggccatccggcggacgagcgccgaggacgtgctgcgcgccggatccgtctcccgcttcggccgcaagaggaggcaccggaaggccgccgccgccgccgccgccgccgccgccgccgcgcgcgcggcctacgcgccggacgtcatcaccggcaacgggcacgagcacgcgatcgcgtacacggcgccgtcgcagcagccggtgtacggcgccaaggccaccatcaacgtgtgggatccggccatccaggagtccaacggcttcagcctctcccagctctgggtcctctccggctccttcaacggctccgacctcaacagcatcgaggcaggatggcagtcaggtcagccctgagctgtacggggacagcaggccgaggctcttcacgtactggacaagcgacgcgtacgaggctactggttgctacaacgcgctgtgcccggggttcgtgcagacgagctcccgcatcgccatcggcgcgtccatctcgccggtgtcgtcggccggcggcgcgcagtacgacatgacgctgctggtgtggaaggacccgaagctgggcaactggtggctcagctacggggaccagctggtggggtactggccggcgcagctgttcacgcacctgtcggaccacgccaccatggtggagtggggcggcgaggtggtggacaccaggcccggcggggcgcacaccgccacgcagatgggctcgggccgcttcgccgccgagggcttcggccgcgccagctacttccgcaacctggagacggtggacgccgacaacagcctggccgaggtggcgctcgacgccatccagacgctggccgaggaccccgcctgctacgacatacgcaaggcctacgacgacgacgacgacgacgacgacgacggccagcactccgcccgcggaggctggggaacccacttctactacggtggcccgggacacaacccggcatgcccctgatggccggatctctgtcctctgatggagttgtgacgatgagcgcgcgcgcggcacctgaccggccgtacgtaccatggatggcatgcatttgatttaacttccgcctatatatgtgtacgtggccaaattttgacgtacgttcgcacgtgcctttgctagtatttcaagctttcgctaattctacctgtaaggacttgcaatatgtaattaactgttgatttatctgttatttcaatcgatcccaaggatcgtcccagatttaattttcctcgaaacatagacaatccatcgatgctgcg

SEQ ID NO: 3623 - DNA, 3447 bp, Zea Mays
attaaattgagcaagggagagaggggcgaccctgagcctgagctgcacacctcatcatgacagcgcagcgcagcgcagactgtggcagcagagcagagtgtgcgcccagcgtcctcgtggtgagggagcgccagcattgcaagcggctggttctctgctgaaatagaattcaaggcatggccagctcggtaggtgagggtggtggtcaacatcgaatgccctcactcactcacaaacactctggtgctcatcgtctatctgtcgtcagatgctcatcttaaaacctttacatcttgagccgagctgagctgactagcagagggccatcttctactcttctctcccgtctctcccagcccccttgtccaacggttcagcctgctcaattttagtgaccagttacggcaaatgcagccctcggcggacagcaggaagaagaagcggcggcggcggcggcggaggaggctggcggcatgctgctcatcgagacctgctgccggcgccgctcaaggtcagtgtcagtgcggctcctctagccccggtggcggcggcggaagcggcagcctcgtggcaagaacaccgcgcgcgttctctagctgctcaagcgccgccgcctcgtctgcctgcgcgccggcggcggccgtccatctcggcacccagcacaagctgacggcgctcctcgtcgcgctcgcgctcctcctcgtcctccctcgccctcctctcgtggcaggggtcccggtgtcgccccgcaggatggcgaggatccgcagccacgtggagaggatcaacaagacccccgtgcgctccatccgggtaagaacacgacaacagcgcggggaggccgaaccaatcgatcggttattccaacgatccatccatggatgaagcgacaacaactgtgtttttgtttttcgtttttctgtctgtctcccggttgacgaccacgcatacatacatacatgcatggctgatggacggtggggggtcgtcggctatcgtttgtttcagagccaggacggcgacaccatcgactgcgtggcggcgcacgagcagcacggcctggaccacccgctcctcagggcgcacgccgtccagacggagccgcccgaggcgccgaggggcggcggcgcgctctccttcccgtctggctctgcgacgaacgggagcgggagcggcagcggcagcggcgcaggcaaggacagcaggcggggcgcgtggcagacgtggcaccacggcgggcactgtccccggggcacggtggccatccggcggacgagcgccgaggacgtgctgcgcgccggatccgtctcccgcttcggccgcaagaggaggcaccggaaggccgccgccgccgccgccgccgccgccgccgccgcgcgcgcggcctacgcgccggacgtcatcaccggcaacgggcacgagcacgcgatcgcgtacacggcgccgtcgcagcagccggtgtacggcgccaaggccaccatcaacgtgtgggatccggccatccaggagtccaacggcttcagcctctcccagctctgggtcctctccggctccttcaacggctccgacctcaacagcatcgaggcaggatggcaggtccgccccacaccaatccccagtccccatatctccccttctactactttgtttcttccgtcttatatattccaagcttaatttagcagctattactagtccaactgacactgacgtcgatcagcacaggcaagtacacacgatgaaagcaactagtaccatgtttttctactagttatagtagattaatctccatctcctagctagcttacatgatgttcgacagtttatttagactgttgcagctataatctataaagacaaaatatcgtataagtgctattgtagctctaatctatagagacacacaaaaaataccgtatataagaaggtggtacggattaattaaagccaagcgtactatggacacaatcctgtcaaggtagagtttggccctatattgcagcatgcatgcattgcatacacgcacatggccatcttaaatgtttggatccatcggttgcgcagagatcaagatccccgtcgattatcgttgactccggagctcccgctcatcgagcaggttctcttttgcttgctcgaggtcgaggtcaacccattcccatgccgccctctctctgcctctgtttgcatggttgtccggcccacggttttatacttgtcgagctagctagctagaaaaaagataagaaaagccttgccatattcgggagctagcttaatcgactgtgtggcggtgccgtcgaggcatcagaatatatgactcatcctcagtttgtctctgtctgcatgtgacacagctccataaacttcaaaaaaaaaattgtttgatttcggtgctacattaaaactatattatttcaggataaaggaagtaatagcaatcaatatgaatccatatatgtatataataattattgatgttatgtatctcaatctgaagctgcgcacgattttttctagtcaggtcagccctgagctgtacggggacagcaggccgaggctcttcacgtactggacaagcgacgcgtacgaggctactggttgctacaacgcgctgtgcccggggttcgtgcagacgagctcccgcatcgccatcggcgcgtccatctcgccggtgtcgtcggccggcggcgcgcagtacgacatgacgctgctggtgtggaaggacccgaagctgggcaactggtggctcagctacggggaccagctggtggggtactggccggcgcagctgttcacgcacctgtcggaccacgccaccatggtggagtggggcggcgaggtggtggacaccaggcccggcggggcgcacaccgccacgcagatgggctcgggccgcttcgccgccgagggcttcggccgcgccagctacttccgcaacctggagacggtggacgccgacaacagcctggccgaggtggcgctcgacgccatccagacgctggccgaggaccccgcctgctacgacatacgcaaggcctacgacgacgacgacgacgacgacgacgacggccagcactccgcccgcggaggctggggaacccacttctactacggtggcccgggacacaacccggcatgcccctgatggccggatctctgtcctctgatggagttgtgacgatgagcgcgcgcgcggcacctgaccggccgtacgtaccatggatggcatgcatttgatttaacttccgcctatatatgtgtacgtggccaaattttgacgtacgttcgcacgtgcctttgctagtatttcaagctttcgctaattctacctgtaaggacttgcaatatgtaattaactgttgatttatctgttatttcaatcgatcccaaggatcgtcccagatttaattttcctcgaaacatagacaatccatcgatgctgcg

SEQ ID NO: 3624 - DNA, 2295 bp, Zea Mays
taaattgagcaagggagagaggggcgaccctgagcctgagctgcacacctcatcatgacagcgcagcgcagcgcagactgtggcagcagagcagagtgtgcgcccagcgtcctcgtggtgagggagcgccagcattgcaagcggctggttctctgctgaaatagaattcaaggcatggccagctcggtagccctcggcggacagcaggaagaagaagcggcggcggcggcggcggaggaggctggcggcatgctgctcatcgagacctgctgccggcgccgctcaaggtcagtgtcagtgcggctcctctagccccggtggcggcggcggaagcggcagcctcgtggcaagaacaccgcgcgcgttctctagctgctcaagcgccgccgcctcgtctgcctgcgcgccggcggcggccgtccatctcggcacccagcacaagctgacggcgctcctcgtcgcgctcgcgctcctcctcgtcctccctcgccctcctctcgtggcaggggtcccggtgtcgccccgcaggatggcgaggatccgcagccacgtggagaggatcaacaagacccccgtgcgctccatccgggtaagaacacgacaacagcgcggggaggccgaaccaatcgatcggttattccaacgatccatccatggatgaagcgacaacaactgtgtttttgtttttcgtttttctgtctgtctcccggttgacgaccacgcatacatacatacatgcatggctgatggacggtggggggtcgtcggctatcgtttgtttcagagccaggacggcgacaccatcgactgcgtggcggcgcacgagcagcacggcctggaccacccgctcctcagggcgcacgccgtccagacggagccgcccgaggcgccgaggggcggcggcgcgctctccttcccgtctggctctgcgacgaacgggagcgggagcggcagcggcagcggcgcaggcaaggacagcaggcggggcgcgtggcagacgtggcaccacggcgggcactgtccccggggcacggtggccatccggcggacgagcgccgaggacgtgctgcgcgccggatccgtctcccgcttcggccgcaagaggaggcaccggaaggccgccgccgccgccgccgccgccgccgccgccgcgcgcgcggcctacgcgccggacgtcatcaccggcaacgggcacgagcacgcgatcgcgtacacggcgccgtcgcagcagccggtgtacggcgccaaggccaccatcaacgtgtgggatccggccatccaggagtccaacggcttcagcctctcccagctctgggtcctctccggctccttcaacggctccgacctcaacagcatcgaggcaggatggcaggtcagccctgagctgtacggggacagcaggccgaggctcttcacgtactggacaagcgacgcgtacgaggctactggttgctacaacgcgctgtgcccggggttcgtgcagacgagctcccgcatcgccatcggcgcgtccatctcgccggtgtcgtcggccggcggcgcgcagtacgacatgacgctgctggtgtggaaggacccgaagctgggcaactggtggctcagctacggggaccagctggtggggtactggccggcgcagctgttcacgcacctgtcggaccacgccaccatggtggagtggggcggcgaggtggtggacaccaggcccggcggggcgcacaccgccacgcagatgggctcgggccgcttcgccgccgagggcttcggccgcgccagctacttccgcaacctggagacggtggacgccgacaacagcctggccgaggtggcgctcgacgccatccagacgctggccgaggaccccgcctgctacgacatacgcaaggcctacgacgacgacgacgacgacgacgacgacggccagcactccgcccgcggaggctggggaacccacttctactacggtggcccgggacacaacccggcatgcccctgatggccggatctctgtcctctgatggagttgtgacgatgagcgcgcgcgcggcacctgaccggccgtacgtaccatggatggcatgcatttgatttaacttccgcctatatatgtgtacgtggccaaattttgacgtacgttcgcacgtgcctttgctagtatttcaagctttcgctaattctacctgtaaggacttgcaatatgtaattaactgttgatttatctgttatttcaatcgatcccaaggatcgtcccagatttaattttcctcgaaacatagacaatccatcgatgctgcg

SEQ ID NO: 3625 - DNA, 1579 bp, Zea Mays
taaattgagcaagggagagaggggcgaccctgagcctgagctgcacacctcatcatgacagcgcagcgcagcgcagactgtggcagcagagcagagtgtgcgcccagcgtcctcgtggtgagggagcgccagcattgcaagcggctggttctctgctgaaatagaattcaaggcatggccagctcggtaggtgagggtggtggtcaacatcgaatgccctcactcactcacaaacactctggtgctcatcgtctatctgtcgtcagatgctcatcttaaaacctttacatcttgagccgagctgagctgactagcagagggccatcttctactcttctctcccgtctctcccagcccccttgtccaacggttcagcctgctcaattttagtgaccagttacggcaaatgcagccctcggccgccgccgccgcgcgcgcggcctacgcgccggacgtcatcaccggcaacgggcacgagcacgcgatcgcgtacacggcgccgtcgcagcagccggtgtacggcgccaaggccaccatcaacgtgtgggatccggccatccaggagtccaacggcttcagcctctcccagctctgggtcctctccggctccttcaacggctccgacctcaacagcatcgaggcaggatggcagtcaggtcagccctgagctgtacggggacagcaggccgaggctcttcacgtactggacaagcgacgcgtacgaggctactggttgctacaacgcgctgtgcccggggttcgtgcagacgagctcccgcatcgccatcggcgcgtccatctcgccggtgtcgtcggccggcggcgcgcagtacgacatgacgctgctggtgtggaaggacccgaagctgggcaactggtggctcagctacggggaccagctggtggggtactggccggcgcagctgttcacgcacctgtcggaccacgccaccatggtggagtggggcggcgaggtggtggacaccaggcccggcggggcgcacaccgccacgcagatgggctcgggccgcttcgccgccgagggcttcggccgcgccagctacttccgcaacctggagacggtggacgccgacaacagcctggccgaggtggcgctcgacgccatccagacgctggccgaggaccccgcctgctacgacatacgcaaggcctacgacgacgacgacgacgacgacgacgacggccagcactccgcccgcggaggctggggaacccacttctactacggtggcccgggacacaacccggcatgcccctgatggccggatctctgtcctctgatggagttgtgacgatgagcgcgcgcgcggcacctgaccggccgtacgtaccatggatggcatgcatttgatttaacttccgcctatatatgtgtacgtggccaaattttgacgtacgttcgcacgtgcctttgctagtatttcaagctttcgctaattctacctgtaaggacttgcaatatgtaattaactgttgatttatctgttatttcaatcgatcccaaggatcgtcccagatttaattttcctcgaaacatagacaatccatcgatgctgcg

SEQ ID NO: 3626 - DNA, 3990 bp, Zea Mays
gtccgttggatcctatcagatggttgtgagtgttagagacccattttgtttctgtcactaaataggttgtcttctttgtgctgttttgaaatagggtttattcagatgggactggacaataaaccgctctagatttccatttgcggtttaattagttggacggtcgattcaaccagctttcaatataacaagtttagttcaaataattaaaactgcaacaataactcagtgtgggaattctttcttagggaagggtcaaaggttcaaaggcttgtgatgttgccttttactttgttttttacatttatgatattgttgtcatttatcttcataatttctccttccattttttgtagaaaaacagctctgcaggaacacacatgaaaaaacaggcgtgggaggcacgcgtgatggaaaaaaaacggaggtggcacatgaaaatacagggtgtaaggcatgtgtgatggggaaacctgtaaaaagaacaggagtatggaggtgaaaggaaaaaaaagtaaaaataggaacacatggagggagaaaaattaggtggaacatggtcacagaaaaatctagaggtagtccgggagaaaatctggaggtataatgtaaaaaaagtccaggtcacatgtgggatgtaagggcgcgaggacactttaggaaggaagaaaagacggtgcgaagaatcatttcactcatgattttagttctaaatagagagaacttgaattgaacacacacacacttctaatgtatcctgatcatgtatttttatatggaagtatgtaactatgttgtattcagttaattaagatacattttaaggccctgcatctacaattaaaatgcttatcaactgacttattgtataagttgctagagatatatctatggtccttaaaactgaacttcatctttcctccctgattcaataactgctaactaattctcttcccaacataatttttattatactcaatccggtatcctgtggattcaatttgcaggagtggggagttgaccctaccaaagagataccttcaagtgcagctacaaccaagtacactgatttcctacttgcaactgcggctggaaaagttgatggcacaaaagaacaatgcactccaaatagaagaattgctggacaaactgagtgtatcattaactggtgaggaacttgagattattggcaagctctaccagcaagctatgaaactggaagtggagttcttttctgctaagcttgtagaccaacctgttgtagctccactttcaagatattgtgatccaaaatataaactcttgatcttctctgattttgatttgacatgcactgttgttgattcgtctgccattttggcggagatcgcaattttgtcattccaaaaggcaagtcaaagtgggattgataataacctcgaccgtgcaaaatcgggagaactgagaaatttgtggaacatgctctctaagcaatacatggaagagtatgaggaatgcatggaaagactacttcctccagaagaatcaaagtcactagattatgataaactgtataaaggcctggaggtgcttgctgagtttgagaaggctgcaaattctagggttgtcgactctggtgtcctgaggggaatgaatttagaagacatcaggaaagctggggagcggcttattcttcagggtggctgtaaaaatttctttcagaagattgtaaaaacaagggagatcctcaatttggatatccatattctttcctactgctggtgtgcagagcttataagatccgccttctcatcagccggctgtctagatggtttgaacatacatgcgaacgagttcgcctttgaggaatctgtttcaactggtgagattgacagaaagatccagtccccgctagacaaggttgagaagttcaagagcatcagaagcgacgcggacagcacggtgccattcctgtctgtttacatcggagactcggccggtgatttgctctgcttattggaggcagatatcggtatcgtcgttgggtcaagcacaagcttgcgtagagtgggcagacagttcggtgtttcctttgtcccgttgtttctcggtctagtggagaagcagaggcaactgatggatgaagatgcgtccgtgttcaagccgcggtctggagtcctttatacggtctctagctggtcagaaatacacgccttcgtgctgggaagcgatttcagctgatggatctgctgcttcttttctccatctttttccccttgagaagcaaaaaagcttttgccggttgattctgatgcatacgatgcgtgaatcctaatgtggtcattttatgaaagccacatgtcgattctggctaccactatgtatgaatgaatacctgtagtttgtggtgtggaatgggttaagtttgtgcccgtgaattgtgatcaatgtatcattgattcatccttgttccatttgggactaatttctgggtgttgctggcagcaactacagtatactggatgaatgatgaagtacaactcgtttttatttcagattctcagcaggaagcgtactagtactagccactagggcgaaatgcatgctactagatgtatgatgtgtcatatcggagtacaaatactgatgaactgccagcctggggttcggatgggtgcataatatatgatagaatatgaatgtggtctgttttcatatgctgtatcgtgttttagctagttgaaggtggcggcggcgcgggcgtcgacggcgaggatggtgctgaggttgagcgggtgcatgtactcctgtgggccgtccatgaactggctgacgatgatgcggttggccttctccgtggggtggaagttgtcccagaaggcgtagacgctgcggtccgggcagacgctggacgcggcggtgcagagccccacgccgttgtatggtccctggccgcagcacgcgaccttggaggtgacgaagccgtaggccgccgggtcggagatgaagtccatgtgcatccggtaggcgttgacggcgacgaagacgtcggcgccgagctccgcgttgacgcccttgatcatgtccaccagctgcgggttgtagagcgcggcggcgcgctgcagctcggcgtcgcactccccgtcgcggctgccccgcagcgccagctcggctggggcgcaccccagcgggcccgaccccgtgaccagcacccggcgcgcgcccagcgagtagagctgccgcagcaccttggcgtactcggacacgacgtagcgcacgtagtccggcagcgcgaactcgcgggaccgcgccgagaagggcaccaggtagtagttgttgatgaagtcgttgccgcccagggtgacgagcacgagcgctccgcggacgaggcgcgcggcggcgtcctcgccgacgaggcggctcaagcggtcctggtactgccggaagtagcgcagctgcttctggacgcggatgatgttggcgaactggacccccgtgtcgttgagcacgcccacgcccgccgacgcgaagttggcgcccaccagcagcttccgcccgtccaggtgcgggctcaggtacggcagcgccggctccgcgcccaggtactcgctgatgatgtccggcacgttcttgccgttggagaagcggcccgtcgcgcggtgcgtcgggtagtcgaggccgtacggcggcgagtcggcgcgcgccgtcgtggccaggtagttgttgttgccgctgtccaccagcgagtcgccgaagacgaagaaggcgcggggcggggtcggggtggccgtggctgggcgcacctgcagcagcaggaggacgaggaggaagcacgcagtggctgcgacgagcctgccacggctacctgctgctcctggaacggaaagcattctgctgctgcttcttcgccgctgctctgctcagctgctgctgcgggacgcctatataacaggaagaagataacggggagagtgggatgatcaatagtatacgggctgatggagctgctgc

SEQ ID NO: 3627 - DNA, 3615 bp, Zea Mays
gttggatcctatcagatggttgtgagtgttagagacccattttgtttctgtcactaaataggttgtcttctttgtgctgttttgaaatagggtttattcagatgggactggacaataaaccgctctagatttccatttgcggtttaattagttggacggtcgattcaaccagctttcaatataacaagtttagttcaaataattaaaactgcaacaataactcagtgtgggaattctttcttagggaagggtcaaaggttcaaaggcttgtgatgttgccttttactttgttttttacatttatgatattgttgtcatttatcttcataatttctccttccattttttgtagaaaaacagctctgcaggaacacacatgaaaaaacaggcgtgggaggcacgcgtgatggaaaaaaaacggaggtggcacatgaaaatacagggtgtaaggagtggggagttgaccctaccaaagagataccttcaagtgcagctacaaccaagtacactgatttcctacttgcaactgcggctggaaaagttgatggcacaaaaggttctgacaaaatggttactccatttgagaagactaaaattgctgcatacattgttggggccataactccatgcatgaggctttatgcatatctaggcaaagaactcatggctttccttaaacaagatgaaaatcatccatataagaaatggattaacacatatgcatccagtgattttgagaacaatgcactccaaatagaagaattgctggacaaactgagtgtatcattaactggtgaggaacttgagattattggcaagctctaccagcaagctatgaaactggaagtggagttcttttctgctaagcttgtagaccaacctgttgtagctccactttcaagatattgtgatccaaaatataaactcttgatcttctctgattttgatttgacatgcactgttgttgattcgtctgccattttggcggagatcgcaattttgtcattccaaaaggcaagtcaaagtgggattgataataacctcgaccgtgcaaaatcgggagaactgagaaatttgtggaacatgctctctaagcaatacatggaagagtatgaggaatgcatggaaagactacttcctccagaagaatcaaagtcactagattatgataaactgtataaaggcctggaggtgcttgctgagtttgagaaggctgcaaattctagggttgtcgactctggtgtcctgaggggaatgaatttagaagacatcaggaaagctggggagcggcttattcttcagggtggctgtaaaaatttctttcagaagattgtaaaaacaagggagatcctcaatttggatatccatattctttcctactgctggtgtgcagagcttataagatccgccttctcatcagccggctgtctagatggtttgaacatacatgcgaacgagttcgcctttgaggaatctgtttcaactggtgagattgacagaaagatccagtccccgctagacaaggttgagaagttcaagagcatcagaagcgacgcggacagcacggtgccattcctgtctgtttacatcggagactcggccggtgatttgctctgcttattggaggcagatatcggtatcgtcgttgggtcaagcacaagcttgcgtagagtgggcagacagttcggtgtttcctttgtcccgttgtttctcggtctagtggagaagcagaggcaactgatggatgaagatgcgtccgtgttcaagccgcggtctggagtcctttatacggtctctagctggtcagaaatacacgccttcgtgctgggaagcgatttcagctgatggatctgctgcttcttttctccatctttttccccttgagaagcaaaaaagcttttgccggttgattctgatgcatacgatgcgtgaatcctaatgtggtcattttatgaaagccacatgtcgattctggctaccactatgtatgaatgaatacctgtagtttgtggtgtggaatgggttaagtttgtgcccgtgaattgtgatcaatgtatcattgattcatccttgttccatttgggactaatttctgggtgttgctggcagcaactacagtatactggatgaatgatgaagtacaactcgtttttatttcagattctcagcaggaagcgtactagtactagccactagggcgaaatgcatgctactagatgtatgatgtgtcatatcggagtacaaatactgatgaactgccagcctggggttcggatgggtgcataatatatgatagaatatgaatgtggtctgttttcatatgctgtatcgtgttttagctagttgaaggtggcggcggcgcgggcgtcgacggcgaggatggtgctgaggttgagcgggtgcatgtactcctgtgggccgtccatgaactggctgacgatgatgcggttggccttctccgtggggtggaagttgtcccagaaggcgtagacgctgcggtccgggcagacgctggacgcggcggtgcagagccccacgccgttgtatggtccctggccgcagcacgcgaccttggaggtgacgaagccgtaggccgccgggtcggagatgaagtccatgtgcatccggtaggcgttgacggcgacgaagacgtcggcgccgagctccgcgttgacgcccttgatcatgtccaccagctgcgggttgtagagcgcggcggcgcgctgcagctcggcgtcgcactccccgtcgcggctgccccgcagcgccagctcggctggggcgcaccccagcgggcccgaccccgtgaccagcacccggcgcgcgcccagcgagtagagctgccgcagcaccttggcgtactcggacacgacgtagcgcacgtagtccggcagcgcgaactcgcgggaccgcgccgagaagggcaccaggtagtagttgttgatgaagtcgttgccgcccagggtgacgagcacgagcgctccgcggacgaggcgcgcggcggcgtcctcgccgacgaggcggctcaagcggtcctggtactgccggaagtagcgcagctgcttctggacgcggatgatgttggcgaactggacccccgtgtcgttgagcacgcccacgcccgccgacgcgaagttggcgcccaccagcagcttccgcccgtccaggtgcgggctcaggtacggcagcgccggctccgcgcccaggtactcgctgatgatgtccggcacgttcttgccgttggagaagcggcccgtcgcgcggtgcgtcgggtagtcgaggccgtacggcggcgagtcggcgcgcgccgtcgtggccaggtagttgttgttgccgctgtccaccagcgagtcgccgaagacgaagaaggcgcggggcggggtcggggtggccgtggctgggcgcacctgcagcagcaggaggacgaggaggaagcacgcagtggctgcgacgagcctgccacggctacctgctgctcctggaacggaaagcattctgctgctgcttcttcgccgctgctctgctcagctgctgctgcgggacgcctatataacaggaagaagataacggggagagtgggatgatcaatagtatacgggctgatggagctgctgc

SEQ ID NO: 3628 - DNA, 3406 bp, Zea Mays
gttggatcctatcagatggttgtgagtgttagagacccattttgtttctgtcactaaataggttgtcttctttgtgctgttttgaaatagggtttattcagatgggactggacaataaaccgctctagatttccatttgcggtttaattagttggacggtcgattcaaccagctttcaatataacaagtttagttcaaataattaaaactgcaacaataactcagtgtgggaattctttcttagggaagggtcaaaggttcaaaggcttgtgatgttgccttttactttgttttttacatttatgatattgttgtcatttatcttcataatttctccttccattttttgtagaaaaacagctctgcaggaacacacatgaaaaaacaggcgtgggaggcacgcgtgatggaaaaaaaacggaggagtggggagttgaccctaccaaagagataccttcaagtgcagctacaaccaagtacactgatttcctacttgcaactgcggctggaaaagttgatggcacaaaagaacaatgcactccaaatagaagaattgctggacaaactgagtgtatcattaactggtgaggaacttgagattattggcaagctctaccagcaagctatgaaactggaagtggagttcttttctgctaagcttgtagaccaacctgttgtagctccactttcaagatattgtgatccaaaatataaactcttgatcttctctgattttgatttgacatgcactgttgttgattcgtctgccattttggcggagatcgcaattttgtcattccaaaaggcaagtcaaagtgggattgataataacctcgaccgtgcaaaatcgggagaactgagaaatttgtggaacatgctctctaagcaatacatggaagagtatgaggaatgcatggaaagactacttcctccagaagaatcaaagtcactagattatgataaactgtataaaggcctggaggtgcttgctgagtttgagaaggctgcaaattctagggttgtcgactctggtgtcctgaggggaatgaatttagaagacatcaggaaagctggggagcggcttattcttcagggtggctgtaaaaatttctttcagaagattgtaaaaacaagggagatcctcaatttggatatccatattctttcctactgctggtgtgcagagcttataagatccgccttctcatcagccggctgtctagatggtttgaacatacatgcgaacgagttcgcctttgaggaatctgtttcaactggtgagattgacagaaagatccagtccccgctagacaaggttgagaagttcaagagcatcagaagcgacgcggacagcacggtgccattcctgtctgtttacatcggagactcggccggtgatttgctctgcttattggaggcagatatcggtatcgtcgttgggtcaagcacaagcttgcgtagagtgggcagacagttcggtgtttcctttgtcccgttgtttctcggtctagtggagaagcagaggcaactgatggatgaagatgcgtccgtgttcaagccgcggtctggagtcctttatacggtctctagctggtcagaaatacacgccttcgtgctgggaagcgatttcagctgatggatctgctgcttcttttctccatctttttccccttgagaagcaaaaaagcttttgccggttgattctgatgcatacgatgcgtgaatcctaatgtggtcattttatgaaagccacatgtcgattctggctaccactatgtatgaatgaatacctgtagtttgtggtgtggaatgggttaagtttgtgcccgtgaattgtgatcaatgtatcattgattcatccttgttccatttgggactaatttctgggtgttgctggcagcaactacagtatactggatgaatgatgaagtacaactcgtttttatttcagattctcagcaggaagcgtactagtactagccactagggcgaaatgcatgctactagatgtatgatgtgtcatatcggagtacaaatactgatgaactgccagcctggggttcggatgggtgcataatatatgatagaatatgaatgtggtctgttttcatatgctgtatcgtgttttagctagttgaaggtggcggcggcgcgggcgtcgacggcgaggatggtgctgaggttgagcgggtgcatgtactcctgtgggccgtccatgaactggctgacgatgatgcggttggccttctccgtggggtggaagttgtcccagaaggcgtagacgctgcggtccgggcagacgctggacgcggcggtgcagagccccacgccgttgtatggtccctggccgcagcacgcgaccttggaggtgacgaagccgtaggccgccgggtcggagatgaagtccatgtgcatccggtaggcgttgacggcgacgaagacgtcggcgccgagctccgcgttgacgcccttgatcatgtccaccagctgcgggttgtagagcgcggcggcgcgctgcagctcggcgtcgcactccccgtcgcggctgccccgcagcgccagctcggctggggcgcaccccagcgggcccgaccccgtgaccagcacccggcgcgcgcccagcgagtagagctgccgcagcaccttggcgtactcggacacgacgtagcgcacgtagtccggcagcgcgaactcgcgggaccgcgccgagaagggcaccaggtagtagttgttgatgaagtcgttgccgcccagggtgacgagcacgagcgctccgcggacgaggcgcgcggcggcgtcctcgccgacgaggcggctcaagcggtcctggtactgccggaagtagcgcagctgcttctggacgcggatgatgttggcgaactggacccccgtgtcgttgagcacgcccacgcccgccgacgcgaagttggcgcccaccagcagcttccgcccgtccaggtgcgggctcaggtacggcagcgccggctccgcgcccaggtactcgctgatgatgtccggcacgttcttgccgttggagaagcggcccgtcgcgcggtgcgtcgggtagtcgaggccgtacggcggcgagtcggcgcgcgccgtcgtggccaggtagttgttgttgccgctgtccaccagcgagtcgccgaagacgaagaaggcgcggggcggggtcggggtggccgtggctgggcgcacctgcagcagcaggaggacgaggaggaagcacgcagtggctgcgacgagcctgccacggctacctgctgctcctggaacggaaagcattctgctgctgcttcttcgccgctgctctgctcagctgctgctgcgggacgcctatataacaggaagaagataacggggagagtgggatgatcaatagtatacgggctgatggagctgctgc

SEQ ID NO: 3629 - DNA, 4114 bp, Zea Mays
gttggatcctatcagatggttgtgagtgttagagacccattttgtttctgtcactaaataggttgtcttctttgtgctgttttgaaatagggtttattcagatgggactggacaataaaccgctctagatttccatttgcggtttaattagttggacggtcgattcaaccagctttcaatataacaagtttagttcaaataattaaaactgcaacaataactcagtgtgggaattctttcttagggaagggtcaaaggttcaaaggcttgtgatgttgccttttactttgttttttacatttatgatattgttgtcatttatcttcataatttctccttccattttttgtagaaaaacagctctgcaggaacacacatgaaaatacagggtgtaaggcatgtgtgatggggaaacctgtaaaaagaacaggagtatggaggtgaaaggaaaaaaaagtaaaaataggaacacatggagggagaaaaattaggtggaacatggtcacagaaaaatctagaggtagtccgggagaaaatctggaggtataatgtaaaaaaagtccaggtcacatgtgggatgtaagggcgcgaggacactttaggaaggaagaaaagacggtgcgaagaatcatttcactcatgattttagttctaaatagagagaacttgaattgaacacacacacacttctaatgtatcctgatcatgtatttttatatggaagtatgtaactatgttgtattcagttaattaagatacattttaaggccctgcatctacaattaaaatgcttatcaactgacttattgtataagttgctagagatatatctatggtccttaaaactgaacttcatctttcctccctgattcaataactgctaactaattctcttcccaacataatttttattatactcaatccggtatcctgtggattcaatttgcaggagtggggagttgaccctaccaaagagataccttcaagtgcagctacaaccaagtacactgatttcctacttgcaactgcggctggaaaagttgatggcacaaaaggttctgacaaaatggttactccatttgagaagactaaaattgctgcatacattgttggggccataactccatgcatgaggctttatgcatatctaggcaaagaactcatggctttccttaaacaagatgaaaatcatccatataagaaatggattaacacatatgcatccagtgattttgagaacaatgcactccaaatagaagaattgctggacaaactgagtgtatcattaactggtgaggaacttgagattattggcaagctctaccagcaagctatgaaactggaagtggagttcttttctgctaagcttgtagaccaacctgttgtagctccactttcaagatattgtgatccaaaatataaactcttgatcttctctgattttgatttgacatgcactgttgttgattcgtctgccattttggcggagatcgcaattttgtcattccaaaaggcaagtcaaagtgggattgataataacctcgaccgtgcaaaatcgggagaactgagaaatttgtggaacatgctctctaagcaatacatggaagagtatgaggaatgcatggaaagactacttcctccagaagaatcaaagtcactagattatgataaactgtataaaggcctggaggtgcttgctgagtttgagaaggctgcaaattctagggttgtcgactctggtgtcctgaggggaatgaatttagaagacatcaggaaagctggggagcggcttattcttcagggtggctgtaaaaatttctttcagaagattgtaaaaacaagggagatcctcaatttggatatccatattctttcctactgctggtgtgcagagcttataagatccgccttctcatcagccggctgtctagatggtttgaacatacatgcgaacgagttcgcctttgaggaatctgtttcaactggtgagattgacagaaagatccagtccccgctagacaaggttgagaagttcaagagcatcagaagcgacgcggacagcacggtgccattcctgtctgtttacatcggagactcggccggtgatttgctctgcttattggaggcagatatcggtatcgtcgttgggtcaagcacaagcttgcgtagagtgggcagacagttcggtgtttcctttgtcccgttgtttctcggtctagtggagaagcagaggcaactgatggatgaagatgcgtccgtgttcaagccgcggtctggagtcctttatacggtctctagctggtcagaaatacacgccttcgtgctgggaagcgatttcagctgatggatctgctgcttcttttctccatctttttccccttgagaagcaaaaaagcttttgccggttgattctgatgcatacgatgcgtgaatcctaatgtggtcattttatgaaagccacatgtcgattctggctaccactatgtatgaatgaatacctgtagtttgtggtgtggaatgggttaagtttgtgcccgtgaattgtgatcaatgtatcattgattcatccttgttccatttgggactaatttctgggtgttgctggcagcaactacagtatactggatgaatgatgaagtacaactcgtttttatttcagattctcagcaggaagcgtactagtactagccactagggcgaaatgcatgctactagatgtatgatgtgtcatatcggagtacaaatactgatgaactgccagcctggggttcggatgggtgcataatatatgatagaatatgaatgtggtctgttttcatatgctgtatcgtgttttagctagttgaaggtggcggcggcgcgggcgtcgacggcgaggatggtgctgaggttgagcgggtgcatgtactcctgtgggccgtccatgaactggctgacgatgatgcggttggccttctccgtggggtggaagttgtcccagaaggcgtagacgctgcggtccgggcagacgctggacgcggcggtgcagagccccacgccgttgtatggtccctggccgcagcacgcgaccttggaggtgacgaagccgtaggccgccgggtcggagatgaagtccatgtgcatccggtaggcgttgacggcgacgaagacgtcggcgccgagctccgcgttgacgcccttgatcatgtccaccagctgcgggttgtagagcgcggcggcgcgctgcagctcggcgtcgcactccccgtcgcggctgccccgcagcgccagctcggctggggcgcaccccagcgggcccgaccccgtgaccagcacccggcgcgcgcccagcgagtagagctgccgcagcaccttggcgtactcggacacgacgtagcgcacgtagtccggcagcgcgaactcgcgggaccgcgccgagaagggcaccaggtagtagttgttgatgaagtcgttgccgcccagggtgacgagcacgagcgctccgcggacgaggcgcgcggcggcgtcctcgccgacgaggcggctcaagcggtcctggtactgccggaagtagcgcagctgcttctggacgcggatgatgttggcgaactggacccccgtgtcgttgagcacgcccacgcccgccgacgcgaagttggcgcccaccagcagcttccgcccgtccaggtgcgggctcaggtacggcagcgccggctccgcgcccaggtactcgctgatgatgtccggcacgttcttgccgttggagaagcggcccgtcgcgcggtgcgtcgggtagtcgaggccgtacggcggcgagtcggcgcgcgccgtcgtggccaggtagttgttgttgccgctgtccaccagcgagtcgccgaagacgaagaaggcgcggggcggggtcggggtggccgtggctgggcgcacctgcagcagcaggaggacgaggaggaagcacgcagtggctgcgacgagcctgccacggctacctgctgctcctggaacggaaagcattctgctgctgcttcttcgccgctgctctgctcagctgctgctgcgggacgcctatataacaggaagaagataacggggagagtgggatgatcaatagtatacgggctgatggagctgctgc

SEQ ID NO: 3630 - DNA, 2408 bp, Zea Mays
ctcaaagggtggacatgagccgaaattcatgaggtggcccagtaacagtagtttctcttaaaggctcaaggcatgactcctccatctccactcgatcctccgtcttatcaccggtgaggtactgaggtgagacgatctccgccaccatggcctccagcacctccctctccctttgcttgcacgcctcgtcgccctcgtcctcgtctcctggactccgccgaccctccctcgcctcctcctcgtcctccaggtccgagagaacgcgcaagatcagggccaaggcggtcagggaggactggaggcagaaatccaagcccatccctcctggcgccgtctaccctgccaaggaccactgcagccgttgtgggctctgcgacacatactacgttgcgcatgtcaagactgcctgtgccttcctgggagacggcatgtcccgtgtcgaggatcttgagcgacaagtccacgggagaggccggaaggaaggcatggatgaaatgtactttggagtctatgaccaactcttgtatgccaggaagaccgaacctgttgaaggagcccagtggacgggaatagtgacaacaatcgctgtcgagatgctgaaagcaaacatggttgatgctgtggtttgtgtacaaagtgatcctgacgacaggcttgctccaagacctgttttggccaggacaccagacgaagtaattgcagccaaaggtgtgaagccaacattatcaccaaatctcaatacacttgccttagtcgaggcagctggtgtaaagcggcttcttttctgcggtgtgggctgtcaagtgcaagctttgagatctgtagaaaagtaccttggtttggaaaagctttatgtgcttggaacaaactgtgttgacaatggtacgcgtgaagggcttgataaattcttgaaagcggcaagcagtgagccagaaactgttatgcattatgaatttatgcaagactataaggtgcatctaaagcatttagatgggcacattgaagaggttccttatttttgcctgccagcaaacgacctggtagatgttattgcaccgtcatgctatagctgctttgactacacaaatggcttggcggtaaggtttccatcattttgaatttgaatagggtcccttgttttgaataggaactttctttctagtgctcatctgcacaaatagacagaagttgtacttcctagtgctcatctgcacaaatagaaatgattggatcacgtgtcgtttagaaaagatggaataatcctgaaacacactagactgaatcatctatgtgttgcatgacgtggactgtgtcgttcttattattacgcactaacatagctgaactaattctcttgacctcgagttgcctgggtgcctcttcaaccttcatgttcagaatagcatttgttgtgagatatcatctgttatcttggtatatgtcttcagtctgctctcttggagcagacaaacagctcagagtcactatgttgtttggttaaatgtctgcaggatttagtggtggggtatatgggagtaccgaaatatgctggggtctccatgacacagcatcctcagtacattacagtcaggaacgatcgtggacaggagatgctgaacctggtagctggccttctggaaagcacacctacaattagcagtggctccaggcaaccgtttgttatggagacagtgaaagctgacgatgccgcaaaactggggaaaggcccttcgaaaccagctcctagattcgtcggcgacattctggccttcctgctgaacttggttggacccaagggtctggagttcgcacgctactctctggactatcacaccattcggaattatctgcatgttaggcgggcatggggaaagcaaagagctgagcagcacatcccggggtatgccaagaagatcgtggaggcctacgacaaagacggacggatcgaggcaatggttacgcagtcaggtgactgactcacaccattcacactctactagctggtagtatttgtatactagctggtagtatttgtactgcattgtagtaaagattaaggaatgtagaagaattgtttgtgatgtgacgtagtggcgatgtatacagtagaatgtataggctgcatggcagcagctcagatctgtatgtacatcctgcgcttgccagtttctagtttgcatttgcttttctgggcatgccttttgttttaattatattgtctttgataagtccaagataaaagaagccacagagtcctcaaatgttggaaatcgccaagttaatggctgaattttgttgcgtcaatctaagcacaaccatgctacgattgatttagtgtgtatgatatgatgaggggtagctctatgttaaggtttggacgaagcagaggagagttgggcggctttggt

SEQ ID NO: 3631 - DNA, 2536 bp, Zea Mays
ctcaaagggtggacatgagccgaaattcatgaggtggcccagtaacagtagtttctcttaaaggctcaaggcatgactcctccatctccactcgatcctccgtcttatcaccggtgaggtactgaggtgagacgatctccgccaccatggcctccagcacctccctctccctttgcttgcacgcctcgtcgccctcgtcctcgtctcctggactccgccgaccctccctcgcctcctcctcgtcctccaggtccgagagaacgcgcaagatcagggccaaggcggtcagggaggactggaggcagaaatccaagcccatccctcctggcgccgtctaccctgccaaggaccactgcaggatcttgagcgacaagtccacgggagaggccggaaggaaggcatggatgaaatgtactttggagtctatgaccaactcttgtatgccaggaagaccgaacctgttgaaggagcccagtggacgggaatagtgacaacaatcgctgtcgagatgctgaaagcaaacatggttgatgctgtggtttgtgtacaaagtgatcctgacgacaggcttgctccaagacctgttttggccaggacaccagacgaagtaattgcagccaaaggtgtgaagccaacattatcaccaaatctcaatacacttgccttagtcgaggcagctggtgtaaagcggcttcttttctgcggtgtgggctgtcaagtgcaagctttgagatctgtagaaaagtaccttggtttggaaaagctttatgtgcttggaacaaactttgacaatggtacgcgtgaagggcttgataaattcttgaaagcggcaagcagtgagccagaaactgttatgcattatgaatttatgcaagactataaggtatgacattgaaataattagctgcatacattctttttcccacattggtaggttcatgtatggataatcaataggataggaatacagttttccatatcaacagctcaaggagcagttttaggatcaacacaagaacacatggcatttacagaattgccatgattttccttagattttttttatgtatgatcacattgtataactgagaatatttacaggtgcatctaaagcatttagatgggcacattgaagaggttccttatttttgcctgccagcaaacgacctggtagatgttattgcaccgtcatgctatagctgctttgactacacaaatggcttggcggtaaggtttccatcattttgaatttgaatagggtcccttgttttgaataggaactttctttctagtgctcatctgcacaaatagacagaagttgtacttcctagtgctcatctgcacaaatagaaatgattggatcacgtgtcgtttagaaaagatggaataatcctgaaacacactagactgaatcatctatgtgttgcatgacgtggactgtgtcgttcttattattacgcactaacatagctgaactaattctcttgacctcgagttgcctgggtgcctcttcaaccttcatgttcagaatagcatttgttgtgagatatcatctgttatcttggtatatgtcttcagtctgctctcttggagcagacaaacagctcagagtcactatgttgtttggttaaatgtctgcaggatttagtggtggggtatatgggagtaccgaaatatgctggggtctccatgacacagcatcctcagtacattacagtcaggaacgatcgtggacaggagatgctgaacctggtagctggccttctggaaagcacacctacaattagcaggctccaggcaaccgtttgttatggagacagtgaaagctgacgatgccgcaaaactggggaaaggcccttcgaaaccagctcctagattcgtcggcgacattctggccttcctgctgaacttggttggacccaagggtctggagttcgcacgctactctctggactatcacaccattcggaattatctgcatgttaggcgggcatggggaaagcaaagagctgagcagcacatcccggggtatgccaagaagatcgtggaggcctacgacaaagacggacggatcgaggcaatggttacgcagtcaggtgactgactcacaccattcacactctactagctggtagtatttgtatactagctggtagtatttgtactgcattgtagtaaagattaaggaatgtagaagaattgtttgtgatgtgacgtagtggcgatgtatacagtagaatgtataggctgcatggcagcagctcagatctgtatgtacatcctgcgcttgccagtttctagtttgcatttgcttttctgggcatgccttttgttttaattatattgtctttgataagtccaagataaaagaagccacagagtcctcaaatgttggaaatcgccaagttaatggctgaattttgttgcgtcaatctaagcacaaccatgctacgattgatttagtgtgtatgatatgatgaggggtagctctatgttaaggtttggacgaagcagaggagagttgggcggctttggt

SEQ ID NO: 3632 - DNA, 1730 bp, Zea Mays
cccagtaacagtagtttctcttaaaggctcaaggcatgactcctccatctccactcgatcctccgtcttatcaccggtgaggtactgaggtccgagagaacgcgcaagatcagggccaaggcggtcagggaggactggaggcagaaatccaagcccatccctcctggcgccgtctaccctgccaaggaccactgcaggatcttgagcgacaagtccacgggagaggccggaaggaaggcatggatgaaatgtactttggagtctatgaccaactcttgtatgccaggaagaccgaacctgttgaaggagcccagtggacgggaatagtgacaacaatcgctgtcgagatgctgaaagcaaacatggttgatgctgtgtgatcctgacgacaggcttgctccaagacctgttttggccaggacaccagacgaagtaattgcagccaaaggtgtgaagccaacattatcaccaaatctcaatacacttgccttagtcgagctggtgtaaagcggcttcttttctgcggtgtgggctgtcaagtgcaagctttgagatctgtagaaaagtaccttggtttggaaaagctttatgtgcttggaacaaactgtgttgacaatggtacgcgtgaagggcttgataaattcttgaaagcggcaagcagtgagccagaaactgttatgcattatgaatttatgcaagactataaggtgcatctaaagcatttagatgggcacattgaagaggttccttatttttgcctgccagcaaacgacctggtagatgttattgcaccgtcatgctatagctgctttgactacacaaatggcttggcggatttagtggtggggtatatgggagtaccgaaatatgctggggtctccatgacacagcatcctcagtacattacagtcaggaacgatcgtggacaggagatgctgaacctggtagctggccttctggaaagcacacctacaattagcagtggctccaggcaaccgtttgttatggagacagtgaaagctgacgatgccgcaaaactggggaaaggcccttcgaaaccagctcctagattcgtcggcgacattctggccttcctgctgaacttggttggacccaagggtctggagttcgcacgctactctctggactatcacaccattcggaattatctgcatgttaggcgggcatggggaaagcaaagagctgagcagcacatcccggggtatgccaagaagatcgtggaggcctacgacaaagacggacggatcgaggcaatggttacgcagtcaggtgactgactcacaccattcacactctactagctggtagtatttgtatactagctggtagtatttgtactgcattgtagtaaagattaaggaatgtagaagaattgtttgtgatgtgacgtagtggcgatgtatacagtagaatgtataggctgcatggcagcagctcagatctgtatgtacatcctgcgcttgccagtttctagtttgcatttgcttttctgggcatgccttttgttttaattatattgtctttgataagtccaagataaaagaagccacagagtcctcaaatgttggaaatcgccaagttaatggctgaattttgttgcgtcaatctaagcacaaccatgctacgattgatttagtgtgtatgatatgatgaggggtagctctatgttaaggtttggacgaagcagaggagagttgggcggctttggt

SEQ ID NO: 3633 - DNA, 2008 bp, Zea Mays
cagtaacagtagtttctcttaaaggctcaaggcatgactcctccatctccactcgatcctccgtcttatcaccggtgaggtactgaggtgagacgatctccgccaccatggcctccagcacctccctctccctttgcttgcacgcctcgtcgccctcgtcctcgtctcctggactccgccgaccctccctcgcctcctcctcgtcctccaggtccgagagaacgcgcaagatcagggccaaggcggtcagggaggactggaggcagaaatccaagcccatccctcctggcgccgtctaccctgccaaggaccactgcagccgttgtgggctctgcgacacatactacgttgcgcatgtcaagactgcctgtgccttcctgggagacggcatgtcccgtgtcgaggatcttgagcgacaagtccacgggagaggccggaaggaaggcatggatgaaatgtactttggagtctatgaccaactcttgtatgccaggaagaccgaacctgttgaaggagcccagtggacgggaatagtgacaacaatcgctgtcgagatgctgaaagcaaacatggttgatgctgtggtttgtgtacaaagtgatcctgacgacaggcttgctccaagacctgttttggccaggacaccagacgaagtaattgcagccaaaggtgtgaagccaacattatcaccaaatctcaatacacttgccttagtcgaggcagctggtgtaaagcggcttcttttctgcggtgtgggctgtcaagtgcaagccttggtttggaaaagctttatgtgcttggaacaaactgtgttgacaatggtacgcgtgaagggcttgataaattcttgaaagcggcaagcagtgagccagaaactgttatgcattatgaatttatgcaagactataaggtgcatctaaagcatttagatgggcacattgaagaggttccttatttttgcctgccagcaaacgacctggtagatgttattgcaccgtcatgctatagctgctttgactacacaaatggcttggcggatttagtggtggggtatatgggagtaccgaaatatgctggggtctccatgacacagcatcctcagtacattacagtcaggtagagcgagtaggattgtgcaattatattgtaaacagtaccctggtgagcatcattggaactctatcccttcaggaacgatcgtggacaggagatgctgaacctggtagctggccttctggaaagcacacctacaattagcagtggctccaggcaaccgtttgttatggagacagtgaaagctgacgatgccgcaaaactggggaaaggcccttcgaaaccagctcctagattcgtcggcgacattctggccttcctgctgaacttggttggacccaagggtctggagttcgcacgctactctctggactatcacaccattcggaattatctgcatgttaggcgggcatggggaaagcaaagagctgagcagcacatcccggggtatgccaagaagatcgtggaggcctacgacaaagacggacggatcgaggcaatggttacgcagtcaggtgactgactcacaccattcacactctactagctggtagtatttgtatactagctggtagtatttgtactgcattgtagtaaagattaaggaatgtagaagaattgtttgtgatgtgacgtagtggcgatgtatacagtagaatgtataggctgcatggcagcagctcagatctgtatgtacatcctgcgcttgccagtttctagtttgcatttgcttttctgggcatgccttttgttttaattatattgtctttgataagtccaagataaaagaagccacagagtcctcaaatgttggaaatcgccaagttaatggctgaattttgttgcgtcaatctaagcacaaccatgctacgattgatttagtgtgtatgatatgatgaggggtagctctatgttaaggtttggacgaagcagaggagagttgggcggctttggt

SEQ ID NO: 3634 - DNA, 1816 bp, Zea Mays
agtaacagtagtttctcttaaaggctcaaggcatgactcctccatctccactcgatcctccgtcttatcaccggtgaggtactgaggtccgagagaacgcgcaagatcagggccaaggcggtcagggaggactggaggcagaaatccaagcccatccctcctggcgccgtctaccctgccaaggaccactgcagccgttgtgggctctgcgacacatactacgttgcgcatgtcaagactgcctgtgccttcctgggagacggcatgtcccgtgtcgaggatcttgagcgacaagtccacgggagaggccggaaggaaggcatggatgaaatgtactttggagtctatgaccaactcttgtatgccaggaagaccgaacctgttgaaggagcccagtggacgggaatagtgacaacaatcgctgtcgagatgctgaaagcaaacatggttgatgctgtgtgatcctgacgacaggcttgctccaagacctgttttggccaggacaccagacgaagtaattgcagccaaaggtgtgaagccaacattatcaccaaatctcaatacacttgccttagtcgaggcagctggtgtaaagcggcttcttttctgcggtgtgggctgtcaagtgcaagctttgagatctgtagaaaagtaccttggtttggaaaagctttatgtgcttggaacaaactgtgttgacaatggtacgcgtgaagggcttgataaattcttgaaagcggcaagcagtgagccagaaactgttatgcattatgaatttatgcaagactataaggtgcatctaaagcatttagatgggcacattgaagaggttccttatttttgcctgccagcaaacgacctggtagatgttattgcaccgtcatgctatagctgctttgactacacaaatggcttggcggatttagtggtggggtatatgggagtaccgaaatatgctggggtctccatgacacagcatcctcagtacattacagtcaggaacgatcgtggacaggagatgctgaacctggtagctggccttctggaaagcacacctacaattagcagtggctccaggcaaccgtttgttatggagacagtgaaagctgacgatgccgcaaaactggggaaaggcccttcgaaaccagctcctagattcgtcggcgacattctggccttcctgctgaacttggttggacccaagggtctggagttcgcacgctactctctggactatcacaccattcggaattatctgcatgttaggcgggcatggggaaagcaaagagctgagcagcacatcccggggtatgccaagaagatcgtggaggcctacgacaaagacggacggatcgaggcaatggttacgcagtcaggtgactgactcacaccattcacactctactagctggtagtatttgtatactagctggtagtatttgtactgcattgtagtaaagattaaggaatgtagaagaattgtttgtgatgtgacgtagtggcgatgtatacagtagaatgtataggctgcatggcagcagctcagatctgtatgtacatcctgcgcttgccagtttctagtttgcatttgcttttctgggcatgccttttgttttaattatattgtctttgataagtccaagataaaagaagccacagagtcctcaaatgttggaaatcgccaagttaatggctgaattttgttgcgtcaatctaagcacaaccatgctacgattgatttagtgtgtatgatatgatgaggggtagctctatgttaaggtttggacgaagcagaggagagttgggcggctttggt

SEQ ID NO: 3635 - DNA, 2042 bp, Zea Mays
ttctcttaaaggctcaaggcatgactcctccatctccactcgatcctccgtcttatcaccggtgaggtactgaggtgagacgatctccgccaccatggcctccagcacctccctctccctttgcttgcacgcctcgtcgccctcgtcctcgtctcctggactccgccgaccctccctcgcctcctcctcgtcctccaggtccgagagaacgcgcaagatcagggccaaggcggtcagggaggactggaggcagaaatccaagcccatccctcctggcgccgtctaccctgccaaggaccactgcagccgttgtgggctctgcgacacatactacgttgcgcatgtcaagactgcctgtgccttcctgggagacggcatgtcccgtgtcgaggatcttgagcgacaagtccacgggagaggccggaaggaaggcatggatgaaatgtactttggagtctatgaccaactcttgtatgccaggaagaccgaacctgttgaaggagcccagtggacgggaatagtgacaacaatcgctgtcgagatgctgaaagcaaacatggttgatgctgtggtttgtgtacaaagtgatcctgacgacaggcttgctccaagacctgttttggccaggacaccagacgaagtaattgcagccaaaggtgtgaagccaacattatcaccaaatctcaatacacttgccttagtcgaggcagctggtgtaaagcggcttcttttctgcggtgtgggctgtcaagtgcaagctttgagatctgtagaaaagtaccttggtttggaaaagctttatgtgcttggaacaaactgtgttgacaatggtacgcgtgaagggcttgataaattcttgaaagcggcaagcagtgagccagaaactgttatgcattatgaatttatgcaagactataaggtgcatctaaagcatttagatgggcacattgaagaggttccttatttttgcctgccagcaaacgacctggtagatgttattgcaccgtcatgctatagctgctttgactacacaaatggcttggcggatttagtggtggggtatatgggagtaccgaaatatgctggggtctccatgacacagcatcctcagtacattacagtcaggaacgatcgtggacaggagatgctgaacctggtagctggccttctggaaagcacacctacaattagcaggctccaggcaaccgtttgttatggagacagtgaaagctgacgatgccgcaaaactggggaaaggcccttcgaaaccagctcctagattcgtcggcgacattctggccttcctgctgaacttggtcagttcttggtcgtctgcagaggagggatggcatgagatttgtaacgttaactgaacacgagtacataaccaggctgtgctgtatgatatgctgtttcaggttggacccaagggtctggagttcgcacgctactctctggactatcacaccattcggaattatctgcatgttaggcgggcatggggaaagcaaagagctgagcagcacatcccggggtatgccaagaagatcgtggaggcctacgacaaagacggacggatcgaggcaatggttacgcagtcaggtgactgactcacaccattcacactctactagctggtagtatttgtatactagctggtagtatttgtactgcattgtagtaaagattaaggaatgtagaagaattgtttgtgatgtgacgtagtggcgatgtatacagtagaatgtataggctgcatggcagcagctcagatctgtatgtacatcctgcgcttgccagtttctagtttgcatttgcttttctgggcatgccttttgttttaattatattgtctttgataagtccaagataaaagaagccacagagtcctcaaatgttggaaatcgccaagttaatggctgaattttgttgcgtcaatctaagcacaaccatgctacgattgatttagtgtgtatgatatgatgaggggtagctctatgttaaggtttggacgaagcagaggagagttgggcggctttggt

SEQ ID NO: 3636 - DNA, 2141 bp, Zea Mays
cttaaaggctcaaggcatgactcctccatctccactcgatcctccgtcttatcaccggtgaggtactgaggtccgagagaacgcgcaagatcagggccaaggcggtcagggaggactggaggcagaaatccaagcccatccctcctggcgccgtctaccctgccaaggaccactgcaggatcttgagcgacaagtccacgggagaggccggaaggaaggcatggatgaaatgtactttggagtctatgaccaactcttgtatgccaggaagaccgaacctgttgaaggagcccagtggacgggaatagtgacaacaatcgctgtcgagatgctgaaagcaaacatggttgatgctgtggtttgtgtacaaaggcacccaaacaagaatcaaatgccacatcattctttctcagtgctatgcacaagcattaccacatggattcaaataatgttttttaccccctctgcagtgatcctgacgacaggcttgctccaagacctgttttggccaggacaccagacgaagtaattgcagccaaaggtgtgaagccaacattatcaccaaatctcaatacacttgccttagtcgaggcagctggtgtaaagcggcttcttttctgcggtgtgggctgtcaagtgcaagctttgagatctgtagaaaagtaccttggtttggaaaagctttatgtgcttggaacaaactgtgttgacaatggtacgcgtgaagggcttgataaattcttgaaagcggcaagcagtgagccagaaactgttatgcattatgaatttatgcaagactataaggtgcatctaaagcatttagatgggcacattgaagaggttccttatttttgcctgccagcaaacgacctggtagatgttattgcaccgtcatgctatagctgctttgactacacaaatggcttggcggtaaggtttccatcattttgaatttgaatagggtcccttgttttgaataggaactttctttctagtgctcatctgcacaaatagacagaagttgtacttcctagtgctcatctgcacaaatagaaatgattggatcacgtgtcgtttagaaaagatggaataatcctgaaacacactagactgaatcatctatgtgttgcatgacgtggactgtgtcgttcttattattacgcactaacatagctgaactaattctcttgacctcgagttgcctgggtgcctcttcaaccttcatgttcagaatagcatttgttgatttagtggtggggtatatgggagtaccgaaatatgctggggtctccatgacacagcatcctcagtacattacagtcaggaacgatcgtggacaggagatgctgaacctggtagctggccttctggaaagcacacctacaattagcagtggctccaggcaaccgtttgttatggagacagtgaaagctgacgatgccgcaaaactggggaaaggcccttcgaaaccagctcctagattcgtcggcgacattctggccttcctgctgaacttggttggacccaagggtctggagttcgcacgctactctctggactatcacaccattcggaattatctgcatgttaggcgggcatggggaaagcaaagagctgagcagcacatcccggggtatgccaagaagatcgtggaggcctacgacaaagacggacggatcgaggcaatggttacgcagtcaggtgactgactcacaccattcacactctactagctggtagtatttgtatactagctggtagtatttgtactgcattgtagtaaagattaaggaatgtagaagaattgtttgtgatgtgacgtagtggcgatgtatacagtagaatgtataggctgcatggcagcagctcagatctgtatgtacatcctgcgcttgccagtttctagtttgcatttgcttttctgggcatgccttttgttttaattatattgtctttgataagtccaagataaaagaagccacagagtcctcaaatgttggaaatcgccaagttaatggctgaattttgttgcgtcaatctaagcacaaccatgctacgattgatttagtgtgtatgatatgatgaggggtagctctatgttaaggtttggacgaagcagaggagagttgggcggctttggt

SEQ ID NO: 3637 - DNA, 2929 bp, Zea Mays
cttaaaggctcaaggcatgactcctccatctccactcgatcctccgtcttatcaccggtgaggtactgaggtgagacgatctccgccaccatggcctccagcacctccctctccctttgcttgcacgcctcgtcgccctcgtcctcgtctcctggactccgccgaccctccctcgcctcctcctcgtcctccaggtccgagagaacgcgcaagatcagggccaaggcggtcagggaggactggaggcagaaatccaagcccatccctcctggcgccgtctaccctgccaaggaccactgcagccgttgtgggctctgcgacacatactacgttgcgcatgtcaagactgcctgtgccttcctgggagacggcatgtcccgtgtcgaggtcacctcccttcatcttcgcatcacatcacctgcctagaacggctcaaacagtttgctgaatgaaaacaaaaatgatcgtctgatgtttgatcaagccatgggctgcagtgctgcacgcagttactccctccgtcgaaagttatagttcaacttttctaactctgaccaagttcatagagaccatctacaatatcaaaatgatttcatcaatttcttcgtgaaaaatgtcttgatagtttatttgaacatatacagagggagtatatttttttataaaatacttaggtcaagtcaaagttaaaagaagttttgatttagaataaagctaaagtgaactataatttagaccgagggagtagtaatgctcgacatgaattctacactttgtttcagtgaaataaagcggggaactctcctgtttcctaaaaaaagttgacacaaatttacagatgccaacactctcctcactatatttaggatcttgagcgacaagtccacgggagaggccggaaggaaggcatggatgaaatgtactttggagtctatgaccaactcttgtatgccaggaagaccgaacctgttgaaggagcccagtggacgggaatagtgacaacaatcgctgtcgagatgctgaaagcaaacatggttgatgctgtggtttgtgtacaaaggcacccaaacaagaatcaaatgccacatcattctttctcagtgctatgcacaagcattaccacatggattcaaataatgttttttaccccctctgcagtgatcctgacgacaggcttgctccaagacctgttttggccaggacaccagacgaagtaattgcagccaaaggtgtgaagccaacattatcaccaaatctcaatacacttgccttagtcgaggcagctggtgtaaagcggcttcttttctgcggtgtgggctgtcaagtgcaagctttgagatctgtagaaaagtaccttggtttggaaaagctttatgtgcttggaacaaactgtgttgacaatggtacgcgtgaagggcttgataaattcttgaaagcggcaagcagtgagccagaaactgttatgcattatgaatttatgcaagactataaggtgcatctaaagcatttagatgggcacattgaagaggttccttatttttgcctgccagcaaacgacctggtagatgttattgcaccgtcatgctatagctgctttgactacacaaatggcttggcggtaaggtttccatcattttgaatttgaatagggtcccttgttttgaataggaactttctttctagtgctcatctgcacaaatagacagaagttgtacttcctagtgctcatctgcacaaatagaaatgattggatcacgtgtcgtttagaaaagatggaataatcctgaaacacactagactgaatcatctatgtgttgcatgacgtggactgtgtcgttcttattattacgcactaacatagctgaactaattctcttgacctcgagttgcctgggtgcctcttcaaccttcatgttcagaatagcatttgttgtgagatatcatctgttatcttggtatatgtcttcagtctgctctcttggagcagacaaacagctcagagtcactatgttgtttggttaaatgtctgcaggatttagtggtggggtatatgggagtaccgaaatatgctggggtctccatgacacagcatcctcagtacattacagtcaggaacgatcgtggacaggagatgctgaacctggtagctggccttctggaaagcacacctacaattagcagtggctccaggcaaccgtttgttatggagacagtgaaagctgacgatgccgcaaaactggggaaaggcccttcgaaaccagctcctagattcgtcggcgacattctggccttcctgctgaacttggttggacccaagggtctggagttcgcacgctactctctggactatcacaccattcggaattatctgcatgttaggcgggcatggggaaagcaaagagctgagcagcacatcccggggtatgccaagaagatcgtggaggcctacgacaaagacggacggatcgaggcaatggttacgcagtcaggtgactgactcacaccattcacactctactagctggtagtatttgtatactagctggtagtatttgtactgcattgtagtaaagattaaggaatgtagaagaattgtttgtgatgtgacgtagtggcgatgtatacagtagaatgtataggctgcatggcagcagctcagatctgtatgtacatcctgcgcttgccagtttctagtttgcatttgcttttctgggcatgccttttgttttaattatattgtctttgataagtccaagataaaagaagccacagagtcctcaaatgttggaaatcgccaagttaatggctgaattttgttgcgtcaatctaagcacaaccatgctacgattgatttagtgtgtatgatatgatgaggggtagctctatgttaaggtttggacgaagcagaggagagttgggcggctttggt

SEQ ID NO: 3638 - DNA, 1819 bp, Zea Mays
ctcctccatctccactcgatcctccgtcttatcaccggtgaggtactgaggtgagacgatctccgccaccatggcctccagcacctccctctccctttgcttgcacgcctcgtcgccctcgtcctcgtctcctggactccgccgaccctccctcgcctcctcctcgtcctccaggtccgagagaacgcgcaagatcagggccaaggcggtcagggaggactggaggcagaaatccaagcccatccctcctggcgccgtctaccctgccaaggaccactgcaggatcttgagcgacaagtccacgggagaggccggaaggaaggcatggatgaaatgtactttggagtctatgaccaactcttgtatgccaggaagaccgaacctgttgaaggagcccagtggacgggaatagtgacaacaatcgctgtcgagatgctgaaagcaaacatggttgatgctgtgtgatcctgacgacaggcttgctccaagacctgttttggccaggacaccagacgaagtaattgcagccaaaggtgtgaagccaacattatcaccaaatctcaatacacttgccttagtcgaggcagctggtgtaaagcggcttcttttctgcggtgtgggctgtcaagtgcaagctttgagatctgtagaaaagtaccttggtttggaaaagctttatgtgcttggaacaaactgtgttgacaatggtacgcgtgaagggcttgataaattcttgaaagcggcaagcagtgagccagaaactgttatgcattatgaatttatgcaagactataaggtgcatctaaagcatttagatgggcacattgaagaggttccttatttttgcctgccagcaaacgacctggtagatgttattgcaccgtcatgctatagctgctttgactacacaaatggcttggcggatttagtggtggggtatatgggagtaccgaaatatgctggggtctccatgacacagcatcctcagtacattacagtcaggaacgatcgtggacaggagatgctgaacctggtagctggccttctggaaagcacacctacaattagcagtggctccaggcaaccgtttgttatggagacagtgaaagctgacgatgccgcaaaactggggaaaggcccttcgaaaccagctcctagattcgtcggcgacattctggccttcctgctgaacttggttggacccaagggtctggagttcgcacgctactctctggactatcacaccattcggaattatctgcatgttaggcgggcatggggaaagcaaagagctgagcagcacatcccggggtatgccaagaagatcgtggaggcctacgacaaagacggacggatcgaggcaatggttacgcagtcaggtgactgactcacaccattcacactctactagctggtagtatttgtatactagctggtagtatttgtactgcattgtagtaaagattaaggaatgtagaagaattgtttgtgatgtgacgtagtggcgatgtatacagtagaatgtataggctgcatggcagcagctcagatctgtatgtacatcctgcgcttgccagtttctagtttgcatttgcttttctgggcatgccttttgttttaattatattgtctttgataagtccaagataaaagaagccacagagtcctcaaatgttggaaatcgccaagttaatggctgaattttgttgcgtcaatctaagcacaaccatgctacgattgatttagtgtgtatgatatgatgaggggtagctctatgttaaggtttggacgaagcagaggagagttgggcggctttggt

SEQ ID NO: 3639 - DNA, 1833 bp, Zea Mays
ctcctccatctccactcgatcctccgtcttatcaccggtgaggtactgaggtgagacgatctccgccaccatggcctccagcacctccctctccctttgcttgcacgcctcgtcgccctcgtcctcgtctcctggactccgccgaccctccctcgcctcctcctcgtcctccaggtccgagagaacgcgcaagatcagggccaaggcggtcagggaggactggaggcagaaatccaagcccatccctcctggcgccgtctaccctgccaaggaccactgcaggatcttgagcgacaagtccacgggagaggccggaaggaaggcatggatgaaatgtactttggagtctatgaccaactcttgtatgccaggaagaccgaacctgttgaaggagcccagtggacgggaatagtgacaacaatcgctgtcgagatgctgaaagcaaacatggttgatgctgtggtttgtgtacaaagtgatcctgacgacaggcttgctccaagacctgttttggccaggacaccagacgaagtaattgcagccaaaggtgtgaagccaacattatcaccaaatctcaatacacttgccttagtcgaggcagctggtgtaaagcggcttcttttctgcggtgtgggctgtcaagtgcaagctttgagatctgtagaaaagtaccttggtttggaaaagctttatgtgcttggaacaaactgtgttgacaatggtacgcgtgaagggcttgataaattcttgaaagcggcaagcagtgagccagaaactgttatgcattatgaatttatgcaagactataaggtgcatctaaagcatttagatgggcacattgaagaggttccttatttttgcctgccagcaaacgacctggtagatgttattgcaccgtcatgctatagctgctttgactacacaaatggcttggcggatttagtggtggggtatatgggagtaccgaaatatgctggggtctccatgacacagcatcctcagtacattacagtcaggaacgatcgtggacaggagatgctgaacctggtagctggccttctggaaagcacacctacaattagcagtggctccaggcaaccgtttgttatggagacagtgaaagctgacgatgccgcaaaactggggaaaggcccttcgaaaccagctcctagattcgtcggcgacattctggccttcctgctgaacttggttggacccaagggtctggagttcgcacgctactctctggactatcacaccattcggaattatctgcatgttaggcgggcatggggaaagcaaagagctgagcagcacatcccggggtatgccaagaagatcgtggaggcctacgacaaagacggacggatcgaggcaatggttacgcagtcaggtgactgactcacaccattcacactctactagctggtagtatttgtatactagctggtagtatttgtactgcattgtagtaaagattaaggaatgtagaagaattgtttgtgatgtgacgtagtggcgatgtatacagtagaatgtataggctgcatggcagcagctcagatctgtatgtacatcctgcgcttgccagtttctagtttgcatttgcttttctgggcatgccttttgttttaattatattgtctttgataagtccaagataaaagaagccacagagtcctcaaatgttggaaatcgccaagttaatggctgaattttgttgcgtcaatctaagcacaaccatgctacgattgatttagtgtgtatgatatgatgaggggtagctctatgttaaggtttggacgaagcagaggagagttgggcggctttggt

SEQ ID NO: 3640 - DNA, 2116 bp, Zea Mays
tccatctccactcgatcctccgtcttatcaccggtgaggtactgaggtgagacgatctccgccaccatggcctccagcacctccctctccctttgcttgcacgcctcgtcgccctcgtcctcgtctcctggactccgccgaccctccctcgcctcctcctcgtcctccaggtccgagagaacgcgcaagatcagggccaaggcggtcagggaggactggaggcagaaatccaagcccatccctcctggcgccgtctaccctgccaaggaccactgcaggagcccagtggacgggaatagtgacaacaatcgctgtcgagatgctgaaagcaaacatggttgatgctgtgtgatcctgacgacaggcttgctccaagacctgttttggccaggacaccagacgaagtaattgcagccaaaggtgtgaagccaacattatcaccaaatctcaatacacttgccttagtcgagctggtgtaaagcggcttcttttctgcggtgtgggctgtcaagtgcaagctttgagatctgtagaaaagtaccttggtttggaaaagctttatgtgcttggaacaaactgtgttgacaatggtacgcgtgaagggcttgataaattcttgaaagcggcaagcagtgagccagaaactgttatgcattatgaatttatgcaagactataaggtgcatctaaagcatttagatgggcacattgaagaggttccttatttttgcctgccagcaaacgacctggtagatgttattgcaccgtcatgctatagctgctttgactacacaaatggcttggcggtaaggtttccatcattttgaatttgaatagggtcccttgttttgaataggaactttctttctagtgctcatctgcacaaatagacagaagttgtacttcctagtgctcatctgcacaaatagaaatgattggatcacgtgtcgtttagaaaagatggaataatcctgaaacacactagactgaatcatctatgtgttgcatgacgtggactgtgtcgttcttattattacgcactaacatagctgaactaattctcttgacctcgagttgcctgggtgcctcttcaaccttcatgttcagaatagcatttgttgtgagatatcatctgttatcttggtatatgtcttcagtctgctctcttggagcagacaaacagctcagagtcactatgttgtttggttaaatgtctgcaggatttagtggtggggtatatgggagtaccgaaatatgctggggtctccatgacacagcatcctcagtacattacagtcaggaacgatcgtggacaggagatgctgaacctggtagctggccttctggaaagcacacctacaattagcagtggctccaggcaaccgtttgttatggagacagtgaaagctgacgatgccgcaaaactggggaaaggcccttcgaaaccagctcctagattcgtcggcgacattctggccttcctgctgaacttggttggacccaagggtctggagttcgcacgctactctctggactatcacaccattcggaattatctgcatgttaggcgggcatggggaaagcaaagagctgagcagcacatcccggggtatgccaagaagatcgtggaggcctacgacaaagacggacggatcgaggcaatggttacgcagtcaggtgactgactcacaccattcacactctactagctggtagtatttgtatactagctggtagtatttgtactgcattgtagtaaagattaaggaatgtagaagaattgtttgtgatgtgacgtagtggcgatgtatacagtagaatgtataggctgcatggcagcagctcagatctgtatgtacatcctgcgcttgccagtttctagtttgcatttgcttttctgggcatgccttttgttttaattatattgtctttgataagtccaagataaaagaagccacagagtcctcaaatgttggaaatcgccaagttaatggctgaattttgttgcgtcaatctaagcacaaccatgctacgattgatttagtgtgtatgatatgatgaggggtagctctatgttaaggtttggacgaagcagaggagagttgggcggctttggt

SEQ ID NO: 3641 - DNA, 2334 bp, Zea Mays
atctccactcgatcctccgtcttatcaccggtgaggtactgaggtgagacgatctccgccaccatggcctccagcacctccctctccctttgcttgcacgcctcgtcgccctcgtcctcgtctcctggactccgccgaccctccctcgcctcctcctcgtcctccaggtccgagagaacgcgcaagatcagggccaaggcggtcagggaggactggaggcagaaatccaagcccatccctcctggcgccgtctaccctgccaaggaccactgcaggatcttgagcgacaagtccacgggagaggccggaaggaaggcatggatgaaatgtactttggagtctatgaccaactcttgtatgccaggaagaccgaacctgttgaaggagcccagtggacgggaatagtgacaacaatcgctgtcgagatgctgaaagcaaacatggttgatgctgtggtttgtgtacaaaggcacccaaacaagaatcaaatgccacatcattctttctcagtgctatgcacaagcattaccacatggattcaaataatgttttttaccccctctgcagtgatcctgacgacaggcttgctccaagacctgttttggccaggacaccagacgaagtaattgcagccaaaggtgtgaagccaacattatcaccaaatctcaatacacttgccttagtcgagctggtgtaaagcggcttcttttctgcggtgtgggctgtcaagtgcaagctttgagatctgtagaaaagtaccttggtttggaaaagctttatgtgcttggaacaaactgtgttgacaatggtacgcgtgaagggcttgataaattcttgaaagcggcaagcagtgagccagaaactgttatgcattatgaatttatgcaagactataaggtgcatctaaagcatttagatgggcacattgaagaggttccttatttttgcctgccagcaaacgacctggtagatgttattgcaccgtcatgctatagctgctttgactacacaaatggcttggcggtaaggtttccatcattttgaatttgaatagggtcccttgttttgaataggaactttctttctagtgctcatctgcacaaatagacagaagttgtacttcctagtgctcatctgcacaaatagaaatgattggatcacgtgtcgtttagaaaagatggaataatcctgaaacacactagactgaatcatctatgtgttgcatgacgtggactgtgtcgttcttattattacgcactaacatagctgaactaattctcttgacctcgagttgcctgggtgcctcttcaaccttcatgttcagaatagcatttgttgtgagatatcatctgttatcttggtatatgtcttcagtctgctctcttggagcagacaaacagctcagagtcactatgttgtttggttaaatgtctgcaggatttagtggtggggtatatgggagtaccgaaatatgctggggtctccatgacacagcatcctcagtacattacagtcaggaacgatcgtggacaggagatgctgaacctggtagctggccttctggaaagcacacctacaattagcagtggctccaggcaaccgtttgttatggagacagtgaaagctgacgatgccgcaaaactggggaaaggcccttcgaaaccagctcctagattcgtcggcgacattctggccttcctgctgaacttggttggacccaagggtctggagttcgcacgctactctctggactatcacaccattcggaattatctgcatgttaggcgggcatggggaaagcaaagagctgagcagcacatcccggggtatgccaagaagatcgtggaggcctacgacaaagacggacggatcgaggcaatggttacgcagtcaggtgactgactcacaccattcacactctactagctggtagtatttgtatactagctggtagtatttgtactgcattgtagtaaagattaaggaatgtagaagaattgtttgtgatgtgacgtagtggcgatgtatacagtagaatgtataggctgcatggcagcagctcagatctgtatgtacatcctgcgcttgccagtttctagtttgcatttgcttttctgggcatgccttttgttttaattatattgtctttgataagtccaagataaaagaagccacagagtcctcaaatgttggaaatcgccaagttaatggctgaattttgttgcgtcaatctaagcacaaccatgctacgattgatttagtgtgtatgatatgatgaggggtagctctatgttaaggtttggacgaagcagaggagagttgggcggctttggt

SEQ ID NO: 3642 - DNA, 2048 bp, Zea Mays
atctccactcgatcctccgtcttatcaccggtgaggtactgaggtgagacgatctccgccaccatggcctccagcacctccctctccctttgcttgcacgcctcgtcgccctcgtcctcgtctcctggactccgccgaccctccctcgcctcctcctcgtcctccaggtccgagagaacgcgcaagatcagggccaaggcggtcagggaggactggaggcagaaatccaagcccatccctcctggcgccgtctaccctgccaaggaccactgcaggatcttgagcgacaagtccacgggagaggccggaaggaaggcatggatgaaatgtactttggagtctatgaccaactcttgtatgccaggaagaccgaacctgttgaaggagcccagtggacgggaatagtgacaacaatcgctgtcgagatgctgaaagcaaacatggttgatgctgtggtttgtgtacaaagtgatcctgacgacaggcttgctccaagacctgttttggccaggacaccagacgaagtaattgcagccaaaggtgtgaagccaacattatcaccaaatctcaatacacttgccttagtcgaggcagctggtgtaaagcggcttcttttctgcggtgtgggctgtcaagtgcaagctttgagatctgtagaaaagtaccttggtttggaaaagctttatgtgcttggaacaaactttgacaatggtacgcgtgaagggcttgataaattcttgaaagcggcaagcagtgagccagaaactgttatgcattatgaatttatgcaagactataaggtgcatctaaagcatttagatgggcacattgaagaggttccttatttttgcctgccagcaaacgacctggtagatgttattgcaccgtcatgctatagctgctttgactacacaaatggcttggcggatttagtggtggggtatatgggagtaccgaaatatgctggggtctccatgacacagcatcctcagtacattacagtcaggaacgatcgtggacaggagatgctgaacctggtagctggccttctggaaagcacacctacaattagcagtggctccaggcaaccgtttgttatggagacagtgaaagctgacgatgccgcaaaactgggtacctcccctaatcaccatttgtatggaatactagtacttagcattggaatagaattagtagtaacaatgacgatccgtttggcttacattcatgtaaataaacaaacgaatggatctacagggaaaggcccttcgaaaccagctcctagattcgtcggcgacattctggccttcctgctgaacttggtcagttcttggtcgtctgcagaggagggatggcatgagatttgtaacgttaactgaacacgagtacataaccaggctgtgctgtatgatatgctgtttcaggttggacccaagggtctggagttcgcacgctactctctggactatcacaccattcggaattatctgcatgttaggcgggcatggggaaagcaaagagctgagcagcacatcccggggtatgccaagaagatcgtggaggcctacgacaaagacggacggatcgaggcaatggttacgcagtcaggtgactgactcacaccattcacactctactagctggtagtatttgtatactagctggtagtatttgtactgcattgtagtaaagattaaggaatgtagaagaattgtttgtgatgtgacgtagtggcgatgtatacagtagaatgtataggctgcatggcagcagctcagatctgtatgtacatcctgcgcttgccagtttctagtttgcatttgcttttctgggcatgccttttgttttaattatattgtctttgataagtccaagataaaagaagccacagagtcctcaaatgttggaaatcgccaagttaatggctgaattttgttgcgtcaatctaagcacaaccatgctacgattgatttagtgtgtatgatatgatgaggggtagctctatgttaaggtttggacgaagcagaggagagttgggcggctttggt

SEQ ID NO: 3643 - DNA, 2326 bp, Zea Mays
atctccactcgatcctccgtcttatcaccggtgaggtactgaggtgagacgatctccgccaccatggcctccagcacctccctctccctttgcttgcacgcctcgtcgccctcgtcctcgtctcctggactccgccgaccctccctcgcctcctcctcgtcctccaggtccgagagaacgcgcaagatcagggccaaggcggtcagggaggactggaggcagaaatccaagcccatccctcctggcgccgtctaccctgccaaggaccactgcaggatcttgagcgacaagtccacgggagaggccggaaggaaggcatggatgaaatgtactttggagtctatgaccaactcttgtatgccaggaagaccgaacctgttgaaggagcccagtggacgggaatagtgacaacaatcgctgtcgagatgctgaaagcaaacatggttgatgctgtgtgatcctgacgacaggcttgctccaagacctgttttggccaggacaccagacgaagtaattgcagccaaaggtgtgaagccaacattatcaccaaatctcaatacacttgccttagtcgaggcagctggtgtaaagcggcttcttttctgcggtgtgggctgtcaagtgcaagctttgagatctgtagaaaagtaccttggtttggaaaagctttatgtgcttggaacaaactgtgttgacaatggtacgcgtgaagggcttgataaattcttgaaagcggcaagcagtgagccagaaactgttatgcattatgaatttatgcaagactataaggtgcatctaaagcatttagatgggcacattgaagaggttccttatttttgcctgccagcaaacgacctggtagatgttattgcaccgtcatgctatagctgctttgactacacaaatggcttggcggtaaggtttccatcattttgaatttgaatagggtcccttgttttgaataggaactttctttctagtgctcatctgcacaaatagacagaagttgtacttcctagtgctcatctgcacaaatagaaatgattggatcacgtgtcgtttagaaaagatggaataatcctgaaacacactagactgaatcatctatgtgttgcatgacgtggactgtgtcgttcttattattacgcactaacatagctgaactaattctcttgacctcgagttgcctgggtgcctcttcaaccttcatgttcagaatagcatttgttgtgagatatcatctgttatcttggtatatgtcttcagtctgctctcttggagcagacaaacagctcagagtcactatgttgtttggttaaatgtctgcaggatttagtggtggggtatatgggagtaccgaaatatgctggggtctccatgacacagcatcctcagtacattacagtcaggaacgatcgtggacaggagatgctgaacctggtagctggccttctggaaagcacacctacaattagcaggctccaggcaaccgtttgttatggagacagtgaaagctgacgatgccgcaaaactggggaaaggcccttcgaaaccagctcctagattcgtcggcgacattctggccttcctgctgaacttggtcagttcttggtcgtctgcagaggagggatggcatgagatttgtaacgttaactgaacacgagtacataaccaggctgtgctgtatgatatgctgtttcaggttggacccaagggtctggagttcgcacgctactctctggactatcacaccattcggaattatctgcatgttaggcgggcatggggaaagcaaagagctgagcagcacatcccggggtatgccaagaagatcgtggaggcctacgacaaagacggacggatcgaggcaatggttacgcagtcaggtgactgactcacaccattcacactctactagctggtagtatttgtatactagctggtagtatttgtactgcattgtagtaaagattaaggaatgtagaagaattgtttgtgatgtgacgtagtggcgatgtatacagtagaatgtataggctgcatggcagcagctcagatctgtatgtacatcctgcgcttgccagtttctagtttgcatttgcttttctgggcatgccttttgttttaattatattgtctttgataagtccaagataaaagaagccacagagtcctcaaatgttggaaatcgccaagttaatggctgaattttgttgcgtcaatctaagcacaaccatgctacgattgatttagtgtgtatgatatgatgaggggtagctctatgttaaggtttggacgaagcagaggagagttgggcggctttggt

SEQ ID NO: 3644 - DNA, 2389 bp, Zea Mays
atctccactcgatcctccgtcttatcaccggtgaggtactgaggtgagacgatctccgccaccatggcctccagcacctccctctccctttgcttgcacgcctcgtcgccctcgtcctcgtctcctggactccgccgaccctccctcgcctcctcctcgtcctccaggtccgagagaacgcgcaagatcagggccaaggcggtcagggaggactggaggcagaaatccaagcccatccctcctggcgccgtctaccctgccaaggaccactgcagccgttgtgggctctgcgacacatactacgttgcgcatgtcaagactgcctgtgccttcctgggagacggcatgtcccgtgtcgaggatcttgagcgacaagtccacgggagaggccggaaggaaggcatggatgaaatgtactttggagtctatgaccaactcttgtatgccaggaagaccgaacctgttgaaggagcccagtggacgggaatagtgacaacaatcgctgtcgagatgctgaaagcaaacatggttgatgctgtgtgatcctgacgacaggcttgctccaagacctgttttggccaggacaccagacgaagtaattgcagccaaaggtgtgaagccaacattatcaccaaatctcaatacacttgccttagtcgaggcagctggtgtaaagcggcttcttttctgcggtgtgggctgtcaagtgcaagctttgagatctgtagaaaagtaccttggtttggaaaagctttatgtgcttggaacaaactttgacaatggtacgcgtgaagggcttgataaattcttgaaagcggcaagcagtgagccagaaactgttatgcattatgaatttatgcaagactataaggtgcatctaaagcatttagatgggcacattgaagaggtaaatatttgtttgccaataattctgaggctttatggattctacaatggaactatttaagtcagggcctaatttttgcaggttccttatttttgcctgccagcaaacgacctggtagatgttattgcaccgtcatgctatagctgctttgactacacaaatggcttggcggtaaggtttccatcattttgaatttgaatagggtcccttgttttgaataggaactttctttctagtgctcatctgcacaaatagacagaagttgtacttcctagtgctcatctgcacaaatagaaatgattggatcacgtgtcgtttagaaaagatggaataatcctgaaacacactagactgaatcatctatgtgttgcatgacgtggactgtgtcgttcttattattacgcactaacatagctgaactaattctcttgacctcgagttgcctgggtgcctcttcaaccttcatgttcagaatagcatttgttgtgagatatcatctgttatcttggtatatgtcttcagtctgctctcttggagcagacaaacagctcagagtcactatgttgtttggttaaatgtctgcaggatttagtggtggggtatatgggagtaccgaaatatgctggggtctccatgacacagcatcctcagtacattacagtcaggaacgatcgtggacaggagatgctgaacctggtagctggccttctggaaagcacacctacaattagcagtggctccaggcaaccgtttgttatggagacagtgaaagctgacgatgccgcaaaactggggaaaggcccttcgaaaccagctcctagattcgtcggcgacattctggccttcctgctgaacttggttggacccaagggtctggagttcgcacgctactctctggactatcacaccattcggaattatctgcatgttaggcgggcatggggaaagcaaagagctgagcagcacatcccggggtatgccaagaagatcgtggaggcctacgacaaagacggacggatcgaggcaatggttacgcagtcaggtgactgactcacaccattcacactctactagctggtagtatttgtatactagctggtagtatttgtactgcattgtagtaaagattaaggaatgtagaagaattgtttgtgatgtgacgtagtggcgatgtatacagtagaatgtataggctgcatggcagcagctcagatctgtatgtacatcctgcgcttgccagtttctagtttgcatttgcttttctgggcatgccttttgttttaattatattgtctttgataagtccaagataaaagaagccacagagtcctcaaatgttggaaatcgccaagttaatggctgaattttgttgcgtcaatctaagcacaaccatgctacgattgatttagtgtgtatgatatgatgaggggtagctctatgttaaggtttggacgaagcagaggagagttgggcggctttggt

SEQ ID NO: 3645 - DNA, 1699 bp, Zea Mays
atctccactcgatcctccgtcttatcaccggtgaggtactgaggtgagacgatctccgccaccatggcctccagcacctccctctccctttgcttgcacgcctcgtcgccctcgtcctcgtctcctggactccgccgaccctccctcgcctcctcctcgtcctccaggtccgagagaacgcgcaagatcagggccaaggcggtcagggaggactggaggcagaaatccaagcccatccctcctggcgccgtctaccctgccaaggaccactgcaggagcccagtggacgggaatagtgacaacaatcgctgtcgagatgctgaaagcaaacatggttgatgctgtgtgatcctgacgacaggcttgctccaagacctgttttggccaggacaccagacgaagtaattgcagccaaaggtgtgaagccaacattatcaccaaatctcaatacacttgccttagtcgagctggtgtaaagcggcttcttttctgcggtgtgggctgtcaagtgcaagctttgagatctgtagaaaagtaccttggtttggaaaagctttatgtgcttggaacaaactgtgttgacaatggtacgcgtgaagggcttgataaattcttgaaagcggcaagcagtgagccagaaactgttatgcattatgaatttatgcaagactataaggtgcatctaaagcatttagatgggcacattgaagaggttccttatttttgcctgccagcaaacgacctggtagatgttattgcaccgtcatgctatagctgctttgactacacaaatggcttggcggatttagtggtggggtatatgggagtaccgaaatatgctggggtctccatgacacagcatcctcagtacattacagtcaggaacgatcgtggacaggagatgctgaacctggtagctggccttctggaaagcacacctacaattagcagtggctccaggcaaccgtttgttatggagacagtgaaagctgacgatgccgcaaaactggggaaaggcccttcgaaaccagctcctagattcgtcggcgacattctggccttcctgctgaacttggttggacccaagggtctggagttcgcacgctactctctggactatcacaccattcggaattatctgcatgttaggcgggcatggggaaagcaaagagctgagcagcacatcccggggtatgccaagaagatcgtggaggcctacgacaaagacggacggatcgaggcaatggttacgcagtcaggtgactgactcacaccattcacactctactagctggtagtatttgtatactagctggtagtatttgtactgcattgtagtaaagattaaggaatgtagaagaattgtttgtgatgtgacgtagtggcgatgtatacagtagaatgtataggctgcatggcagcagctcagatctgtatgtacatcctgcgcttgccagtttctagtttgcatttgcttttctgggcatgccttttgttttaattatattgtctttgataagtccaagataaaagaagccacagagtcctcaaatgttggaaatcgccaagttaatggctgaattttgttgcgtcaatctaagcacaaccatgctacgattgatttagtgtgtatgatatgatgaggggtagctctatgttaaggtttggacgaagcagaggagagttgggcggctttggt

SEQ ID NO: 3646 - DNA, 2232 bp, Zea Mays
atctccactcgatcctccgtcttatcaccggtgaggtactgaggtgagacgatctccgccaccatggcctccagcacctccctctccctttgcttgcacgcctcgtcgccctcgtcctcgtctcctggactccgccgaccctccctcgcctcctcctcgtcctccaggtccgagagaacgcgcaagatcagggccaaggcggtcagggaggactggaggcagaaatccaagcccatccctcctggcgccgtctaccctgccaaggaccactgcaggatcttgagcgacaagtccacgggagaggccggaaggaaggcatggatgaaatgtactttggagtctatgaccaactcttgtatgccaggaagaccgaacctgttgaaggagcccagtggacgggaatagtgacaacaatcgctgtcgagatgctgaaagcaaacatggttgatgctgtggtttgtgtacaaagtgatcctgacgacaggcttgctccaagacctgttttggccagacgaagtaattgcagccaaaggtgtgaagccaacattatcaccaaatctcaatacacttgccttagtcgaggcagctggtgtaaagcggcttcttttctgcggtgtgggctgtcaagtgcaagctttgagatctgtagaaaagtaccttggtttggaaaagctttatgtgcttggaacaaactgtgttgacaatggtacgcgtgaagggcttgataaattcttgaaagcggcaagcagtgagccagaaactgttatgcattatgaatttatgcaagactataaggtgcatctaaagcatttagatgggcacattgaagaggttccttatttttgcctgccagcaaacgacctggtagatgttattgcaccgtcatgctatagctgctttgactacacaaatggcttggcggtaaggtttccatcattttgaatttgaatagggtcccttgttttgaataggaactttctttctagtgctcatctgcacaaatagacagaagttgtacttcctagtgctcatctgcacaaatagaaatgattggatcacgtgtcgtttagaaaagatggaataatcctgaaacacactagactgaatcatctatgtgttgcatgacgtggactgtgtcgttcttattattacgcactaacatagctgaactaattctcttgacctcgagttgcctgggtgcctcttcaaccttcatgttcagaatagcatttgttgtgagatatcatctgttatcttggtatatgtcttcagtctgctctcttggagcagacaaacagctcagagtcactatgttgtttggttaaatgtctgcaggatttagtggtggggtatatgggagtaccgaaatatgctggggtctccatgacacagcatcctcagtacattacagtcaggaacgatcgtggacaggagatgctgaacctggtagctggccttctggaaagcacacctacaattagcagtggctccaggcaaccgtttgttatggagacagtgaaagctgacgatgccgcaaaactggggaaaggcccttcgaaaccagctcctagattcgtcggcgacattctggccttcctgctgaacttggttggacccaagggtctggagttcgcacgctactctctggactatcacaccattcggaattatctgcatgttaggcgggcatggggaaagcaaagagctgagcagcacatcccggggtatgccaagaagatcgtggaggcctacgacaaagacggacggatcgaggcaatggttacgcagtcaggtgactgactcacaccattcacactctactagctggtagtatttgtatactagctggtagtatttgtactgcattgtagtaaagattaaggaatgtagaagaattgtttgtgatgtgacgtagtggcgatgtatacagtagaatgtataggctgcatggcagcagctcagatctgtatgtacatcctgcgcttgccagtttctagtttgcatttgcttttctgggcatgccttttgttttaattatattgtctttgataagtccaagataaaagaagccacagagtcctcaaatgttggaaatcgccaagttaatggctgaattttgttgcgtcaatctaagcacaaccatgctacgattgatttagtgtgtatgatatgatgaggggtagctctatgttaaggtttggacgaagcagaggagagttgggcggctttggt

SEQ ID NO: 3647 - DNA, 2439 bp, Zea Mays
atctccactcgatcctccgtcttatcaccggtgaggtactgaggtgagacgatctccgccaccatggcctccagcacctccctctccctttgcttgcacgcctcgtcgccctcgtcctcgtctcctggactccgccgaccctccctcgcctcctcctcgtcctccaggtccgagagaacgcgcaagatcagggccaaggcggtcagggaggactggaggcagaaatccaagcccatccctcctggcgccgtctaccctgccaaggaccactgcagccgttgtgggctctgcgacacatactacgttgcgcatgtcaagactgcctgtgccttcctgggagacggcatgtcccgtgtcgaggatcttgagcgacaagtccacgggagaggccggaaggaaggcatggatgaaatgtactttggagtctatgaccaactcttgtatgccaggaagaccgaacctgttgaaggagcccagtggacgggaatagtgacaacaatcgctgtcgagatgctgaaagcaaacatggttgatgctgtggtttgtgtacaaagtgatcctgacgacaggcttgctccaagacctgttttggccagccatgctcttgtaggacaccagacgaagtaattgcagccaaaggtgtgaagccaacattatcaccaaatctcaatacacttgccttagtcgaggcagctggtgtaaagcggcttcttttctgcggtgtgggctgtcaagtgcaagctttgagatctgtagaaaagtaccttggtttggaaaagctttatgtgcttggaacaaactgtgttgacaatggtacgcgtgaagggcttgataaattcttgaaagcggcaagcagtgagccagaaactgttatgcattatgaatttatgcaagactataaggtgcatctaaagcatttagatgggcacattgaagaggttccttatttttgcctgccagcaaacgacctggtagatgttattgcaccgtcatgctatagctgctttgactacacaaatggcttggcggtaaggtttccatcattttgaatttgaatagggtcccttgttttgaataggaactttctttctagtgctcatctgcacaaatagacagaagttgtacttcctagtgctcatctgcacaaatagaaatgattggatcacgtgtcgtttagaaaagatggaataatcctgaaacacactagactgaatcatctatgtgttgcatgacgtggactgtgtcgttcttattattacgcactaacatagctgaactaattctcttgacctcgagttgcctgggtgcctcttcaaccttcatgttcagaatagcatttgttgtgagatatcatctgttatcttggtatatgtcttcagtctgctctcttggagcagacaaacagctcagagtcactatgttgtttggttaaatgtctgcaggatttagtggtggggtatatgggagtaccgaaatatgctggggtctccatgacacagcatcctcagtacattacagtcaggaacgatcgtggacaggagatgctgaacctggtagctggccttctggaaagcacacctacaattagcaggctccaggcaaccgtttgttatggagacagtgaaagctgacgatgccgcaaaactggggaaaggcccttcgaaaccagctcctagattcgtcggcgacattctggccttcctgctgaacttggtcagttcttggtcgtctgcagaggagggatggcatgagatttgtaacgttaactgaacacgagtacataaccaggctgtgctgtatgatatgctgtttcaggttggacccaagggtctggagttcgcacgctactctctggactatcacaccattcggaattatctgcatgttaggcgggcatggggaaagcaaagagctgagcagcacatcccggggtatgccaagaagatcgtggaggcctacgacaaagacggacggatcgaggcaatggttacgcagtcaggtgactgactcacaccattcacactctactagctggtagtatttgtatactagctggtagtatttgtactgcattgtagtaaagattaaggaatgtagaagaattgtttgtgatgtgacgtagtggcgatgtatacagtagaatgtataggctgcatggcagcagctcagatctgtatgtacatcctgcgcttgccagtttctagtttgcatttgcttttctgggcatgccttttgttttaattatattgtctttgataagtccaagataaaagaagccacagagtcctcaaatgttggaaatcgccaagttaatggctgaattttgttgcgtcaatctaagcacaaccatgctacgattgatttagtgtgtatgatatgatgaggggtagctctatgttaaggtttggacgaagcagaggagagttgggcggctttggt

SEQ ID NO: 3648 - DNA, 2033 bp, Zea Mays
atctccactcgatcctccgtcttatcaccggtgaggtactgaggtgagacgatctccgccaccatggcctccagcacctccctctccctttgcttgcacgcctcgtcgccctcgtcctcgtctcctggactccgccgaccctccctcgcctcctcctcgtcctccaggtccgagagaacgcgcaagatcagggccaaggcggtcagggaggactggaggcagaaatccaagcccatccctcctggcgccgtctaccctgccaaggaccactgcagccgttgtgggctctgcgacacatactacgttgcgcatgtcaagactgcctgtgccttcctgggagacggcatgtcccgtgtcgagatgccaacactctcctcactatatttaggatcttgagcgacaagtccacgggagaggccggaaggaaggcatggatgaaatgtactttggagtctatgaccaactcttgtatgccaggaagaccgaacctgttgaaggagcccagtggacgggaatagtgacaacaatcgctgtcgagatgctgaaagcaaacatggttgatgctgtggtttgtgtacaaaggcacccaaacaagaatcaaatgccacatcattctttctcagtgctatgcacaagcattaccacatggattcaaataatgttttttaccccctctgcagtgatcctgacgacaggcttgctccaagacctgttttggccaggacaccagacgaagtaattgcagccaaaggtgtgaagccaacattatcaccaaatctcaatacacttgccttagtcgagctggtgtaaagcggcttcttttctgcggtgtgggctgtcaagtgcaagctttgagatctgtagaaaagtaccttggtttggaaaagctttatgtgcttggaacaaactgtgttgacaatggtacgcgtgaagggcttgataaattcttgaaagcggcaagcagtgagccagaaactgttatgcattatgaatttatgcaagactataaggtgcatctaaagcatttagatgggcacattgaagaggttccttatttttgcctgccagcaaacgacctggtagatgttattgcaccgtcatgctatagctgctttgactacacaaatggcttggcggatttagtggtggggtatatgggagtaccgaaatatgctggggtctccatgacacagcatcctcagtacattacagtcaggaacgatcgtggacaggagatgctgaacctggtagctggccttctggaaagcacacctacaattagcagtggctccaggcaaccgtttgttatggagacagtgaaagctgacgatgccgcaaaactggggaaaggcccttcgaaaccagctcctagattcgtcggcgacattctggccttcctgctgaacttggttggacccaagggtctggagttcgcacgctactctctggactatcacaccattcggaattatctgcatgttaggcgggcatggggaaagcaaagagctgagcagcacatcccggggtatgccaagaagatcgtggaggcctacgacaaagacggacggatcgaggcaatggttacgcagtcaggtgactgactcacaccattcacactctactagctggtagtatttgtatactagctggtagtatttgtactgcattgtagtaaagattaaggaatgtagaagaattgtttgtgatgtgacgtagtggcgatgtatacagtagaatgtataggctgcatggcagcagctcagatctgtatgtacatcctgcgcttgccagtttctagtttgcatttgcttttctgggcatgccttttgttttaattatattgtctttgataagtccaagataaaagaagccacagagtcctcaaatgttggaaatcgccaagttaatggctgaattttgttgcgtcaatctaagcacaaccatgctacgattgatttagtgtgtatgatatgatgaggggtagctctatgttaaggtttggacgaagcagaggagagttgggcggctttggt

SEQ ID NO: 3649 - DNA, 1527 bp, Zea Mays
cattccgcacaccaccgaaaactggtgcccggcctgcagtgcagtgcaagccatgccagctgcctatatataccaggccagggagcgggagcctcacacacagtcacagcacacgcagccaccgaggactgcattgctagcatccatcgccatcagtcgccatatcgatctgcgcacgaagctagtagtccagatggatcgggtgccgccgccggtctccatgcaggtggctgcgatgcagcgacatcagcagcagcagcagttcgtccaccacctgcagcaggtccaccagcaaggtacgcagcacgagcaaccgccgccaccgcaccagaacggcagcagcagcagcggcaggaccggcggcggccgcaagtgctgcccgctgcggcggtcgcgcaaggggtgcatgaagggcaagggcgggccggacaaccagcagtgccccttccgcggcgtccggcagcgcacctggggcaagtgggtggccgagatccgcgagcccaaccgcggcgcgcgcctctggctcggcaccttcggcagcgcgctcgaggccgcgcgcgcctacgacgccgcggccaggacgctctacggcgactgcgctcgcctaaacctgcagctagtgcctccgtcggcggctgcggcagccgccggaggaggaggaccggcggtcgtcgcgtctccgtcccctgacaccgtggctggccctgctgctgctgctggtggtggtggacacaactgccatcaccagtacctgcagcagcagcacgccatggcggcgcctatgatgatgatgcactcctcctgctgctccgccgacgggtcgtcgtcaaactccgattccatttccaactcctgctcgtcaccggtgaccacggcggcctcgccagcctacagccaccaccagacgatgttccagacacctgcactgcagccgtcatgcggcgcaatgacgatggcggccgctgcgccgcatgtgcagggcttccacgtcggcgacgacgacactaccaccgcgatggcgatgcaccgtcatcagcagatgatgcgcgagctggcggaggcgcctctgcaccaggaggcagacgacttcgaggacttcgtgacgcggctgcccaaggcggaggacttcggcctgcagggcttccaggaggtggcccccgaggtgttcgacgacgccgccggcatctgggaccacgcggccgcctgggagccccccaccatgatgatcgactctggcgcccagccccagcagcagctcgtcgtccctctttgactcgctcgtcgatgacgccgcgcgccctgcaccagctactgcttcgttcccagctgcatcgaactggccggtgtacgtggcggagtgatacgacgcgcgcgctatgcatgacaccactgcacaggtggttcttgcatgtgttgcttacgcctcgagacgttttgtaaacaaaatatatgcttcagtggtgtccttttgggtttgtactatatgtgtggtacatggaccgtcgcagctagctttgtatattttac

SEQ ID NO: 3650 - DNA, 2032 bp, Zea Mays
ctaaaatatcatggctgtatcataactgttgttagggttgtacatgttccgctggttattgatccgcgatttgctggctcattcagcagcatcctgattcgttaggcgtgccgcgtgagccttgctcgctccaatcgatttcgtcgtcgtccgctcgtcgctagctccttcttggtcgctccttcgcccctgctacaatcgatttcgtcgtcttcagcgaggagctggggagtgattgaacgaagccagcgctccctccattgtcgccccgcagatcgatcgaagtcagcaaccagatcagaaagagcaaaagaggcgcccgagtctctacggcggaaagccatggacggcgccgccaactggcgtcccacgcagggagccgaccctgccaccgtcgctgctgtcggcggcgtcgaccctaacgcggctgcccccaccggaagcgactggcgcacccagcttcagcccgaggcgcgccagaggatcgtcaataagataatggagactctgaagaagcacctgccagtatcagtaccggaggggctgactgagcttcacaaaattgccgtgcgatttgaagagaaaatctatactgccgccaccagccagtctgattatctgaggaagatttctctgaaaatgctgtccatggaaagccagaaaaagacacaacagaaccctggaaatgctcaagtgattccaaatcaaaaccctcctggtccagtaatccagcacagtcatcagctatcccgttgatgtctcagcaacagacacggcagccaaatgcttctacatccgttcaaggttctcttcctagtgttggtcagaacttgtcgagtgtcagccagacattgacgctgcagaatctgtctggcatgccacaaaataccatgaacaatggtttagcacaaggtactccacaagatatgtatgctgcacaaagacaaatggcaggtaggcagcagcagcaacaacaacagcaagcacataatcagtttatgtatcaacagcagaaattgttgatgaaccagaaattgcagcagaattcacgtatgcaaccacacattcagcagcagcaaactttgttgcagtcaacacagatgcaatcttcacagcagcccatggtgcaaatgtcatctggccttcagcctgggcagattgccattccacaaactcaatccatggcgatgcagtcagctacacagagtggtattcaacagaatgcactgaattcggtacaacaacctgtgcaatcgttactccagcagcctacaccgtctgtggtaaggcagcagcaacatccacagtccatgcaccagcagtcttctctgcagcaaactcaaccaactcaacagcccaacattcctttgcaacagcagccacaacaattaatgggccatcagtcaaatttacagcaaaatcagttagtgaatcaacagagtggtgctgtggagatgcaacagcaacaaaggctaccagttcagtcaactaatcttttgaatatgcatcaaacgcagcagatgatgaaccagcaatctatgcccttgcaccagccacaacaattggcaaaccagggaaatgtgtcaagtctaaatcagcagcagcagcagcttcttggaaccgtgccaaatgtccgtatgcatatgttacagcaacaaaagccaattcagcaaccacagcagcaacagcatgctcagcagacatcaatgggtttgatgcaacctcagtctcagcagaatcagcttcagcaacctcaacaacatatgatgtcgcagttccagtctcagcctaatcaaacgcagcaacaattgggaatgcaacaaaggctccagacttcagctggcatgctcttgcaacaaaataatattgatcaacaaaagcagtacgttcaggcacagaaggtcctccaagaagcacccagtaactatttaattacgctgattaagcctgccatatatgctgatcatgcctgccatatgtgtcttggtgtttatggtagttgatcatagattaggcaaggatctccattgat

SEQ ID NO: 3651 - DNA, 4469 bp, Zea Mays
ctaaaatatcatggctgtatcataactgttgttagggttgtacatgttccgctggttattgatccgcgatttgctggctcattcagcagcatcctgattcgttaggcgtgccgcgtgagccttgctcgctccaatcgatttcgtcgtcgtccgctcgtcgctagctccttcttggtcgctccttcgcccctgctacaatcgatttcgtcgtcttcagcgaggagctggggagtgattgaacgaagccagcgctccctccattgtcgccccgcagatcgatcgaagtcagcaaccagatcagaaagagcaaaagaggcgcccgagtctctacggcggaaagccatggacggcgccgccaactggcgtcccacgcagggagccgaccctgccaccgtcgctgctgtcggcggcgtcgaccctaacgcggctgcccccaccggaagcgactggcgcacccagcttcagcccgaggcgcgccagaggatcgtcaataagataatggagactctgaagaagcacctgccagtatcagtaccggaggggctgactgagcttcacaaaattgccgtgcgatttgaagagaaaatctatactgccgccaccagccagtctgattatctgaggaagatttctctgaaaatgctgtccatggaaagccagaaaaagacacaacagaaccctggaaatgctcaagtgattccaaatcaaaaccctcctggtccaggtagtaatccagcacagtcatcagctatcccgttgatgtctcagcaacagacacggcagccaaatgcttctacatccgttcaaggttctcttcctagtgttggtcagaacttgtcgagtgtcagccagacattgacgctgcagaatctgtctggcatgccacaaaataccatgaacaatggtttagcacaaggtaggcagcagcagcaacaacaacagcaagcacataatcagtttatgtatcaacagcagaaattgttgatgaaccagaaattgcagcagaattcacgtatgcaaccacacattcagcagcagcaaactttgttgcagtcaacacagatgcaatcttcacagcagcccatggtgcaaatgtcatctggccttcagcctgggcagattgccattccacaaactcaatccatggcgatgcagtcagctacacagagtggtattcaacagaatgcactgaattcggtacaacaacctgtgcaatcgttactccagcagcctacaccgtctgtggtaaggcagcagcaacatccacagtccatgcaccagcagtcttctctgcagcaaactcaaccaactcaacagcccaacattcctttgcaacagcagccacaacaattaatgggccatcagtcaaatttacagcaaaatcagttagtgaatcaacagagtggtgctgtggagatgcaacagcaacaaaggctaccagttcagtcaactaatcttttgaatatgcatcaaacgcagcagatgatgaaccagcaatctatgcccttgcaccagccacaacaattggcaaaccagggaaatgtgtcaagtctaaatcagcagcagcagcagcttcttggaaccgtgccaaatgtccgtatgcatatgttacagcaacaaaagccaattcagcaaccacagcagcaacagcatgctcagcagacatcaatgggtttgatgcaacctcagtctcagcagaatcagcttcagcaacctcaacaacatatgatgtcgcagttccagtctcagcctaatcaaacgcagcaacaattgggaatgcaacaaaggctccagacttcagctggcatgctcttgcaacaaaataatattgatcaacaaaagcagtacgttcaggcacagaaggtcctccaagaagcacccagtacatctgtggattccactgctcaaactggtcatccagggacaggtgattcgcaagaggagttatatcaaatgattaagagtttaaaggaccaatactttgcggaattgaatgatgtgtacaataagatatccatgaagatacaaaatattgacaaccacatgcccgctcaaaagtcagcggagcagtatgaaaggctgaaaggctttaaaggaatgttggagcgcatattgcatttcctgcaagctaacaagagcagcattcagccaggttttagggaaaaaatctctattttcgagaggcaaattctcagtatcatgagttcacaaagaaggaagcctgtgcaggcacctggacagcaaacgtttcagcaatctggtgggcaagctcctagctctaatatgtcacagcagcatcagacttcccaaggtttgcagcagcatgatagtcatactaatcagatgcctcaagcaagtttaccaagtatgaacacaggagtaccgacctctggagcacctggcattcagcatgtacctgcgcctcaagcatcaaactttggtgttccaacaacacagcaaaatgtcacaaatgcaccgcaggctgcctctaatccggagaatgctcagggaaataattttaatcctgtgcagcatggttcaatgggtactgcattgcaacagggaagcactggtcccatgcagggtgcattgaatgcacagcatcagtccaatagtaacatgatatccaacaatgcaatgagtacaatgcagactaataccaatgccatgcaagcaaacgtgaattcattgcagcagctaaagcaacatcaggagcatcagatgatgcaaaatcagcaaatgaagcagcgtcagcagatgctgcagcagatgcagcaaaagaaaatacttcaacaacagctcccaatacaacaactacagaaacaacagcagcaagggccgattcaggttcaacaacttcattctggaaatgatgtgaatgagctaaaggtcaggcaaggagctgcaatcaaatctggaatgtatcaaccgctgaaccagcgtaactattatcagcagataaaacggggggatgtctttccaatttcttctccgcaaaacctccaagcatcgtccccacaaatttcacactattctcatgttgatcagcacagtctgttgcaatctcaagtgaaaaccgggacaccgttgcattcagctaactcaccatttgtcccatctccatctcctcctgttgccccatcaccggtcccactggattcagataaaccactctccaacctatcttcactcactagtgctgggcaggctggacatcagcaaacatcccttgcacctctaacacaatctatagctgttaacacaccaggtatatcagcgtcacccttgcttgcagaattcacaagtgctgatggaggtcaggttagcgtaccaactcaagttccaacaaaatcaagcgcagcagaaaggcctctcgatcgcttgcttaaagcattgagaacaacacagcctgagtcccttagtgctgcagttagcgatattggatctgtcgtgagtatgattgacaggattgctggatcagcgcctggtaatggttccagagctgctgtgggtgaagatcttgtcgctatgacaaagtgccgcttgcaagccaggaacttcataacccatgatgggagtggtgcatcaaagagaatgaagcgggacacaggtgctatgcctcttaatgtgtcatccgctggaagtttgaatgacagcttgaagcaatcatatactgttggcactccagagctacaatcaactgcaacctcacgtgtcaagtgtcaaagggctgaggtaaaccatgttctgttagaggagattcaggagataaacaaacagcttatagatacagagctccatgtctctgaggatgatgctgagtccttcactacatctgatatggccgaagggacagtcattaaatgcacattcactgctgttgctgttagccccagcttgaaatccatgtttgcttcagcgcagatgagtccaattttgccgttgaggttgcttgttcctggtagctacccaaaatgctccccggtgcttctagacaagtttcctgatgaacaatgcaggaactcggatgacctgtctacgaaggccaagtcaaagttcagtgtgttgctccggggtctagctgagcccatgtcattgcgagaaatcgcaaggacgtgggatgcttgcgcccggaaagtgattgcagagtatgcccagcaaactggaggaggcagtttcagctcgagctatggttgctgggaaagctgcgttggcgcttcataagtttattgtatctattactccgtagtatatttattattctttattacactaagcatttatgtgttgagcaaaagaaaataacagtttatcttccttttggtatcgagtcactgttagcttgataaataagatcgtgtacagtacagtgtatggagcaagcttgggtgcttcagcccggttaatatttactatcttgtatgctttgcctctacttacataacttgcgcggttaccttgtttttttg

SEQ ID NO: 3652 - DNA, 4466 bp, Zea Mays
ctaaaatatcatggctgtatcataactgttgttagggttgtacatgttccgctggttattgatccgcgatttgctggctcattcagcagcatcctgattcgttaggcgtgccgcgtgagccttgctcgctccaatcgatttcgtcgtcgtccgctcgtcgctagctccttcttggtcgctccttcgcccctgctacaatcgatttcgtcgtcttcagcgaggagctggggagtgattgaacgaagccagcgctccctccattgtcgccccgcagatcgatcgaagtcagcaaccagatcagaaagagcaaaagaggcgcccgagtctctacggcggaaagccatggacggcgccgccaactggcgtcccacgcagggagccgaccctgccaccgtcgctgctgtcggcggcgtcgaccctaacgcggctgcccccaccggaagcgactggcgcacccagcttcagcccgaggcgcgccagaggatcgtcaataagataatggagactctgaagaagcacctgccagtatcagtaccggaggggctgactgagcttcacaaaattgccgtgcgatttgaagagaaaatctatactgccgccaccagccagtctgattatctgaggaagatttctctgaaaatgctgtccatggaaagccagaaaaagacacaacagaaccctggaaatgctcaagtgattccaaatcaaaaccctcctggtccaggtagtaatccagcacagtcatcagctatcccgttgatgtctcagcaacagacacggcagccaaatgcttctacatccgttcaaggttctcttcctagtgttggtcagaacttgtcgagtgtcagccagacattgacgctgcagaatctgtctggcatgccacaaaataccatgaacaatggtttagcacaaggtaggcagcagcagcaacaacaacagcaagcacataatcagtttatgtatcaacagcagaaattgttgatgaaccagaaattgcagcagaattcacgtatgcaaccacacattcagcagcagcaaactttgttgcagtcaacacagatgcaatcttcacagcagcccatggtgcaaatgtcatctggccttcagcctgggcagattgccattccacaaactcaatccatggcgatgcagtcagctacacagagtggtattcaacagaatgcactgaattcggtacaacaacctgtgcaatcgttactccagcagcctacaccgtctgtggtaaggcagcagcaacatccacagtccatgcaccagcagtcttctctgcagcaaactcaaccaactcaacagcccaacattcctttgcaacagcagccacaacaattaatgggccatcagtcaaatttacagcaaaatcagttagtgaatcaacagagtggtgctgtggagatgcaacagcaacaaaggctaccagttcagtcaactaatcttttgaatatgcatcaaacgcagcagatgatgaaccagcaatctatgcccttgcaccagccacaacaattggcaaaccagggaaatgtgtcaagtctaaatcagcagcagcagcagcttcttggaaccgtgccaaatgtccgtatgcatatgttacagcaacaaaagccaattcagcaaccacagcagcaacagcatgctcagcagacatcaatgggtttgatgcaacctcagtctcagcagaatcagcttcagcaacctcaacaacatatgatgtcgcagttccagtctcagcctaatcaaacgcagcaacaattgggaatgcaacaaaggctccagacttcagctggcatgctcttgcaacaaaataatattgatcaacaaaagcagtacgttcaggcacagaaggtcctccaagaagcacccagtacatctgtggattccactgctcaaactggtcatccagggacaggtgattcgcaagaggagttatatcaaatgattaagagtttaaaggaccaatactttgcggaattgaatgatgtgtacaataagatatccatgaagatacaaaatattgacaaccacatgcccgctcaaaagtcagcggagcagtatgaaaggctgaaaggctttaaaggaatgttggagcgcatattgcatttcctgcaagctaacaagagcagcattcagccaggttttagggaaaaaatctctattttcgagaggcaaattctcagtatcatgagttcacaaagaaggaagcctgtgcaggcacctggacagcaaacgtttcagcaatctggtgggcaagctcctagctctaatatgtcacagcagcatcagacttcccaaggtttgcagcagcatgatagtcatactaatcagatgcctcaagcaagtttaccaagtatgaacacaggagtaccgacctctggagcacctggcattcagcatgtacctgcgcctcaagcatcaaactttggtgttccaacaacacagcaaaatgtcacaaatgcaccgcaggctgcctctaatccggagaatgctcagggaaataattttaatcctgtgcagcatggttcaatgggtactgcattgcaacagggaagcactggtcccatgcagggtgcattgaatgcacagcatcagtccaatagtaacatgatatccaacaatgcaatgagtacaatgcagactaataccaatgccatgcaagcaaacgtgaattcattgcagcagctaaagcaacatcaggagcatcagatgatgcaaaatcagcaaatgaagcagcgtcagcagatgctgcagcagatgcagcaaaagaaaatacttcaacaacagctcccaatacaacaactacagaaacaacagcagcaagggccgattcaggttcaacaacttcattctggaaatgatgtgaatgagctaaaggtcaggcaaggagctgcaatcaaatctggaatgtatcaaccgctgaaccagcgtaactattatcagcagataaaacggggggatgtctttccaatttcttctccgcaaaacctccaagcatcgtccccacaaatttcacactattctcatgttgatcagcacagtctgttgcaatctcaagtgaaaaccgggacaccgttgcattcagctaactcaccatttgtcccatctccatctcctcctgttgccccatcaccggtcccactggattcagataaaccactctccaacctatcttcactcactagtgctgggcaggctggacatcagcaaacatcccttgcacctctaacacaatctatagctgttaacacaccaggtatatcagcgtcacccttgcttgcagaattcacaagtgctgatggaggtcaggttagcgtaccaactcaagttccaacaaaatcaagcgcagcagaaaggcctctcgatcgcttgcttaaagcattgagaacaacacagcctgagtcccttagtgctgcagttagcgatattggatctgtcgtgagtatgattgacaggattgctggatcagcgcctggtaatggttccagagctgctgtgggtgaagatcttgtcgctatgacaaagtgccgcttgcaagccaggaacttcataacccatgatgggagtggtgcatcaaagagaatgaagcgggacacaggtgctatgcctcttaatgtgtcatccgctggaagtttgaatgacagcttgaagcaatcatatactgttggcactccagagctacaatcaactgcaacctcacgtgtcaagtgtcaaagggctgaggtaaaccatgttctgttagaggagattcaggagataaacaaacagcttatagatacagagctccatgtctctgaggatgatgctgagtccttcactacatctgatatggccgaagggacagtcattaaatgcacattcactgctgttgctgttagccccagcttgaaatccatgtttgcttcagcgcagatgagtccaattttgccgttgaggttgcttgttcctggtagctacccaaaatgctccccggtgcttctagacaagtttcctgatgaacaatggaactcggatgacctgtctacgaaggccaagtcaaagttcagtgtgttgctccggggtctagctgagcccatgtcattgcgagaaatcgcaaggacgtgggatgcttgcgcccggaaagtgattgcagagtatgcccagcaaactggaggaggcagtttcagctcgagctatggttgctgggaaagctgcgttggcgcttcataagtttattgtatctattactccgtagtatatttattattctttattacactaagcatttatgtgttgagcaaaagaaaataacagtttatcttccttttggtatcgagtcactgttagcttgataaataagatcgtgtacagtacagtgtatggagcaagcttgggtgcttcagcccggttaatatttactatcttgtatgctttgcctctacttacataacttgcgcggttaccttgtttttttg

SEQ ID NO: 3653 - DNA, 4368 bp, Zea Mays
gttgttagggttgtacatgttccgctggttattgatccgcgatttgctggctcattcagcagcatcctgattcgttaggcgtgccgcgtgagccttgctcgctccaatcgatttcgtcgtcgtccgctcgtcgctagctccttcttggtcgctccttcgcccctgctacaatcgatttcgtcgtcttcagcgaggagctggggagtgattgaacgaagccagcgctccctccattgtcgccccgcagatcgatcgaagtcagcaaccagatcagaaagagcaaaagaggcgcccgagtctctacggcggaaagccatggacggcgccgccaactggcgtcccacgcagggagccgaccctgccaccgtcgctgctgtcggcggcgtcgaccctaacgcggctgcccccaccggaagcgactggcgcacccagcttcagcccgaggcgcgccagaggatcgtcaataagataatggagactctgaagaagcacctgccagtatcagtaccggaggggctgactgagcttcacaaaattgccgtgcgatttgaagagaaaatctatactgccgccaccagccagtctgattatctgaggaagatttctctgaaaatgctgtccatggaaagccagaaaaagacacaacagaaccctggaaatgctcaagtgattccaaatcaaaaccctcctggtccaggtagtaatccagcacagtcatcagctatcccgttgatgtctcagcaacagacacggcagccaaatgcttctacatccgttcaaggttctcttcctagtgttggtcagaacttgtcgagtgtcagccagacattgacgctgcagaatctgtctggcatgccacaaaataccatgaacaatggtttagcacaaggtaggcagcagcagcaacaacaacagcaagcacataatcagtttatgtatcaacagcagaaattgttgatgaaccagaaattgcagcagaattcacgtatgcaaccacacattcagcagcagcaaactttgttgcagtcaacacagatgcaatcttcacagcagcccatggtgcaaatgtcatctggccttcagcctgggcagattgccattccacaaactcaatccatggcgatgcagtcagctacacagagtggtattcaacagaatgcactgaattcggtacaacaacctgtgcaatcgttactccagcagcctacaccgtctgtggtaaggcagcagcaacatccacagtccatgcaccagcagtcttctctgcagcaaactcaaccaactcaacagcccaacattcctttgcaacagcagccacaacaattaatgggccatcagtcaaatttacagcaaaatcagttagtgaatcaacagagtggtgctgtggagatgcaacagcaacaaaggctaccagttcagtcaactaatcttttgaatatgcatcaaacgcagcagatgatgaaccagcaatctatgcccttgcaccagccacaacaattggcaaaccagggaaatgtgtcaagtctaaatcagcagcagcagcagcttcttggaaccgtgccaaatgtccgtatgcatatgttacagcaacaaaagccaattcagcaaccacagcagcaacagcatgctcagcagacatcaatgggtttgatgcaacctcagtctcagcagaatcagcttcagcaacctcaacaacatatgatgtcgcagttccagtctcagcctaatcaaacgcagcaacaattgggaatgcaacaaaggctccagacttcagctggcatgctcttgcaacaaaataatattgatcaacaaaagcagtacgttcaggcacagaaggtcctccaagaagcacccagtacatctgtggattccactgctcaaactggtcatccagggacaggtgattcgcaagaggagttatatcaaatgattaagagtttaaaggaccaatactttgcggaattgaatgatgtgtacaataagatatccatgaagatacaaaatattgacaaccacatgcccgctcaaaagtcagcggagcagtatgaaaggctgaaaggctttaaaggaatgttggagcgcatattgcatttcctgcaagctaacaagagcagcattcagccaggttttagggaaaaaatctctattttcgagaggcaaattctcagtatcatgagttcacaaagaaggaagcctgtgcaggcacctggacagcaaacgtttcagcaatctggtgggcaagctcctagctctaatatgtcacagcagcatcagacttcccaaggtttgcagcagcatgatagtcatactaatcagatgcctcaagcaagtttaccaagtatgaacacaggagtaccgacctctggagcacctggcattcagcatgtacctgcgcctcaagcatcaaactttggtgttccaacaacacagcaaaatgtcacaaatgcaccgcaggctgcctctaatccggagaatgctcagggaaataattttaatcctgtgcagcatggttcaatgggtactgcattgcaacagggaagcactggtcccatgcagggtgcattgaatgcacagcatcagtccaatagtaacatgatatccaacaatgcaatgagtacaatgcagactaataccaatgccatgcaagcaaacgtgaattcattgcagcagctaaagcaacatcaggagcatcagatgatgcaaaatcagcaaatgaagcagcgtcagcagatgctgcagcagatgcagcaaaagaaaatacttcaacaacagctcccaatacaacaactacagaaacaacagcagcaagggccgattcaggttcaacaacttcattctggaaatgatgtgaatgagctaaaggtcaggcaaggagctgcaatcaaatctggaatgtatcaaccgctgaaccagcgtaactattatcagcagataaaacggggggatgtctttccaatttcttctccgcaaaacctccaagcatcgtccccacaaatttcacactattctcatgttgatcagcacagtctgttgcaatctcaagtgaaaaccgggacaccgttgcattcagctaactcaccatttgtcccatctccatctcctcctgttgccccatcaccggtcccactggattcagataaaccactctccaacctatcttcactcactagtgctgggcaggctggacatcagcaaacatcccttgcacctctaacacaatctatagctgttaacacaccaggtatatcagcgtcacccttgcttgcagaattcacaagtgctgatggaggtcaggttagcgtaccaactcaagttccaacaaaatcaagcgcagcagaaaggcctctcgatcgcttgcttaaagcagattgctggatcagcgcctggtaatggttccagagctgctgtgggtgaagatcttgtcgctatgacaaagtgccgcttgcaagccaggaacttcataacccatgatgggagtggtgcatcaaagagaatgaagcgggacacaggtgctatgcctcttaatgtgtcatccgctggaagtttgaatgacagcttgaagcaatcatatactgttggcactccagagctacaatcaactgcaacctcacgtgtcaagtgtcaaagggctgaggtaaaccatgttctgttagaggagattcaggagataaacaaacagcttatagatacagagctccatgtctctgaggatgatgctgagtccttcactacatctgatatggccgaagggacagtcattaaatgcacattcactgctgttgctgttagccccagcttgaaatccatgtttgcttcagcgcagatgagtccaattttgccgttgaggttgcttgttcctggtagctacccaaaatgctccccggtgcttctagacaagtttcctgatgaacaatgcaggaactcggatgacctgtctacgaaggccaagtcaaagttcagtgtgttgctccggggtctagctgagcccatgtcattgcgagaaatcgcaaggacgtgggatgcttgcgcccggaaagtgattgcagagtatgcccagcaaactggaggaggcagtttcagctcgagctatggttgctgggaaagctgcgttggcgcttcataagtttattgtatctattactccgtagtatatttattattctttattacactaagcatttatgtgttgagcaaaagaaaataacagtttatcttccttttggtatcgagtcactgttagcttgataaataagatcgtgtacagtacagtgtatggagcaagcttgggtgcttcagcccggttaatatttactatcttgtatgctttgcctctacttacataacttgcgcggttaccttgtttttttg

SEQ ID NO: 3654 - DNA, 4365 bp, Zea Mays
gttgttagggttgtacatgttccgctggttattgatccgcgatttgctggctcattcagcagcatcctgattcgttaggcgtgccgcgtgagccttgctcgctccaatcgatttcgtcgtcgtccgctcgtcgctagctccttcttggtcgctccttcgcccctgctacaatcgatttcgtcgtcttcagcgaggagctggggagtgattgaacgaagccagcgctccctccattgtcgccccgcagatcgatcgaagtcagcaaccagatcagaaagagcaaaagaggcgcccgagtctctacggcggaaagccatggacggcgccgccaactggcgtcccacgcagggagccgaccctgccaccgtcgctgctgtcggcggcgtcgaccctaacgcggctgcccccaccggaagcgactggcgcacccagcttcagcccgaggcgcgccagaggatcgtcaataagataatggagactctgaagaagcacctgccagtatcagtaccggaggggctgactgagcttcacaaaattgccgtgcgatttgaagagaaaatctatactgccgccaccagccagtctgattatctgaggaagatttctctgaaaatgctgtccatggaaagccagaaaaagacacaacagaaccctggaaatgctcaagtgattccaaatcaaaaccctcctggtccaggtagtaatccagcacagtcatcagctatcccgttgatgtctcagcaacagacacggcagccaaatgcttctacatccgttcaaggttctcttcctagtgttggtcagaacttgtcgagtgtcagccagacattgacgctgcagaatctgtctggcatgccacaaaataccatgaacaatggtttagcacaaggtaggcagcagcagcaacaacaacagcaagcacataatcagtttatgtatcaacagcagaaattgttgatgaaccagaaattgcagcagaattcacgtatgcaaccacacattcagcagcagcaaactttgttgcagtcaacacagatgcaatcttcacagcagcccatggtgcaaatgtcatctggccttcagcctgggcagattgccattccacaaactcaatccatggcgatgcagtcagctacacagagtggtattcaacagaatgcactgaattcggtacaacaacctgtgcaatcgttactccagcagcctacaccgtctgtggtaaggcagcagcaacatccacagtccatgcaccagcagtcttctctgcagcaaactcaaccaactcaacagcccaacattcctttgcaacagcagccacaacaattaatgggccatcagtcaaatttacagcaaaatcagttagtgaatcaacagagtggtgctgtggagatgcaacagcaacaaaggctaccagttcagtcaactaatcttttgaatatgcatcaaacgcagcagatgatgaaccagcaatctatgcccttgcaccagccacaacaattggcaaaccagggaaatgtgtcaagtctaaatcagcagcagcagcagcttcttggaaccgtgccaaatgtccgtatgcatatgttacagcaacaaaagccaattcagcaaccacagcagcaacagcatgctcagcagacatcaatgggtttgatgcaacctcagtctcagcagaatcagcttcagcaacctcaacaacatatgatgtcgcagttccagtctcagcctaatcaaacgcagcaacaattgggaatgcaacaaaggctccagacttcagctggcatgctcttgcaacaaaataatattgatcaacaaaagcagtacgttcaggcacagaaggtcctccaagaagcacccagtacatctgtggattccactgctcaaactggtcatccagggacaggtgattcgcaagaggagttatatcaaatgattaagagtttaaaggaccaatactttgcggaattgaatgatgtgtacaataagatatccatgaagatacaaaatattgacaaccacatgcccgctcaaaagtcagcggagcagtatgaaaggctgaaaggctttaaaggaatgttggagcgcatattgcatttcctgcaagctaacaagagcagcattcagccaggttttagggaaaaaatctctattttcgagaggcaaattctcagtatcatgagttcacaaagaaggaagcctgtgcaggcacctggacagcaaacgtttcagcaatctggtgggcaagctcctagctctaatatgtcacagcagcatcagacttcccaaggtttgcagcagcatgatagtcatactaatcagatgcctcaagcaagtttaccaagtatgaacacaggagtaccgacctctggagcacctggcattcagcatgtacctgcgcctcaagcatcaaactttggtgttccaacaacacagcaaaatgtcacaaatgcaccgcaggctgcctctaatccggagaatgctcagggaaataattttaatcctgtgcagcatggttcaatgggtactgcattgcaacagggaagcactggtcccatgcagggtgcattgaatgcacagcatcagtccaatagtaacatgatatccaacaatgcaatgagtacaatgcagactaataccaatgccatgcaagcaaacgtgaattcattgcagcagctaaagcaacatcaggagcatcagatgatgcaaaatcagcaaatgaagcagcgtcagcagatgctgcagcagatgcagcaaaagaaaatacttcaacaacagctcccaatacaacaactacagaaacaacagcagcaagggccgattcaggttcaacaacttcattctggaaatgatgtgaatgagctaaaggtcaggcaaggagctgcaatcaaatctggaatgtatcaaccgctgaaccagcgtaactattatcagcagataaaacggggggatgtctttccaatttcttctccgcaaaacctccaagcatcgtccccacaaatttcacactattctcatgttgatcagcacagtctgttgcaatctcaagtgaaaaccgggacaccgttgcattcagctaactcaccatttgtcccatctccatctcctcctgttgccccatcaccggtcccactggattcagataaaccactctccaacctatcttcactcactagtgctgggcaggctggacatcagcaaacatcccttgcacctctaacacaatctatagctgttaacacaccaggtatatcagcgtcacccttgcttgcagaattcacaagtgctgatggaggtcaggttagcgtaccaactcaagttccaacaaaatcaagcgcagcagaaaggcctctcgatcgcttgcttaaagcagattgctggatcagcgcctggtaatggttccagagctgctgtgggtgaagatcttgtcgctatgacaaagtgccgcttgcaagccaggaacttcataacccatgatgggagtggtgcatcaaagagaatgaagcgggacacaggtgctatgcctcttaatgtgtcatccgctggaagtttgaatgacagcttgaagcaatcatatactgttggcactccagagctacaatcaactgcaacctcacgtgtcaagtgtcaaagggctgaggtaaaccatgttctgttagaggagattcaggagataaacaaacagcttatagatacagagctccatgtctctgaggatgatgctgagtccttcactacatctgatatggccgaagggacagtcattaaatgcacattcactgctgttgctgttagccccagcttgaaatccatgtttgcttcagcgcagatgagtccaattttgccgttgaggttgcttgttcctggtagctacccaaaatgctccccggtgcttctagacaagtttcctgatgaacaatggaactcggatgacctgtctacgaaggccaagtcaaagttcagtgtgttgctccggggtctagctgagcccatgtcattgcgagaaatcgcaaggacgtgggatgcttgcgcccggaaagtgattgcagagtatgcccagcaaactggaggaggcagtttcagctcgagctatggttgctgggaaagctgcgttggcgcttcataagtttattgtatctattactccgtagtatatttattattctttattacactaagcatttatgtgttgagcaaaagaaaataacagtttatcttccttttggtatcgagtcactgttagcttgataaataagatcgtgtacagtacagtgtatggagcaagcttgggtgcttcagcccggttaatatttactatcttgtatgctttgcctctacttacataacttgcgcggttaccttgtttttttg

SEQ ID NO: 3655 - DNA, 4474 bp, Zea Mays
gttagggttgtacatgttccgctggttattgatccgcgatttgctggctcattcagcagcatcctgattcgttaggcgtgccgcgtgagccttgctcgctccaatcgatttcgtcgtcgtccgctcgtcgctagctccttcttggtcgctccttcgcccctgctacaatcgatttcgtcgtcttcagcgaggagctggggagtgattgaacgaagccagcgctccctccattgtcgccccgcagatcgatcgaagtcagcaaccagatcagaaagagcaaaagaggcgcccgagtctctacggcggaaagccatggacggcgccgccaactggcgtcccacgcagggagccgaccctgccaccgtcgctgctgtcggcggcgtcgaccctaacgcggctgcccccaccggaagcgactggcgcacccagcttcagcccgaggcgcgccagaggatcgtcaataagataatggagactctgaagaagcacctgccagtatcagtaccggaggggctgactgagcttcacaaaattgccgtgcgatttgaagagaaaatctatactgccgccaccagccagtctgattatctgaggaagatttctctgaaaatgctgtccatggaaagccagaaaaagacacaacagaaccctggaaatgctcaagtgattccaaatcaaaaccctcctggtccagtaatccagcacagtcatcagctatcccgttgatgtctcagcaacagacacggcagccaaatgcttctacatccgttcaaggttctcttcctagtgttggtcagaacttgtcgagtgtcagccagacattgacgctgcagaatctgtctggcatgccacaaaataccatgaacaatggtttagcacaaggtactccacaagatatgtatgctgcacaaagacaaatggcaggtaggcagcagcagcaacaacaacagcaagcacataatcagtttatgtatcaacagcagaaattgttgatgaaccagaaattgcagcagaattcacgtatgcaaccacacattcagcagcagcaaactttgttgcagtcaacacagatgcaatcttcacagcagcccatggtgcaaatgtcatctggccttcagcctgggcagattgccattccacaaactcaatccatggcgatgcagtcagctacacagagtggtattcaacagaatgcactgaattcggtacaacaacctgtgcaatcgttactccagcagcctacaccgtctgtggtaaggcagcagcaacatccacagtccatgcaccagcagtcttctctgcagcaaactcaaccaactcaacagcccaacattcctttgcaacagcagccacaacaattaatgggccatcagtcaaatttacagcaaaatcagttagtgaatcaacagagtggtgctgtggagatgcaacagcaacaaaggctaccagttcagtcaactaatcttttgaatatgcatcaaacgcagcagatgatgaaccagcaatctatgcccttgcaccagccacaacaattggcaaaccagggaaatgtgtcaagtctaaatcagcagcagcagcagcttcttggaaccgtgccaaatgtccgtatgcatatgttacagcaacaaaagccaattcagcaaccacagcagcaacagcatgctcagcagacatcaatgggtttgatgcaacctcagtctcagcagaatcagcttcagcaacctcaacaacatatgatgtcgcagttccagtctcagcctaatcaaacgcagcaacaattgggaatgcaacaaaggctccagacttcagctggcatgctcttgcaacaaaataatattgatcaacaaaagcagtacgttcaggcacagaaggtcctccaagaagcacccagtacatctgtggattccactgctcaaactggtcatccagggacaggtgattcgcaagaggagttatatcaaatgattaagagtttaaaggaccaatactttgcggaattgaatgatgtgtacaataagatatccatgaagatacaaaatattgacaaccacatgcccgctcaaaagtcagcggagcagtatgaaaggctgaaaggctttaaaggaatgttggagcgcatattgcatttcctgcaagctaacaagagcagcattcagccaggttttagggaaaaaatctctattttcgagaggcaaattctcagtatcatgagttcacaaagaaggaagcctgtgcaggcacctggacagcaaacgtttcagcaatctggtgggcaagctcctagctctaatatgtcacagcagcatcagacttcccaaggtttgcagcagcatgatagtcatactaatcagatgcctcaagcaagtttaccaagtatgaacacaggagtaccgacctctggagcacctggcattcagcatgtacctgcgcctcaagcatcaaactttggtgttccaacaacacagcaaaatgtcacaaatgcaccgcaggctgcctctaatccggagaatgctcagggaaataattttaatcctgtgcagcatggttcaatgggtactgcattgcaacagggaagcactggtcccatgcagggtgcattgaatgcacagcatcagtccaatagtaacatgatatccaacaatgcaatgagtacaatgcagactaataccaatgccatgcaagcaaacgtgaattcattgcagcagctaaagcaacatcaggagcatcagatgatgcaaaatcagcaaatgaagcagcgtcagcagatgctgcagcagatgcagcaaaagaaaatacttcaacaacagctcccaatacaacaactacagaaacaacagcagcaagggccgattcaggttcaacaacttcattctggaaatgatgtgaatgagctaaaggtcaggcaaggagctgcaatcaaatctggaatgtatcaaccgctgaaccagcgtaactattatcagcagataaaacggggggatgtctttccaatttcttctccgcaaaacctccaagcatcgtccccacaaatttcacactattctcatgttgatcagcacagtctgttgcaatctcaagtgaaaaccgggacaccgttgcattcagctaactcaccatttgtcccatctccatctcctcctgttgccccatcaccggtcccactggattcagataaaccactctccaacctatcttcactcactagtgctgggcaggctggacatcagcaaacatcccttgcacctctaacacaatctatagctgttaacacaccaggtatatcagcgtcacccttgcttgcagaattcacaagtgctgatggaggtcaggttagcgtaccaactcaagttccaacaaaatcaagcgcagcagaaaggcctctcgatcgcttgcttaaagcattgagaacaacacagcctgagtcccttagtgctgcagttagcgatattggatctgtcgtgagtatgattgacaggattgctggatcagcgcctggtaatggttccagagctgctgtgggtgaagatcttgtcgctatgacaaagtgccgcttgcaagccaggaacttcataacccatgatgggagtggtgcatcaaagagaatgaagcgggacacaggtgctatgcctcttaatgtgtcatccgctggaagtttgaatgacagcttgaagcaatcatatactgttggcactccagagctacaatcaactgcaacctcacgtgtcaagtgtcaaagggctgaggtaaaccatgttctgttagaggagattcaggagataaacaaacagcttatagatacagagctccatgtctctgaggatgatgctgagtccttcactacatctgatatggccgaagggacagtcattaaatgcacattcactgctgttgctgttagccccagcttgaaatccatgtttgcttcagcgcagatgagtccaattttgccgttgaggttgcttgttcctggtagctacccaaaatgctccccggtgcttctagacaagtttcctgatgaacaatggaactcggatgacctgtctacgaaggccaagtcaaagttcagtgtgttgctccggggtctagctgagcccatgtcattgcgagaaatcgcaaggacgtgggatgcttgcgcccggaaagtgattgcagagtatgcccagcaaactggaggaggcagtttcagctcgagctatggttgctgggaaagctgcgttggcgcttcataagtttattgtatctattactccgtagtatatttattattctttattacactaagcatttatgtgttgagcaaaagaaaataacagtttatcttccttttggtatcgagtcactgttagcttgataaataagatcgtgtacagtacagtgtatggagcaagcttgggtgcttcagcccggttaatatttactatcttgtatgctttgcctctacttacataacttgcgcggttaccttgtttttttg

SEQ ID NO: 3656 - DNA, 2638 bp, Zea Mays
acaaaagctgcatatggtctgatatcatcacatccggaggattcacaactggggcatggatcataatggagactctgaagaagcacctgccagtatcagtaccggaggggctgactgagcttcacaaaattgccgtgcgatttgaagagaaaatctatactgccgccaccagccagtctgattatctgaggaagatttctctgaaaatgctgtccatggaaagccagaaaaagacacaacagaaccctggaaatgctcaagtgattccaaatcaaaaccctcctggtccaggtagtaatccagcacagtcatcagctatcccgttgatgtctcagcaacagacacggcagccaaatgcttctacatccgttcaaggttctcttcctagtgttggtcagaacttgtcgagtgtcagccagacattgacgctgcagaatctgtctggcatgccacaaaataccatgaacaatggtttagcacaaggtactccacaagatatgtatgctgcacaaagacaaatggcaggtaggcagcagcagcaacaacaacagcaagcacataatcagtttatgtatcaacagcagaaattgttgatgaaccagaaattgcagcagaattcacgtatgcaaccacacattcagcagcagcaaactttgttgcagtcaacacagatgcaatcttcacagcagcccatggtgcaaatgtcatctggccttcagcctgggcagattgccattccacaaactcaatccatggcgatgcagtcagctacacagagtggtattcaacagaatgcactgaattcggtacaacaacctgtgcaatcgttactccagcagcctacaccgtctgtggtaaggcagcagcaacatccacagtccatgcaccagcagtcttctctgcagcaaactcaaccaactcaacagcccaacattcctttgcaacagcagccacaacaattaatgggccatcagtcaaatttacagcaaaatcagttagtgaatcaacagagtggtgctgtggagatgcaacagcaacaaaggctaccagttcagtcaactaatcttttgaatatgcatcaaacgcagcagatgatgaaccagcaatctatgcccttgcaccagccacaacaattggcaaaccagggaaatgtgtcaagtctaaatcagcagcagcagcagcttcttggaaccgtgccaaatgtccgtatgcatatgttacagcaacaaaagccaattcagcaaccacagcagcaacagcatgctcagcagacatcaatgggtttgatgcaacctcagtctcagcagaatcagcttcagcaacctcaacaacatatgatgtcgcagttccagtctcagcctaatcaaacgcagcaacaattgggaatgcaacaaaggctccagacttcagctggcatgctcttgcaacaaaataatattgatcaacaaaagcagtacgttcaggcacagaaggtcctccaagaagcacccagtacatctgtggattccactgctcaaactggtcatccagggacaggtgattcgcaagaggagttatatcaaatgttgagaacaacacagcctgagtcccttagtgctgcagttagcgatattggatctgtcgtgagtatgattgacaggattgctggatcagcgcctggtaatggttccagagctgctgtgggtgaagatcttgtcgctatgacaaagtgccgcttgcaagccaggaacttcataacccatgatgggagtggtgcatcaaagagaatgaagcgggacacaggtgctatgcctcttaatgtgtcatccgctggaagtttgaatgacagcttgaagcaatcatatactgttggcactccagagctacaatcaactgcaacctcacgtgtcaagtgtcaaagggctgaggtaaaccatgttctgttagaggagattcaggagataaacaaacagcttatagatacagagctccatgtctctgaggatgatgctgagtccttcactacatctgatatggccgaagggacagtcattaaatgcacattcactgctgttgctgttagccccagcttgaaatccatgtttgcttcagcgcagatgagtccaattttgccgttgaggttgcttgttcctggtagctacccaaaatgctccccggtgcttctagacaagtttcctgatgaacaatggaactcggatgacctgtctacgaaggccaagtcaaagttcagtgtgttgctccggggtctagctgagcccatgtcattgcgagaaatcgcaaggacgtgggatgcttgcgcccggaaagtgattgcagagtatgcccagcaaactggaggaggcagtttcagctcgagctatggttgctgggaaagctgcgttggcgcttcataagtttattgtatctattactccgtagtatatttattattctttattacactaagcatttatgtgttgagcaaaagaaaataacagtttatcttccttttggtatcgagtcactgttagcttgataaataagatcgtgtacagtacagtgtatggagcaagcttgggtgcttcagcccggttaatatttactatcttgtatgctttgcctctacttacataacttgcgcggttaccttgtttttttg

SEQ ID NO: 3657 - DNA, 1568 bp, Zea Mays
cttgcggatattctgatgaagtcacttggaatggagactctgaagaagcacctgccagtatcagtaccggaggggctgactgagcttcacaaaattgccgtgcgatttgaagagaaaatctatactgccgccaccagccagtctgattatctgaggaagatttctctgaaaatgctgtccatggaaagccagaaaaagacacaacagaaccctggaaatgctcaagtgattccaaatcaaaaccctcctggtccaggtagtaatccagcacagtcatcagctatcccgttgatgtctcagcaacagacacggcagccaaatgcttctacatccgttcaaggttctcttcctagtgttggtcagaacttgtcgagtgtcagccagacattgacgctgcagaatctgtctggcatgccacaaaataccatgaacaatggtttagcacaaggtactccacaagatatgtatgctgcacaaagacaaatggcaggtaggcagcagcagcaacaacaacagcaagcacataatcagtttatgtatcaacagcagaaattgttgatgaaccagaaattgcagcagaattcacgtatgcaaccacacattcagcagcagcaaactttgttgcagtcaacacagatgcaatcttcacagcagcccatggtgcaaatgtcatctggccttcagcctgggcagattgccattccacaaactcaatccatggcgatgcagtcagctacacagagtggtattcaacagaatgcactgaattcggtacaacaacctgtgcaatcgttactccagcagcctacaccgtctgtggtaaggcagcagcaacatccacagtccatgcaccagcagtcttctctgcagcaaactcaaccaactcaacagcccaacattcctttgcaacagcagccacaacaattaatgggccatcagtcaaatttacagcaaaatcagttagtgaatcaacagagtggtgctgtggagatgcaacagcaacaaaggctaccagttcagtcaactaatcttttgaatatgcatcaaacgcagcagatgatgaaccagcaatctatgcccttgcaccagccacaacaattggcaaaccagggaaatgtgtcaagtctaaatcagcagcagcagcagcttcttggaaccgtgccaaatgtccgtatgcatatgttacagcaacaaaagccaattcagcaaccacagcagcaacagcatgctcagcagacatcaatgggtttgatgcaacctcagtctcagcagaatcagcttcagcaacctcaacaacatatgatgtcgcagttccagtctcagcctaatcaaacgcagcaacaattgggaatgcaacaaaggctccagacttcagctggcatgctcttgcaacaaaataatattgatcaacaaaagcagtacgttcaggcacagaaggtcctccaagaagcacccagtaactatttaattacgctgattaagcctgccatatatgctgatcatgcctgccatatgtgtcttggtgtttatggtagttgatcatagattaggcaaggatctccattgat

SEQ ID NO: 3658 - DNA, 872 bp, Zea Mays
gtagttttcgcaactgcaggccactgtagcgcgtcacagcatgtcgcaaacacggttgcacaaaaaggtgcctgcccaaaacaatgtgtactattgcattgcctctctcctcccacattgaatccgtgcaatggccaagtgcctcgacttctccctaccccgcgagagaacccaaattggcgtctccaccatcactaccggtgtcgctcgtgacggcgaatgggggaggaagcgaccagtggccacgagcgaacgttcctgtccaggcccaagtccactctttgtcggcggaagaagcactggatcacctcgacagggagcggcggctccacgacttctacattgaaatcttcaaggggccaggatatcacaagcctgccacacatttgaaatctgttctactaaaatttttggagcttgtggattggcttgacaaggtttcaatcctttgctccaaagtggtctacaagaatggacgacagcaccccgacgacaacatcatagtggaagagttttaagcagctcatgagatagaacttgaaaggctcccaagtcctgaaactcctaaagccttgaagtgttctatgaggattggggtatgcagtatgacaacgatcaatcacgtgggatcaactaggagtaaattgtagaataatggcatgttaacgaggagtttctaactgttaatgtaatttagtaatgtgtattgtcgctttatgttcaagtctagaacgttggtcctgaattgttaagtttggggaatgaactgttagatttcttaagtgatgatgccttcctgttattttgaaatgtcttgttgtgttacccaattcaccaacaatcaggttttctatggacaacacttggtcgag

SEQ ID NO: 3659 - DNA, 5895 bp, Zea Mays
ctcacacacacagtcacactcccaagccaattattataagaggcgagatgagcaactccagctcttaaccaatccactcctcctccctctccacctcctctgctttgctctgccactctgctgaggtggggggcagaggagctccccctccctcctctcccctcctcgccatgtctagcagcgacccggaggagatcagggcgcgcgtcgtcgttctcggttcgccccatgccgacggcggcgacgagtgggcccggcccgagctcgaggccttccatctgccgtctcccgcccaccagcctcctggcttcctagccgggcaaccggaagcagcagagcaacccacgctccctgctcctgctggccgcagcagcagcagcagcaacacgcctactacatctgccggtggcggcgctgctcctcctcctccttcttcgcctccccctccgccggcttctctggagaccgagcagccgcccaatgccaggccagcctccgccggcgccaatgacagcaagaagcccaccccgcccgccgccctgcgcgacctcttccgcttcgccgacggcctcgactgcgcgctcatgctcatcggcaccctcggcgcgctcgtccacggctgctcgctccccgtcttcctccgcttcttcgccgacctcgtcgactccttcggctcccacgccgacgacccggacaccatggtccgcctcgtcgtcaagtacgccttctacttcctcgtcgtcggagcggcaatctgggcatcctcgtgggcagagatctcttgctggatgtggaccggcgagcggcagtcgacgcggatgcggatccggtacctggacgcggcgctgcggcaggacgtgtccttcttcgacaccgacgtgcgggcctcggacgtgatctacgccatcaacgcggacgccgtggtggtgcaggacgccatcagcgagaagctgggcaacctcatccactacatggccaccttcgtggccggcttcgtcgtggggttcacggccgcgtggcagctggcgctggtcacgctggccgtggtgccgctcatcgccgtcatcggcgggctgagcgccgccgcgctcgccaagctctcgtcccgcagccaggacgcgctctcgggcgccagcggcatcgcggagcaggcgctcgcgcagatacggatcgtgcaggcgttcgttggcgaggagcgcgagatgcgggcctactcggcggcgctggccgtggcgcagaggatcggctaccgcagcggcttcgccaaggggctcggcctcggcggcacctacttcaccgtcttctgctgctacgggctcctgctctggtacggcggccacctcgtgcgcgcccagcacaccaacggcgggctcgccatcgccaccatgttctccgtcatgatcggcggactggccctcgggcagtcggcgccgagcatggccgcgttcgccaaggcgcgtgtggcggctgccaagatcttccgcatcatcgaccacaggccgggcatctcctcgcgcgacggcgcggagccagagtcggtgacggggcgggtggagatgcggggcgtggacttcgcgtacccgtcgcggccggacgtccccatcctgcgcggcttctcgctgagcgtgcccgccgggaagaccatcgcgctggtgggcagctccggctccgggaagagcacggtggtgtcgctcatcgagagattctacgaccccagcgcagggcaaatcctgctggacgggcacgacctcaggtcgctggagctgcggtggctgcggcggcagatcgggctggtgagccaggagccggcgctgttcgcgacgagcatcagggagaacctgctgctggggcgggacagccagagcgcgacgctggcggagatggaggaggcggccagggtggccaacgcccactccttcatcatcaaactccccgacggctacgacacgcaggttggggagcgcggcctgcagctctccggtgggcagaagcagcgcatcgccatcgcccgcgccatgctcaagaaccccgccatcctgctgctggacgaggccaccagcgcgctggactccgagtctgagaagctcgtgcaggaggcgctggaccgcttcatgatcgggcgcaccaccctggtgatcgcgcacaggctgtccaccatccgcaaggccgacgtggtggccgtgctgcagggcggcgccgtctccgagatgggcgcgcacgacgagctgatggccaagggcgagaacggcacctacgccaagctcatccgcatgcaggagcaggcgcacgaggcggcgctcgtcaacgcccgccgcagcagcgccaggccctccagcgcccgcaactccgtcagctcgcccatcatgacgcgcaactcctcctacggccgctccccctactcccgccgcctctccgacttctccacctccgacttcaccctctccatccacgacccgcaccaccaccaccggaccatggcggacaagcagctggcgttccgcgccggcgccagctccttcctgcgcctcgccaggatgaactcgcccgagtgggcctacgcgctcgccggctccatcggctccatggtctgcggctccttcagcgccatcttcgcctacatcctcagcgccgtgctcagcgtctactacgcgccggacccgcggtacatgaagcgcgagatcgcaaaatactgctacctgctcatcggcatgtcctccgcggcgctgctgttcaacacggtgcagcacgtgttctgggacacggtgggcgagaacctgaccaagcgggtgcgcgagaagatgttcgccgccgtgctccgcaacgagatcgcctggttcgacgcggacgagaacgccagcgcgcgcgtggccgccaggctagcgctggacgcccagaacgtgcgctccgccatcggggaccgcatctccgtcatcgtccagaactcggcgctgatgctggtggcctgcaccgcggggttcgtcctccagtggcgcctcgcgctcgtgctcctcgccgtgttcccgctcgtcgtgggcgccaccgtgctgcagaagatgttcatgaagggcttctcgggggacctggaggccgcgcacgccagggccacgcagatcgcgggcgaggccgtggccaacctgcgcaccgtggccgcgttcaacgcggagcgcaagatcacggggctgttcgaggccaacctgcgcggcccgctccggcgctgcttctggaaggggcagatcgccggcagcggctacggcgtggcgcagttcctgctgtacgcgtcctacgcgctggggctgtggtacgcggcgtggctggtgaagcacggcgtgtccgacttctcgcgcaccatccgcgtgttcatggtgctgatggtgtccgcgaacggcgccgccgagacgctgacgctggcgccggacttcatcaagggcgggcgcgcgatgcggtcggtgttcgagacgatcgaccgcaagacggaggtggagcccgacgacgtggacgcggcgccggtgccggagcggccgaggggcgaggtggagctgaagcacgtggacttctcgtacccgtcgcggccggacatccaggtgttccgcgacctgagcctccgtgcgcgcgccgggaagacgctggcgctggtggggccgagcgggtgcggcaagagctcggtgctggctctggtgcagcggttctacgagcccacgtccgggcgcgtgctcctggacggcaaggacgtgcgcaagtacaacctgcgggcgctgcggcgcgtggtggcggtggtaccgcaggagccgttcctgttcgcggcgagcatccacgagaacatcgcgtacgggcgcgagggcgcgacggaggcggaggtggtggaggcggcggcgcaggcgaacgcgcaccggttcatcgcggcgctgccggaggggtaccggacgcaggtgggcgagcgcggggtgcagctgtcgggggggcagcggcagcggatcgcgatcgcgcgcgcgctggtgaagcaggcggccatcgtgctgctggacgaggcgaccagcgcgctggacgccgagtcggagcggtgcgtgcaggaggcgctggagcgcgcggggtccgggcgcaccaccatcgtggtggcgcaccggctggccacggtgcgcggcgcgcacaccatcgcggtcatcgacgacggcaaggtggcggagcaggggtcgcactcgcacctgctcaagcaccatcccgacgggtgctacgcgcggatgctgcagctgcagcggctgacgggcgcggcggccgggcccgggccgtcgacctcgtgcaacggggccgcgtaggacggaatggatggatggatgggtttggttcctcgagagattgatgggtgaggaagctgaagctccggatcaaatggtggtactccatgatcgcaacaatgaggggaaaaaaagaaaggagaaaatacggtggttcatatgattgtacaatttgacgatctgtttgagtcggggttttaggatgatgtaaaccttcactcgccttttttttactcttgtttctcatccgcatcagtatcatctatctacatacagtgtcagagatgggaactgatccgcatcatcatctacctcccaaggcaccccagattgtattaatgtacttagttagcctgttttatatatacttataagtaccaaatagcagaattttactccttatctgcagtagcacgaaagaagaaacggcaagctacacctatctctggaagcaaaagaatctccccattctctctcttcctacgaggacaccccatccttttcagacagacagacagacggaccaaactgcaccacccaagaaccgatcgagagcagaggtagcattctctgcactgtagagtgtagaccatactacgctgctctcgagacatgatcccgggaatatctaccgaattgtttgtcagtggcatagccgcatagctctcagctgcctaatgaattgtttggtgccaaccgcgctgcaggcttgcagacgacccgggaagggtcagggattgcacaactactagcatcagtggagagcgaaaggccagaacggcaggcttgcaggaaaacagggaccgtgagtttgacctggccttgggggtggggagtcagtcagtcacatgcgatgcgatgcagtggaggaacccatcttccaacgcacgcggcacgccgtgacaccgattgatttcagggttgctttcgccgctgccaatccaccgatccctggaccctggtgcgttgttccttcgtcgcacatgacggtgcgccccaaccgcagcgcgctggctggcacggagaagggatggattggccgattggggatcggtgcatgctcccttgctcatgaagacggacgaactgcgcaaggccggacccggacccggacgggacggaggagtaggaccatggctgcctgggcctgggcctgggctcacagacagcacggaaaagaggtctgcgctgtccgtccctatctccccggtccaaatctcgagcgccgatgatgcgtccccaatctagccagccagcctatgcctatcctcggcaaccttgtcactgccatttcaccgctcgccaggcactgttgtcttgtcactgttgcctggcgacgcaacacaaccaggcgtctcctctagtcctctactcctctctctgcaacccaaacacacacacggttcgatcgaaatgcttttgtgacgtacgtacagtacagtcctcgatctgaccttgtaccaggattgagtgaggagtgtgctgggtttggatggtttcataggaagtgaagtgtgagtgtaaggcacgcacgcgcacgcaaccttgtacggcctcactcatcaaacagtaaaaccaaaggcacgcaaccttttttcgaatccat

SEQ ID NO: 3660 - DNA, 1241 bp, Zea Mays
tcggggcttcgcggcgactgtctctcggtggttgagggagttatcggcgacagggtgcgcgcgtcttctgggagcgcgttgcggccggagcaagctcgctagtaggggaatcagatatgccacaggctgcgcgatggtgttgtgggtcttcggctacggctccctcatctggaacctcggcttcgacttcgacgacaaaatcctcggcttcatcaagggctacaaccgcacctttaatctcgcttgtattgaccacagaggcacaacagagcatccggcgaggacctgcacgcttgaaaccgacggcgaggcgacgacgaggccatatgccatggtacaagcctacaaggagaaagtttatccaaaaaacaagttgaactgctgcagcatgagccagaagttggttatgaactaccatataaggttcccttccagagtctcccatgctatatcgtgaattttcccaagcaaagcacctgccaggcgccaatatgccaccggggtagccattaaaatacttaaaatcaactccaaggctcatcgaacgttatccagtgcttcaccgtgtttctgaactccctaaagcagatgttgtcatgttggtcagtttggtgttggtttaatttctacgggtgtcgtatatcagagcttcttctggtcatatgtgtagtggatctctcctcctgttgttcccttcaatcatgtccaaggtcaagaaccattcaggtcataaacccctacgacaggggccacgagggctcatcttcgccactgcccctactcccaccttctgcatgtcctgctcggtgctgttccattccctagcgatgttctccggctaaagacgcttggagtttgtggtgtggtgacacttaatgaatcatacgagaggcttgttcccacatccctatacgaggataaaagaagtaggcgcaatgaggagtcgtgttcattcacaagctctaacagagaaagttggggcagatgttcatctttaggtgcagccagtgatgaattattctcaggcaataataatgataagcagatatgagcccttgggcctccagttcgggcaacaagcatatggcaaagagagtgagggggcatgatattgttttccaattccaagatctaaggagcaaagactattaattatcataaacaagatttctaattggtgaaagctttttatatatagcagactgtgatgatgtgtagaggcaaaggatccttcagagttc

SEQ ID NO: 3661 - DNA, 1300 bp, Zea Mays
tcggggcttcgcggcgactgtctctcggtggttgagggagttatcggcgacagggtgcgcgcgtcttctgggagcgcgttgcggccggagcaagctcgctagtaggggaatcagatatgccacaggctgcgcgatggtgttgtgggtcttcggctacggctccctcatctggaacctcggcttcgacttcgacgacaaaatcctcggcttcatcaagggctacaaccgcacctttaatctcgcttgtattgaccacagaggcacaacagagcatccggcgaggacctgcacgcttgaaaccgacggcgaggcgacgacgaggccatatgcgtcagcatggtacaagcctacaaggagaaagtttatccaaaaaacaagttgaactgctgcagcatgagccagaagttggttatgaactaccatataaggttcccttccagagtctcccatgctatatcgtgaattttcccaagcaaagcacctgccaggcgccaatatgccaccggggtagccattaaaatacttaaaatcaactccaaggctcatcgaacgttatccagtgcttcaccgtgtttctgaactccctaaagcagatgttgtcatgttggtcagtttggtgttggtttaatttctacgggtgtcgtatatcagagtcaatcaaaaagtttgactagcaactaatggtgcctatacatgtatttatggagcttcttctggtcatatgtgtagtggatctctcctcctgttgttcccttcaatcatgtccaaggtcaagaaccattcaggtcataaacccctacgacaggggccacgagggctcatcttcgccactgcccctactcccaccttctgcatgtcctgctcggtgctgttccattccctagcgatgttctccggctaaagacgcttggagtttgtggtgtggtgacacttaatgaatcatacgagaggcttgttcccacatccctatacgaggataaaagaagtaggcgcaatgaggagtcgtgttcattcacaagctctaacagagaaagttggggcagatgttcatctttaggtgcagccagtgatgaattattctcaggcaataataatgataagcagatatgagcccttgggcctccagttcgggcaacaagcatatggcaaagagagtgagggggcatgatattgttttccaattccaagatctaaggagcaaagactattaattatcataaacaagatttctaattggtgaaagctttttatatatagcagactgtgatgatgtgtagaggcaaaggatccttcagagttc

SEQ ID NO: 3662 - DNA, 1178 bp, Zea Mays
tcggggcttcgcggcgactgtctctcggtggttgagggagttatcggcgacagggtgcgcgcgtcttctgggagcgcgttgcggccggagcaagctcgctagggaatcagatatgccacaggctgcgcgatggtgttgtgggtcttcggctacggctccctcatctggaacctcggcttcgacttcgacgacaaaatcctcggcttcatcaagggctacaaccgcacctttaatctcgcttgtattgaccacagaggcacaacagagcatccggcgaggacctgcacgcttgaaaccgacggcgaggcgacgacgaggccatatgcgtcagcatggtacaagcctacaaggagaaagtttatccaaaaaacaagttgaactgctgcagcatgagccagaagttggttatgaactaccatataaggttcccttccagagtctcccatgctatatcgtgaattttcccaagcaaagcacctgccaggcgccaatatgccaccggggtagccattaaaatacttaaaatcaactccaaggctcatcgaacgttatccagtgcttcaccgtgtttctgaactccctaaagcagatgttgtcatgttggtcagtttggtgttggtttaatttctacgggtgtcgtatatcagagtttgactagcaactaatggtgcctatacatgtatttatggagcttcttctggtcatatgtgtagtggatctctcctcctgttgttcccttcaatcatgtccaaggtcaagaaccattcaggtcataaacccctacgacaggggccacgagggctcatcttcgccactgcccctactcccaccttctgcatgtcctgctcggtgctgttccattccctagcgatgttctccggctaaagacgcttggagtttgtggtgtggtgacacttaatgaatcatacgagaggcttgttcccacatccctatacgaggataaaagaagtaggcgcaatgaggagtcgtgttcattcacaagctctaacagagaaagttggggcagatgttcatctttaggtgcagccagtgatgaattattctcaggcaataataatgataagcagatatgagcccttgggcctccagttcgggcaacaagcatatggcaaagagaactgtgatgatgtgtagaggcaaaggatccttcagagttc

SEQ ID NO: 3663 - DNA, 1709 bp, Zea Mays
gcccgcatctcgcaaccgtcccgcacgagcaaagagccctcgttcccctccccttccgctcgagttcgtcgccgtcgccctgccctcgtatctcctcccacgacaccggtgacaaccacaggccaccgtcctgatcctcatccgggtgatccccaggcaggcaggtcggcgaggagggcagcaagaccgagccgtgcgggggctcgggacgggaacgggacaggaccccaaaatctcagatccttcctgctcgcccgcccgtgcccgtcggcgcgtcgttcttgccgtccgcgccccacctccgccctctcctcctccaggggaatcagatatgccacaggctgcgcgatggtgttgtgggtcttcggctacggctccctcatctggaacctcggcttcgacttcgacgacaaaatcctcggcttcatcaagggctacaaccgcacctttaatctcgcttgtattgaccacagaggcacaacagagcatccggcgaggacctgcacgcttgaaaccgacggcgaggcgacgacgaggccatatgccatggtacaagcctacaaggagaaagtttatccaaaaaacaaggtatgtttggttcatgctaatcctcacctccttcccttgctgccgtctcaggtaaataagatggaactttaaaagaaagttcagttgctatttatgcatcaattgcttaacctgtttgttttggtgacgagctactatcagtcgcgccataacttattgcatgttttctcatgtatcgctttaggaccggtattgctttaggatgtgatatggcatttgacaacgttttttaatttaattactgaaattcgaacgactggaatgcattttgttacgtttattacacaacattttttatttgtttgttgctgaaagtaacatcaattaggaaatgaaatttgtacttggtattcgcctctgtacagttgaactgctgcagcatgagccagaagttggttatgaactaccatataaggttcccttccagagtctcccatgctatatcgtgaattttcccaagcaaagcacctgccaggcgccaatatgccaccggggtagccattaaaatacttaaaatcaactccaaggctcatcgaacgttatccagtgcttcaccgtgtttctgaactccctaaagcagatgttgtcatgttggtcagtttggtgttggtttaatttctacgggtgtcgtatatcagaggtaaacaatattagatgtttatttatttgtttggaggtatcagttttctatgaatgtacaactgtttgctttgtgctttatttagacttctaatttatatcgatatttatgacatgtgtttacctgttttgtaagtcaatcaaaaagtttgactagcaactaatggtgcctatacatgtatttatggagcttcttctggtcatatgtgtagtggatctctcctcctggtcaagaaccattcaggtcataaacccctacgacaggggccacgagggctcatcttcgccactgcccctactcccaccttctgcatgtcctgctcggtgctgttccattccctagcgatgttctccggctaaagacgcttggagtttgtggtgtggtgacacttaatgaatcatacgagaggcttgttcccacatccctatacgaggatatgataggtgacatattgatgttgtgcggtgacagattagagacg

SEQ ID NO: 3664 - DNA, 1515 bp, Zea Mays
gcccgcatctcgcaaccgtcccgcacgagcaaagagccctcgttcccctccccttccgctcgagttcgtcgccgtcgccctgccctcgtatctcctcccacgacaccggtgacaaccacaggccaccgtcctgatcctcatccgggtgatccccaggcaggcaggtcggcgaggagggcagcaagaccgagccgtgcgggggctcgggacgggaacgggacaggaccccaaaatctcagatccttcctgctcgcccgcccgtgcccgtcggcgcgtcgttcttgccgtccgcgccccacctccgccctctcctcctccaggggaatcagatatgccacaggctgcgcgatggtgttgtgggtcttcggctacggctccctcatctggaacctcggcttcgacttcgacgacaaaatcctcggcttcatcaagggctacaaccgcacctttaatctcgcttgtattgaccacagaggcacaacagagcatccggcgaggacctgcacgcttgaaaccgacggcgaggcgacgacgaggccatatgccatggtacaagcctacaaggagaaagtttatccaaaaaacaagttgaactgctgcagcatgagccagaagttggttatgaactaccatataaggttcccttccagagtctcccatgctatatcgtgaattttcccaagcaaagcacctgccaggcgccaatatgccaccggggtagccattaaaatacttaaaatcaactccaaggctcatcgaacgttatccagtgcttcaccgtgtttctgaactccctaaagcagatgttgtcatgttggtcagtttggtgttggtttaatttctacgggtgtcgtatatcagaggtaaacaatattagatgtttatttatttgtttggaggtatcagttttctatgaatgtacaactgtttgctttgtgctttatttagacttctaatttatatcgatatttatgacatgtgtttacctgttttgtaagtcaatcaaaaagtttgactagcaactaatggtgcctatacatgtatttatggagcttcttctggtcatatgtgtagtggatctctcctcctggtcaagaaccattcaggtcataaacccctacgacaggggccacgagggctcatcttcgccactgcccctactcccaccttctgcatgtcctgctcggtgctgttccattccctagcgatgttctccggctaaagacgcttggagtttgtggtgtggtgacacttaatgaatcatacgagaggcttgttcccacatccctatacgaggataaaagaagtaggcgcaatgaggagtcgtgttcattcacaagctctaacagagaaagttggggcagatgttcatctttaggtgcagccagtgatgaattattctcaggcaataataatgataagcagatatgagcccttgggcctccagttcgggcaacaagcatatggcaaagagaactgtgatgatgtgtagaggcaaaggatccttcagagttc

SEQ ID NO: 3665 - DNA, 1437 bp, Zea Mays
gcccgcatctcgcaaccgtcccgcacgagcaaagagccctcgttcccctccccttccgctcgagttcgtcgccgtcgccctgccctcgtatctcctcccacgacaccggtgacaaccacaggccaccgtcctgatcctcatccgggtgatccccaggcaggcaggtcggcgaggagggcagcaagaccgagccgtgcgggggctcgggacgggaacgggacaggaccccaaaatctcagatccttcctgctcgcccgcccgtgcccgtcggcgcgtcgttcttgccgtccgcgccccacctccgccctctcctcctccaggggaatcagatatgccacaggctgcgcgatggtgttgtgggtcttcggctacggctccctcatctggaacctcggcttcgacttcgacgacaaaatcctcggcttcatcaagggctacaaccgcacctttaatctcgcttgtattgaccacagaggcacaacagagcatccggcgaggacctgcacgcttgaaaccgacggcgaggcgacgacgaggccatatgccatggtacaagcctacaaggagaaagtttatccaaaaaacaagttgaactgctgcagcatgagccagaagttggttatgaactaccatataaggttcccttccagagtctcccatgctatatcgtgaattttcccaagcaaagcacctgccaggcgccaatatgccaccggggtagccattaaaatacttaaaatcaactccaaggctcatcgaacgttatccagtgcttcaccgtgtttctgaactccctaaagcagatgttgtcatgttggtcagtttggtgttggtttaatttctacgggtgtcgtatatcagagtcaatcaaaaagtttgactagcaactaatggtgcctatacatgtatttatggagcttcttctggtcatatgtgtagtggatctctcctcctgttgttcccttcaatcatgtccaaggtcaagaaccattcaggtcataaacccctacgacaggggccacgagggctcatcttcgccactgcccctactcccaccttctgcatgtcctgctcggtgctgttccattccctagcgatgttctccggctaaagacgcttggagtttgtggtgtggtgacacttaatgaatcatacgagaggcttgttcccacatccctatacgaggataaaagaagtaggcgcaatgaggagtcgtgttcattcacaagctctaacagagaaagttggggcagatgttcatctttaggtgcagccagtgatgaattattctcaggcaataataatgataagcagatatgagcccttgggcctccagttcgggcaacaagcatatggcaaagagagtgagggggcatgatattgttttccaattccaaactgtgatgatgtgtagaggcaaaggatccttcagagttc

SEQ ID NO: 3666 - DNA, 1425 bp, Zea Mays
gcccgcatctcgcaaccgtcccgcacgagcaaagagccctcgttcccctccccttccgctcgagttcgtcgccgtcgccctgccctcgtatctcctcccacgacaccggtgacaaccacaggccaccgtcctgatcctcatccgggtgatccccaggcaggcaggtcggcgaggagggcagcaagaccgagccgtgcgggggctcgggacgggaacgggacaggaccccaaaatctcagatccttcctgctcgcccgcccgtgcccgtcggcgcgtcgttcttgccgtccgcgccccacctccgccctctcctcctccaggggaatcagatatgccacaggctgcgcgatggtgttgtgggtcttcggctacggctccctcatctggaacctcggcttcgacttcgacgacaaaatcctcggcttcatcaagggctacaaccgcacctttaatctcgcttgtattgaccacagaggcacaacagagcatccggcgaggacctgcacgcttgaaaccgacggcgaggcgacgacgaggccatatgccatggtacaagcctacaaggagaaagtttatccaaaaaacaagttgaactgctgcagcatgagccagaagttggttatgaactaccatataaggttcccttccagagtctcccatgctatatcgtgaattttcccaagcaaagcacctgccaggcgccaatatgccaccggggtagccattaaaatacttaaaatcaactccaaggctcatcgaacgttatccagtgcttcaccgtgtttctgaactccctaaagcagatgttgtcatgttggtcagtttggtgttggtttaatttctacgggtgtcgtatatcagagtttgactagcaactaatggtgcctatacatgtatttatggagcttcttctggtcatatgtgtagtggatctctcctcctgttgttcccttcaatcatgtccaaggtcaagaaccattcaggtcataaacccctacgacaggggccacgagggctcatcttcgccactgcccctactcccaccttctgcatgtcctgctcggtgctgttccattccctagcgatgttctccggctaaagacgcttggagtttgtggtgtggtgacacttaatgaatcatacgagaggcttgttcccacatccctatacgaggataaaagaagtaggcgcaatgaggagtcgtgttcattcacaagctctaacagagaaagttggggcagatgttcatctttaggtgcagccagtgatgaattattctcaggcaataataatgataagcagatatgagcccttgggcctccagttcgggcaacaagcatatggcaaagagagtgagggggcatgatattgttttccaattccaaactgtgatgatgtgtagaggcaaaggatccttcagagttc

SEQ ID NO: 3667 - DNA, 1880 bp, Zea Mays
gcccgcatctcgcaaccgtcccgcacgagcaaagagccctcgttcccctccccttccgctcgagttcgtcgccgtcgccctgccctcgtatctcctcccacgacaccggtgacaaccacaggccaccgtcctgatcctcatccgggtgatccccaggcaggcaggtcggcgaggagggcagcaagaccgagccgtgcgggggctcgggacgggaacgggacaggaccccaaaatctcagatccttcctgctcgcccgcccgtgcccgtcggcgcgtcgttcttgccgtccgcgccccacctccgccctctcctcctccaggggaatcagatatgccacaggctgcgcgatggtgttgtgggtcttcggctacggctccctcatctggaacctcggcttcgacttcgacgacaaaatcctcggcttcatcaagggctacaaccgcacctttaatctcgcttgtattgaccacagaggcacaacagagcatccggcgaggacctgcacgcttgaaaccgacggcgaggcgacgacgaggccatatgcgtcagcatggtacaagcctacaaggagaaagtttatccaaaaaacaaggtatgtttggttcatgctaatcctcacctccttcccttgctgccgtctcaggtaaataagatggaactttaaaagaaagttcagttgctatttatgcatcaattgcttaacctgtttgttttggtgacgagctactatcagtcgcgccataacttattgcatgttttctcatgtatcgctttaggaccggtattgctttaggatgtgatatggcatttgacaacgttttttaatttaattactgaaattcgaacgactggaatgcattttgttacgtttattacacaacattttttatttgtttgttgctgaaagtaacatcaattaggaaatgaaatttgtacttggtattcgcctctgtacagttgaactgctgcagcatgagccagaagttggttatgaactaccatataaggttcccttccagagtctcccatgctatatcgtgaattttcccaagcaaagcacctgccaggcgccaatatgccaccggggtagccattaaaatacttaaaatcaactccaaggctcatcgaacgttatccagtgcttcaccgtgtttctgaactccctaaagcagatgttgtcatgttggtcagtttggtgttggtttaatttctacgggtgtcgtatatcagagtcaatcaaaaagtttgactagcaactaatggtgcctatacatgtatttatggagcttcttctggtcatatgtgtagtggatctctcctcctgttgttcccttcaatcatgtccaaggtcaagaaccattcaggtcataaacccctacgacaggggccacgagggctcatcttcgccactgcccctactcccaccttctgcatgtcctgctcggtgctgttccattccctagcgatgttctccggctaaagacgcttggagtttgtggtgtggtgacacttaatgaatcatacgagaggcttgttcccacatccctatacgaggataaaagaagtaggcgcaatgaggagtcgtgttcattcacaagctctaacagagaaagttggggcagatgttcatctttaggtgcagccagtgatgaattattctcaggcaataataatgataagcagatatgagcccttgggcctccagttcgggcaacaagcatatggcaaagagagtgagggggcatgatattgttttccaattccaagatctaaggagcaaagactattaattatcataaacaagatttctaattggtgaaagctttttatatatagcagactgtgatgatgtgtagaggcaaaggatccttcagagttc

SEQ ID NO: 3668 - DNA, 1802 bp, Zea Mays
gcccgcatctcgcaaccgtcccgcacgagcaaagagccctcgttcccctccccttccgctcgagttcgtcgccgtcgccctgccctcgtatctcctcccacgacaccggtgacaaccacaggccaccgtcctgatcctcatccgggtgatccccaggcaggcaggtcggcgaggagggcagcaagaccgagccgtgcgggggctcgggacgggaacgggacaggaccccaaaatctcagatccttcctgctcgcccgcccgtgcccgtcggcgcgtcgttcttgccgtccgcgccccacctccgccctctcctcctccaggggaatcagatatgccacaggctgcgcgatggtgttgtgggtcttcggctacggctccctcatctggaacctcggcttcgacttcgacgacaaaatcctcggcttcatcaagggctacaaccgcacctttaatctcgcttgtattgaccacagaggcacaacagagcatccggcgaggacctgcacgcttgaaaccgacggcgaggcgacgacgaggccatatgcgtcagcatggtacaagcctacaaggagaaagtttatccaaaaaacaaggtatgtttggttcatgctaatcctcacctccttcccttgctgccgtctcaggtaaataagatggaactttaaaagaaagttcagttgctatttatgcatcaattgcttaacctgtttgttttggtgacgagctactatcagtcgcgccataacttattgcatgttttctcatgtatcgctttaggaccggtattgctttaggatgtgatatggcatttgacaacgttttttaatttaattactgaaattcgaacgactggaatgcattttgttacgtttattacacaacattttttatttgtttgttgctgaaagtaacatcaattaggaaatgaaatttgtacttggtattcgcctctgtacagttgaactgctgcagcatgagccagaagttggttatgaactaccatataaggttcccttccagagtctcccatgctatatcgtgaattttcccaagcaaagcacctgccaggcgccaatatgccaccggggtagccattaaaatacttaaaatcaactccaaggctcatcgaacgttatccagtgcttcaccgtgtttctgaactccctaaagcagatgttgtcatgttggtcagtttggtgttggtttaatttctacgggtgtcgtatatcagagcttcttctggtcatatgtgtagtggatctctcctcctggtcaagaaccattcaggtcataaacccctacgacaggggccacgagggctcatcttcgccactgcccctactcccaccttctgcatgtcctgctcggtgctgttccattccctagcgatgttctccggctaaagacgcttggagtttgtggtgtggtgacacttaatgaatcatacgagaggcttgttcccacatccctatacgaggataaaagaagtaggcgcaatgaggagtcgtgttcattcacaagctctaacagagaaagttggggcagatgttcatctttaggtgcagccagtgatgaattattctcaggcaataataatgataagcagatatgagcccttgggcctccagttcgggcaacaagcatatggcaaagagagtgagggggcatgatattgttttccaattccaagatctaaggagcaaagactattaattatcataaacaagatttctaattggtgaaagctttttatatatagcagactgtgatgatgtgtagaggcaaaggatccttcagagttc

SEQ ID NO: 3669 - DNA, 1835 bp, Zea Mays
gcccgcatctcgcaaccgtcccgcacgagcaaagagccctcgttcccctccccttccgctcgagttcgtcgccgtcgccctgccctcgtatctcctcccacgacaccggtgacaaccacaggccaccgtcctgatcctcatccgggtgatccccaggcaggcaggtcggcgaggagggcagcaagaccgagccgtgcgggggctcgggacgggaacgggacaggaccccaaaatctcagatccttcctgctcgcccgcccgtgcccgtcggcgcgtcgttcttgccgtccgcgccccacctccgccctctcctcctccaggggaatcagatatgccacaggctgcgcgatggtgttgtgggtcttcggctacggctccctcatctggaacctcggcttcgacttcgacgacaaaatcctcggcttcatcaagggctacaaccgcacctttaatctcgcttgtattgaccacagaggcacaacagagcatccggcgaggacctgcacgcttgaaaccgacggcgaggcgacgacgaggccatatgcgtcagcatggtacaagcctacaaggagaaagtttatccaaaaaacaaggtatgtttggttcatgctaatcctcacctccttcccttgctgccgtctcaggtaaataagatggaactttaaaagaaagttcagttgctatttatgcatcaattgcttaacctgtttgttttggtgacgagctactatcagtcgcgccataacttattgcatgttttctcatgtatcgctttaggaccggtattgctttaggatgtgatatggcatttgacaacgttttttaatttaattactgaaattcgaacgactggaatgcattttgttacgtttattacacaacattttttatttgtttgttgctgaaagtaacatcaattaggaaatgaaatttgtacttggtattcgcctctgtacagttgaactgctgcagcatgagccagaagttggttatgaactaccatataaggttcccttccagagtctcccatgctatatcgtgaattttcccaagcaaagcacctgccaggcgccaatatgccaccggggtagccattaaaatacttaaaatcaactccaaggctcatcgaacgttatccagtgcttcaccgtgtttctgaactccctaaagcagatgttgtcatgttggtcagtttggtgttggtttaatttctacgggtgtcgtatatcagagtttgactagcaactaatggtgcctatacatgtatttatggagcttcttctggtcatatgtgtagtggatctctcctcctgttgttcccttcaatcatgtccaaggtcaagaaccattcaggtcataaacccctacgacaggggccacgagggctcatcttcgccactgcccctactcccaccttctgcatgtcctgctcggtgctgttccattccctagcgatgttctccggctaaagacgcttggagtttgtggtgtggtgacacttaatgaatcatacgagaggcttgttcccacatccctatacgaggataaaagaagtaggcgcaatgaggagtcgtgttcattcacaagctctaacagagaaagttggggcagatgttcatctttaggtgcagccagtgatgaattattctcaggcaataataatgataagcagatatgagcccttgggcctccagttcgggcaacaagcatatggcaaagagagatctaaggagcaaagactattaattatcataaacaagatttctaattggtgaaagctttttatatatagcagactgtgatgatgtgtagaggcaaaggatccttcagagttc

SEQ ID NO: 3670 - DNA, 1433 bp, Zea Mays
gcccgcatctcgcaaccgtcccgcacgagcaaagagccctcgttcccctccccttccgctcgagttcgtcgccgtcgccctgccctcgtatctcctcccacgacaccggtgacaaccacaggccaccgtcctgatcctcatccgggtgatccccaggcaggcaggtcggcgaggagggcagcaagaccgagccgtgcgggggctcgggacgggaacgggacaggaccccaaaatctcagatccttcctgctcgcccgcccgtgcccgtcggcgcgtcgttcttgccgtccgcgccccacctccgccctctcctcctccaggggaatcagatatgccacaggctgcgcgatggtgttgtgggtcttcggctacggctccctcatctggaacctcggcttcgacttcgacgacaaaatcctcggcttcatcaagggctacaaccgcacctttaatctcgcttgtattgaccacagaggcacaacagagcatccggcgaggacctgcacgcttgaaaccgacggcgaggcgacgacgaggccatatgcgtcagcatggtacaagcctacaaggagaaagtttatccaaaaaacaagttgaactgctgcagcatgagccagaagttggttatgaactaccatataaggttcccttccagagtctcccatgctatatcgtgaattttcccaagcaaagcacctgccaggcgccaatatgccaccggggtagccattaaaatacttaaaatcaactccaaggctcatcgaacgttatccagtgcttcaccgtgtttctgaactccctaaagcagatgttgtcatgttggtcagtttggtgttggtttaatttctacgggtgtcgtatatcagagtttgactagcaactaatggtgcctatacatgtatttatggagcttcttctggtcatatgtgtagtggatctctcctcctgttgttcccttcaatcatgtccaaggtcaagaaccattcaggtcataaacccctacgacaggggccacgagggctcatcttcgccactgcccctactcccaccttctgcatgtcctgctcggtgctgttccattccctagcgatgttctccggctaaagacgcttggagtttgtggtgtggtgacacttaatgaatcatacgagaggcttgttcccacatccctatacgaggataaaagaagtaggcgcaatgaggagtcgtgttcattcacaagctctaacagagaaagttggggcagatgttcatctttaggtgcagccagtgatgaattattctcaggcaataataatgataagcagatatgagcccttgggcctccagttcgggcaacaagcatatggcaaagagagtgagggggcatgatattgttttccaattccaacagactgtgatgatgtgtagaggcaaaggatccttcagagttc

SEQ ID NO: 3671 - DNA, 1802 bp, Zea Mays
gcccgcatctcgcaaccgtcccgcacgagcaaagagccctcgttcccctccccttccgctcgagttcgtcgccgtcgccctgccctcgtatctcctcccacgacaccggtgacaaccacaggccaccgtcctgatcctcatccgggtgatccccaggcaggcaggtcggcgaggagggcagcaagaccgagccgtgcgggggctcgggacgggaacgggacaggaccccaaaatctcagatccttcctgctcgcccgcccgtgcccgtcggcgcgtcgttcttgccgtccgcgccccacctccgccctctcctcctccaggggaatcagatatgccacaggctgcgcgatggtgttgtgggtcttcggctacggctccctcatctggaacctcggcttcgacttcgacgacaaaatcctcggcttcatcaagggctacaaccgcacctttaatctcgcttgtattgaccacagaggcacaacagagcatccggcgaggacctgcacgcttgaaaccgacggcgaggcgacgacgaggccatatgccatggtacaagcctacaaggagaaagtttatccaaaaaacaaggtatgtttggttcatgctaatcctcacctccttcccttgctgccgtctcaggtaaataagatggaactttaaaagaaagttcagttgctatttatgcatcaattgcttaacctgtttgttttggtgacgagctactatcagtcgcgccataacttattgcatgttttctcatgtatcgctttaggaccggtattgctttaggatgtgatatggcatttgacaacgttttttaatttaattactgaaattcgaacgactggaatgcattttgttacgtttattacacaacattttttatttgtttgttgctgaaagtaacatcaattaggaaatgaaatttgtacttggtattcgcctctgtacagttgaactgctgcagcatgagccagaagttggttatgaactaccatataaggttcccttccagagtctcccatgctatatcgtgaattttcccaagcaaagcacctgccaggcgccaatatgccaccggggtagccattaaaatacttaaaatcaactccaaggctcatcgaacgttatccagtgcttcaccgtgtttctgaactccctaaagcagatgttgtcatgttggtcagtttggtgttggtttaatttctacgggtgtcgtatatcagagtcaatcaaaaagtttgactagcaactaatggtgcctatacatgtatttatggagcttcttctggtcatatgtgtagtggatctctcctcctgttgttcccttcaatcatgtccaaggtcaagaaccattcaggtcataaacccctacgacaggggccacgagggctcatcttcgccactgcccctactcccaccttctgcatgtcctgctcggtgctgttccattccctagcgatgttctccggctaaagacgcttggagtttgtggtgtggtgacacttaatgaatcatacgagaggcttgttcccacatccctatacgaggataaaagaagtaggcgcaatgaggagtcgtgttcattcacaagctctaacagagaaagttggggcagatgttcatctttaggtgcagccagtgatgaattattctcaggcaataataatgataagcagatatgagcccttgggcctccagttcgggcaacaagcatatggcaaagagagtgagggggcatgatattgttttccaattccaaactgtgatgatgtgtagaggcaaaggatccttcagagttc

SEQ ID NO: 3672 - DNA, 1405 bp, Zea Mays
gcccgcatctcgcaaccgtcccgcacgagcaaagagccctcgttcccctccccttccgctcgagcaggcaggtcggcgaggagggcagcaagaccgagccgtgcgggggctcgggacgggaacgggacaggaccccaaaatctcagatccttcctgctcgcccgcccgtgcccgtcggcgcgtcgttcttgccgtccgcgccccacctccgccctctcctcctccaggggaatcagatatgccacaggctgcgcgatggtgttgtgggtcttcggctacggctccctcatctggaacctcggcttcgacttcgacgacaaaatcctcggcttcatcaagggctacaaccgcacctttaatctcgcttgtattgaccacagaggcacaacagagcatccggcgaggacctgcacgcttgaaaccgacggcgaggcgacgacgaggccatatgccatggtacaagcctacaaggagaaagtttatccaaaaaacaagttgaactgctgcagcatgagccagaagttggttatgaactaccatataaggttcccttccagagtctcccatgctatatcgtgaattttcccaagcaaagcacctgccaggcgccaatatgccaccggggtagccattaaaatacttaaaatcaactccaaggctcatcgaacgttatccagtgcttcaccgtgtttctgaactccctaaagcagatgttgtcatgttggtcagtttggtgttggtttaatttctacgggtgtcgtatatcagagtttgactagcaactaatggtgcctatacatgtatttatggagcttcttctggtcatatgtgtagtggatctctcctcctgttgttcccttcaatcatgtccaaggtcaagaaccattcaggtcataaacccctacgacaggggccacgagggctcatcttcgccactgcccctactcccaccttctgcatgtcctgctcggtgctgttccattccctagcgatgttctccggctaaagacgcttggagtttgtggtgtggtgacacttaatgaatcatacgagaggcttgttcccacatccctatacgaggataaaagaagtaggcgcaatgaggagtcgtgttcattcacaagctctaacagagaaagttggggcagatgttcatctttaggtgcagccagtgatgaattattctcaggcaataataatgataagcagatatgagcccttgggcctccagttcgggcaacaagcatatggcaaagagagtgagggggcatgatattgttttccaattccaagatctaaggagcaaagactattaattatcataaacaagatttctaattggtgaaagctttttatatatagcagactgtgatgatgtgtagaggcaaaggatccttcagagttc

SEQ ID NO: 3673 - DNA, 1646 bp, Zea Mays
gcccgcatctcgcaaccgtcccgcacgagcaaagagccctcgttcccctccccttccgctcgagttcgtcgccgtcgccctgccctcgtatctcctcccacgacaccggtgacaaccacaggccaccgtcctgatcctcatccgggtgatccccaggcaggcaggtcggcgaggagggcagcaagaccgagccgtgcgggggctcgggacgggaacgggacaggaccccaaaatctcagatccttcctgctcgcccgcccgtgcccgtcggcgcgtcgttcttgccgtccgcgccccacctccgccctctcctcctccaggggaatcagatatgccacaggctgcgcgatggtgttgtgggtcttcggctacggctccctcatctggaacctcggcttcgacttcgacgacaaaatcctcggcttcatcaagggctacaaccgcacctttaatctcgcttgtattgaccacagaggcacaacagagcatccggcgaggacctgcacgcttgaaaccgacggcgaggcgacgacgaggccatatgccatggtacaagcctacaaggagaaagtttatccaaaaaacaagttgaactgctgcagcatgagccagaagttggttatgaactaccatataaggttcccttccagagtctcccatgctatatcgtgaattttcccaagcaaagcacctgccaggcgccaatatgccaccggggtagccattaaaatacttaaaatcaactccaaggctcatcgaacgttatccagtgcttcaccgtgtttctgaactccctaaagcagatgttgtcatgttggtcagtttggtgttggtttaatttctacgggtgtcgtatatcagaggtaaacaatattagatgtttatttatttgtttggaggtatcagttttctatgaatgtacaactgtttgctttgtgctttatttagacttctaatttatatcgatatttatgacatgtgtttacctgttttgtaagtcaatcaaaaagtttgactagcaactaatggtgcctatacatgtatttatggagcttcttctggtcatatgtgtagtggatctctcctcctgttgttcccttcaatcatgtccaaggtcaagaaccattcaggtcataaacccctacgacaggggccacgagggctcatcttcgccactgcccctactcccaccttctgcatgtcctgctcggtgctgttccattccctagcgatgttctccggctaaagacgcttggagtttgtggtgtggtgacacttaatgaatcatacgagaggcttgttcccacatccctatacgaggataaaagaagtaggcgcaatgaggagtcgtgttcattcacaagctctaacagagaaagttggggcagatgttcatctttaggtgcagccagtgatgaattattctcaggcaataataatgataagcagatatgagcccttgggcctccagttcgggcaacaagcatatggcaaagagagtgagggggcatgatattgttttccaattccaaggatctaaggagcaaagactattaattatcataaacaagatttctaattggtgaaagctttttatatatagcagactgtgatgatgtgtagaggcaaaggatccttcagagttc

SEQ ID NO: 3674 - DNA, 404 bp, Zea Mays
ctgccatttgcattcaattttggtcaacattatgaactgaccagagattgatagtgatagtgttggatcacgattgcaggataaaagaagtaggcgcaatgaggagtcgtgttcattcacaagctctaacagagaaagttggggcagatgttcatctttaggtgcagccagtgatgaattattctcaggcaataataatgataagcagatatgagcccttgggcctccagttcgggcaacaagcatatggcaaagagagtgagggggcatgatattgttttccaattccaagatctaaggagcaaagactattaattatcataaacaagatttctaattggtgaaagctttttatatatagcagactgtgatgatgtgtagaggcaaaggatccttcagagttc

SEQ ID NO: 3675 - DNA, 568 bp, Zea Mays
ggtgaacctagagtggtcatccgaggaaagaaggatgttgttttcacgttagaatgggaatcaatcggtgtcctaccttgtggcgagatggcgagaagaaagataatttttactaccaagggatcttaatcagaattctaggctcattcatacattcactacaatgccttcgaactcatgaacatttatctctggctctattgtgacgagcaagctacagaggatccagtgccttagctggtagagtctgttgagcaggagattgtggaagccatacacttcacatgaaatcccacctttggtgagttcgtgcacattattccccacaacttatcgagcgatgaaaatgtgtgagctcacccttgctgtctcacaccccaacaagagaagaacaggtggtcgaagaggagccacctaacactgaggctttcgacttgatctaggtggcgtctcccagacaactttgtggcgtcagggaataaaatttagttcgctttattttatcatttatttttgtaagacttctgctatgtaataagtacatttatgatatttatgacatttatct

SEQ ID NO: 3676 - DNA, 1011 bp, Zea Mays
atgatgagatccggccttctctcgctatgtttccacctagccctggccatcacactggctgcaagtgttcctggccttgctcgtagtagggtaatcgacatcgaaccgcaactcaaaccgacgctgcaactagaaccaaagcatggtgtatctcaaccagacagaaaccaagaacccaaaccgacaccacaacctgagccaaaaccggagcctaaaccggaaccaaaacctgcaccacaatcagacaccaaatcagaccctaaacccgcaccacagtcagacccaaaacctgcaccacaaccggacctaaaaccagaacccaaacctacaccacagccagacccaaaaccagaacccaaacctacaccacaaccagacccaaaaccagaacccaaacctacaccacaaccaggcccagagccgaaacccaagccagcgcctcaacctgagccaaaacccacgccgcaaccagatccaaaacctgagccaaaacccacgccgcaaccagatccgaaacctgagccaaaaccaacaccacaaccacctttcccacagcccgagcctcaaccagatcccaaaccccaacccgaaccatccaagccagatcctaaaccccaacccgagccatccaagccagaccctcagccagagcccaaacctacaccagagccaaaaccccaaccagaaccatcgaagccggagccaccgtcgtctcttccaccaccatttggcacgggcgtcgtggaagggaactgagaggagcatagtggaaccgatcatcatcgtggatgccatctatagcttttggctatgactgataagtaatactgtttgtgtaagagtgagctctctttttatatagggtgtgtgtattgtgtgtagtactatgtttggacgatgtgtgtgtacccaccttttcccgtgtgtttccatcagcatgcatcaatgatccatgtatatgccttgctaagtttgtgtattatcaatgagtaaaagaaccaggtcttgtat

SEQ ID NO: 3677 - DNA, 3498 bp, Zea Mays
aaggcaactatctccgacgcgtgggcctacaaaggcccacggcatcgccaaccagtgaaatcatcctaacatccgtaacgccatcctcgccgccgccgcagcctcctgcgctccgctccactggtggtggtagggagtgcagcggatccatcccgtgtcccgatccgatcccttcgctgctagtatcgagccttgccatcgtgctcaccgaagaggacttcatcagtaaagaattgctttagcaacacttacaatataaggaaagagggttcacgttggatacaatccggtcctcccttgttgctaaatagggtaaagtttgttggcaagaggacatcctgttctgttgcaacagagccgccgcctgctgccactgaagaaccaggcatggatgtccccaaggagatattcttgaaagattacaaggcacctgattattattttgacacggtggatttacaatttcaacttggtgaagaaaagaccatagttacatctaaaatagttgtatctcctggagttgaaggcatctcagctccactagttcttcatgggcatgacctcaagctcatatcaatcaaagtcaatggcactgaattaaagggtgaagagtataaagtcaattctcgccatctgatgctttcaacacctcctgctgttgtattcaacttggaaattgtcacagaaatatatccccagctaaacacatcactggaggggctgtacaagtctactggtaacttctgcacccagtgtgaagcagaagggtttcggaagattacctactttcaggaccgcccagatgttatggcaaaatatacttgccgcattgaagctgataaaactttgtatccggttttattgtccaatgggaatcttattgagcagggagaccttgagggtggaaagcattacgcactgtgggaggatcccttcaagaaaccaagctacctgtttgctctagttgctggtcagctgggatgccgggaggattcatttgttacatgctctggccgcaacgtaacactaagaatttggactcctgcccaagatttaccaaaaacagcacatgctatgtattctcttaaagcagcaatgaaatgggatgaggaggtctttggtctggagtatgatcttgatttattcaacattgttgttgttcctgatttcaatatgggagcaatggaaaacaagagcttgaatatatttcaatctagacttgtgttggcatcaccggagactgccactgatggtgattatgctgctattttgggtgttgttggacatgagtatttccacaactggactgggaatagagtaacttgccgtgattggttccagctaaccctgaaagaaggactgaccgttttcagggatcaggagttctcttcagatcttggctgtcgtacggtaaaacgtattgctgatgtctccaaacttagaatctatcaattcccacaggacgccgggcctatggcacatcctatccgtccccattcttatatcaagatggacaacttctatactgatcaggtttacgagaagggtgctgaagttgtcagaatgtacaagaccatgtttggagcatcagggttccgaaagggcatggatctttattttaaaaggcatgatgggcaagctgtcacttgtgaagacttctatgcagccatgtgtgatgcaaataatgcacaactgccaaactttttacaatggtactctcaagcaggtacgcctatagtcaaggtggcatcttcatatgatcctagttctcagacattctctttgaaacttagccaagaagtaccacccactcctggccagccggttaaggagcctatgttcatacctgttgctgttggacttgttgactctactggaaaagatatgcccctcacttccgtttacagtgatggaagtctccaaacagtctctactgatggccagccagtcttcactactgtgcttcagtttaaaaagaaagaagaagagtttatgtttaaaaacattcctgagaggccagttccttctttgttaaggggatatagtgctcctgtccgtctagattctgatctgagtgagggtgacctatttttcttgcttgccagtgactcggatgaatttaacagatgggaagctggccaagttttggcacgtaagttgatgctcagtctcgtagctgatttccagcaacagaaaacactggttctaaatccgaaatttgttgatgggattagatcaattctgcgcaacacaagcttggataaggaattcattgcgaaagcaataactttgcctggtcaaggggagattatggatatgatggaagttgcagatcctgatgcagttcatgctgtccgtaactttattaagaaggagcttgccgtgcaacttaaagatgtgaaaagcaacaggagttctgaggcttacacatttaaccatgatagtatggctcgccgtgcattaaaaaatacatgccttgcataccttgcgtcattgaatgagccagatttcgttgagcttgcactgcatgagtacaagtctgcgactaacatgacagagcagtttgctgcattagcagcattatcccaaaatccaggccaagttcgtgatgatgccctcttggatttctataacaagtggcagcatgaatacttggttgtaagcaagtggtttgctcttcaagctacttcagagattcctggaaatgttgcaaatgttcagaagctgctgtctcaccctgctttcgacctgaggaatcccaacaaggtgtactcactaatcgggggattctgtggctcacctgtgaacttccacgcgaaagatggttctgggtacaagttcttgggtgagatcgttttgcagcttgacaagataaaccctcaggtggcctcccgcatggtttcagcattttctcggtggaggcggtacgacaagaccagacaagctcttgctaaggcccagctggagatgatcgtgtcggccaatgggctctccgaaaacgtgttcgagattgcttcaaaaagcttggcggattagcttgggcagttccgaggaattgcgagtgggagtgcttaactgaatctctcttttgttggtaaaatgacaagtagagataataaacaggcgggccgaatttgcatgaactgataaaatataagtgtgatgatgcccgctttgtggggggctttggagcatgcatgcgcgctcgtctgttggaatggaactgctgtttttttttttttacgttctccgctcagcggaccgctgtggggcagaaaacatctgaagcacgacggctgctctctgtctctgtttctctctcgaactcgcggtttggttatcagtcggtcctgtggaacccttggcttcgacaaagctggaaaagtttggagctttccagtcatgccaggttcttctagcacactccagcaagtaggagcaagtgttctttttggctggtttgttggcaccgtatttcttttggtttcttaagttttc

SEQ ID NO: 3678 - DNA, 3616 bp, Zea Mays
caaaggcccacggcatcgccaaccagtgaaatcatcctaacatccgtaacgccatcctcgccgccgccgcagcctcctgcgctccgctccactggtggtggtagggagtgcagcggatccatcccgtgtcccgatccgatcccttcgctgctagtttaggattcatccttcgacgtttgggattggttcggttgggatggcgcgtcgcctgattagccccgcagcggcgtgccgaggctgcggtttggttaggaccgggtttctgcccgccatctcctccttccattatcgagccttgccatcgtgctcaccgaagaggacttcatcagtaaagaattgctttagcaacacttacaatataaggaaagagggttcacgttggatacaatccggtcctcccttgttgctaaatagggtaaagtttgttggcaagaggacatcctgttctgttgcaacagagccgccgcctgctgccactgaagaaccaggcatggatgtccccaaggagatattcttgaaagattacaaggcacctgattattattttgacacggtggatttacaatttcaacttggtgaagaaaagaccatagttacatctaaaatagttgtatctcctggagttgaaggcatctcagctccactagttcttcatgggcatgacctcaagctcatatcaatcaaagtcaatggcactgaattaaagggtgaagagtataaagtcaattctcgccatctgatgctttcaacacctcctgctgttgtattcaacttggaaattgtcacagaaatatatccccagctaaacacatcactggaggggctgtacaagtctactggtaacttctgcacccagtgtgaagcagaagggtttcggaagattacctactttcaggaccgcccagatgttatggcaaaatatacttgccgcattgaagctgataaaactttgtatccggttttattgtccaatgggaatcttattgagcagggagaccttgagggtggaaagcattacgcactgtgggaggatcccttcaagaaaccaagctacctgtttgctctagttgctggtcagctgggatgccgggaggattcatttgttacatgctctggccgcaacgtaacactaagaatttggactcctgcccaagatttaccaaaaacagcacatgctatgtattctcttaaagcagcaatgaaatgggatgaggaggtctttggtctggagtatgatcttgatttattcaacattgttgttgttcctgatttcaatatgggagcaatggaaaacaagagcttgaatatatttcaatctagacttgtgttggcatcaccggagactgccactgatggtgattatgctgctattttgggtgttgttggacatgagtatttccacaactggactgggaatagagtaacttgccgtgattggttccagctaaccctgaaagaaggactgaccgttttcagggatcaggagttctcttcagatcttggctgtcgtacggtaaaacgtattgctgatgtctccaaacttagaatctatcaattcccacaggacgccgggcctatggcacatcctatccgtccccattcttatatcaagatggacaacttctatactgatcaggtttacgagaagggtgctgaagttgtcagaatgtacaagaccatgtttggagcatcagggttccgaaagggcatggatctttattttaaaaggcatgatgggcaagctgtcacttgtgaagacttctatgcagccatgtgtgatgcaaataatgcacaactgccaaactttttacaatggtactctcaagcaggtacgcctatagtcaaggtggcatcttcatatgatcctagttctcagacattctctttgaaacttagccaagaagtaccacccactcctggccagccggttaaggagcctatgttcatacctgttgctgttggacttgttgactctactggaaaagatatgcccctcacttccgtttacagtgatggaagtctccaaacagtctctactgatggccagccagtcttcactactgtgcttcagtttaaaaagaaagaagaagagtttatgtttaaaaacattcctgagaggccagttccttctttgttaaggggatatagtgctcctgtccgtctagattctgatctgagtgagggtgacctatttttcttgcttgccagtgactcggatgaatttaacagatgggaagctggccaagttttggcacgtaagttgatgctcagtctcgtagctgatttccagcaacagaaaacactggttctaaatccgaaatttgttgatgggattagatcaattctgcgcaacacaagcttggataaggaattcattgcgaaagcaataactttgcctggtcaaggggagattatggatatgatggaagttgcagatcctgatgcagttcatgctgtccgtaactttattaagaaggagcttgccgtgcaacttaaagatgatcttcttgcggctgtgaaaagcaacaggagttctgaggcttacacatttaaccatgatagtatggctcgccgtgcattaaaaaatacatgccttgcataccttgcgtcattgaatgagccagatttcgttgagcttgcactgcatgagtacaagtctgcgactaacatgacagagcagtttgctgcattagcagcattatcccaaaatccaggccaagttcgtgatgatgccctcttggatttctataacaagtggcagcatgaatacttggttgtaagcaagtggtttgctcttcaagctacttcagagattcctggaaatgttgcaaatgttcagaagctgctgtctcaccctgctttcgacctgaggaatcccaacaaggtgtactcactaatcgggggattctgtggctcacctgtgaacttccacgcgaaagatggttctgggtacaagttcttgggtgagatcgttttgcagcttgacaagataaaccctcaggtggcctcccgcatggtttcagcattttctcggtggaggcggtacgacaagaccagacaagctcttgctaaggcccagctggagatgatcgtgtcggccaatgggctctccgaaaacgtgttcgagattgcttcaaaaagcttggcggattagcttgggcagttccgaggaattgcgagtgggagtgcttaactgaatctctcttttgttggtaaaatgacaagtagagataataaacaggcgggccgaatttgcatgaactgataaaatataagtgtgatgatgcccgctttgtggggggctttggagcatgcatgcgcgctcgtctgttggaatggaactgctgtttttttttttttacgttctccgctcagcggaccgctgtggggcagaaaacatctgaagcacgacggctgctctctgtctctgtttctctctcgaactcgcggtttggttatcagtcggtcctgtggaacccttggcttcgacaaagctggaaaagtttggagctttccagtcatgccaggttcttctagcacactccagcaagtaggagcaagtgttctttttggctggtttgttggcaccgtatttcttttggtttcttaagttttc

SEQ ID NO: 3679 - DNA, 1198 bp, Zea Mays
ccgtccgtcccaacaaggccagccgccacctccccagctgacaggcaaaggcaacccaaaaggagccgccatgggctcccgctacgaggtggaggtgacggtggggtcggcgagcaacctgaagaacgtcaactggcgcaacggcgacctccggccctacgccgtgctgtgggtggacgacgggcccaagtgctccacccgcgtcgaccccgacaacggcgaggaccccgtgtgggacgagaaggtggtggtccccgtcccgcccgcctccgccgcgcgcctgggcgacgccgtcctccacatcgacgtcgtccacgccgccggcgacgacgccgacgccgtcaagccgctcgtgggctccgcgcgcctcccgctccgcgacgtcctcgatgacgccggcggcgtcggcggcgccagggtctcgcgcacgctcaggctgaagcggccctcgggccgcccgcagggccggctcgaggcccgcgtcgccgtccgcgaggccgcgccgccgccgcgctactacgacccgaacccgtacccggcgcccgcgtacgggaaccccggcgccgcccgcgacccgtactacgcggcgccgccggcgtacggcggacagccgccgtacgccgcgccgccggtggggtacccggccgacgctcctcctccctacggcggtggttatggctacggagctgctgctccgacggcgtacggcgctgaggctgctccactacctgcccagcagcagaagagcagcaagatggggatggggacggggctggccgtgggcgccgcggcggggctgctgggcggcctcgcgctggcggaaggggcgagctacgtggaggacaagttcgaggatcgcgtcgccgagagggtggaggaggagacgttcggcgacggagattacgatgacgattactagaatgaagcaggtcggagaggagatcatgatcatgcatacggaaccgaaatccaggcaacaagtcgaagtcgagtagctcaaatgtattcaaataataagtgagatcaccccagtcgagaaaaaaaatcaaaacttgaaccatggcaatatatgttaatcgccaaccatttgatcgagtacttggtttgattgtccaattcgaaccgtatcttgctttccatgtcgtacgtgggcgcctatatatattttttgcagtatgaacagaaaagaaaagaaaaa

SEQ ID NO: 3680 - DNA, 1654 bp, Zea Mays
aaacatgccccataaactgagtctgcactgagctactcctggctaccgcaccacgcttcacccggcgtgcactccatctctctgggacgactacggccgccgccgccgccgcccccacctacgccaggtgccgaggccttcgttggcctcttcgccggtgacgagaacctaccagacttggagcaagcctctcaacatgtcgtgggccgcaatcgagaatgatcctggtgtttttacggaactgttgcagcagatgcaactgaagggtcttcaagtaagcaatcaactatcttcactctatgagtctatgttcttgctaaaggttgatgaactctactcacttgacctggatgctctcaatgatcttcagccaatatatgggctaatattgctatacaaatggcgacctccagaaaaggatgagggtcctgtcatcaaggatgcaatcccaaaccttttctttgccaaccagataattaacaaagcctgcgcaacccaagctatcgtttcggttctcttgaactctcctggcattacccttagtgatgagcttaaaaagctcaaggaatttgcaaaggatttgccacctgagctcaaaggactggctatagtaaactgcgcaagcattcgtatgttaaacaattcgtttgcaaggtcagaggcctctgaggagcagaaaccacctagcggggatgatgatgtataccatttcataaactacgttccagtggatggtgtcctgtacgagcttgatgggctaaaggaaggaccaataagtctagggaaatgcccaggtggtgttggtgatgcagggtggtggcttaggctagcgcagcctgtgatcaaagagcacatcgacctgttctctcagaacgagataagattcagcgtgatggcgatcttgaagaaccggaaggagatgttcacggtggagatcaaagaactccagaggaagagggagggcctcttgcagcagatgggcgatcccaacgcaagcaggcatgttgagcagtcactcgcggaggtggcagctcagatcgagtctgtgacggagaagatcataatggaggaggagaaggtgaagaagtggaaagcggagaacctgaggaggaagcataactacgtgcccttcctattcaatttcctcaagattctcgaggagaagcagcagctgaagcccctgatagagaaggcgaaggcgaagcagaagtcccacggccccagctaggtgaaaagccgcaatgcacctacgtactgtctcttttagttggggttccttgtaagattggagttcgcgtatatgctttctgtttttagtttaggacaattgcaccaatagggtgcaactgcagatttatccctgttttttagactttgcgtgtgtgcctttagattttttgaaatgaaactgctgtatgtctctattccgttaaaccgttgtatgtctctacttcggttagtcgtatttagtatttaacggtgtcaagtcttgataatacgacaagggataattatgttagtgtccctgttttagggtagaactgtatatctatccttgttttttagactttgcgtgtttgcctgtacaattattatgcttaacatgatgaggatgttatgctcttattatgttaaaaacatagttaaattgttg

SEQ ID NO: 3681 - DNA, 1631 bp, Zea Mays
atgccccataaactgagtctgcactgagctactcctggctaccgcaccacgcttcacccggcgtgcactccatctctctgggacgactacggccgccgccgccgccgcccccacctacgccaggtgccgaggccttcgttggcctcttcgccggtgacgagaacctaccagacttggagcaagcctctcaacatgtcgtgggccgcaatcgagaatgatcctggtgtttttacggaactgttgcagcagatgcaactgaagggtcttcaaatatactctgttatctttttcattatcaggttgatgaactctactcacttgacctggatgctctcaatgatcttcagccaatatatgggctaatattgctatacaaatggcgacctccagaaaaggatgagggtcctgtcatcaaggatgcaatcccaaaccttttctttgccaaccagataattaacaaagcctgcgcaacccaagctatcgtttcggttctcttgaactctcctggcattacccttagtgatgagcttaaaaagctcaaggaatttgcaaaggatttgccacctgagctcaaaggactggctatagtaaactgcgcaagcattcgtatgttaaacaattcgtttgcaaggtcagaggcctctgaggagcagaaaccacctagcggggatgatgatgtataccatttcataaactacgttccagtggatggtgtcctgtacgagcttgatgggctaaaggaaggaccaataagtctagggaaatgcccaggtggtgttggtgatgcagggtggtggcttaggctagcgcagcctgtgatcaaagagcacatcgacctgttctctcagaacgagataagattcagcgtgatggcgatcttgaagaaccggaaggagatgttcacggtggagatcaaagaactccagaggaagagggagggcctcttgcagcagatgggcgatcccaacgcaagcaggcatgttgagcagtcactcgcggaggtggcagctcagatcgagtctgtgacggagaagatcataatggaggaggagaaggtgaagaagtggaaagcggagaacctgaggaggaagcataactacgtgcccttcctattcaatttcctcaagattctcgaggagaagcagcagctgaagcccctgatagagaaggcgaaggcgaagcagaagtcccacggccccagctaggtgaaaagccgcaatgcacctacgtactgtctcttttagttggggttccttgtaagattggagttcgcgtatatgctttctgtttttagtttaggacaattgcaccaatagggtgcaactgcagatttatccctgttttttagactttgcgtgtgtgcctttagattttttgaaatgaaactgctgtatgtctctattccgttaaaccgttgtatgtctctacttcggttagtcgtatttagtatttaacggtgtcaagtcttgataatacgacaagggataattatgttagtgtccctgttttagggtagaactgtatatctatccttgttttttagactttgcgtgtttgcctgtacaattattatgcttaacatgatgaggatgttatgctcttattatgttaaaaacatagttaaattgttg

SEQ ID NO: 3682 - DNA, 1495 bp, Zea Mays
ccaaaccctatctgctatttgatgcctactaggaataacttcgaattatcgcaaacattgctggacttggagcaagcctctcaacatgtcgtgggccgcaatcgagaatgatcctggtgtttttacggaactgttgcagcagatgcaactgaagggtcttcaagttgatgaactctactcacttgacctggatgctctcaatgatcttcagccaatatatgggctaatattgctatacaaatggcgacctccagaaaaggatgagggtcctgtcatcaaggatgcaatcccaaaccttttctttgccaaccagataattaacaaagcctgcgcaacccaagctatcgtttcggttctcttgaactctcctggcattacccttagtgatgagcttaaaaagctcaaggaatttgcaaaggatttgccacctgagctcaaaggactggctatagtaaactgcgcaagcattcgtatgttaaacaattcgtttgcaaggtcagaggcctctgaggagcagaaaccacctagcggggatgatgatgtataccatttcataaactacgttccagtggatggtgtcctgtacgagcttgatgggctaaaggaaggaccaataagtctagggaaatgcccaggtggtgttggtgatgcagggtggtggcttaggctagcgcagcctgtgatcaaagagcacatcgacctgttctctcagaacgagataagattcagcgtgatggcgatcttgaagaaccggaaggagatgttcacggtggagatcaaagaactccagaggaagagggagggcctcttgcagcagatgggcgatcccaacgcaagcaggcatgttgagcagtcactcgcggaggtggcagctcagatcgagtctgtgacggagaagatcataatggaggaggagaaggtgaagaagtggaaagcggagaacctgaggaggaagcataactacgtgcccttcctattcaatttcctcaagattctcgaggagaagcagcagctgaagcccctgatagagaaggcgaaggcgaagcagaagtcccacggccccagctaggtgaaaagccgcaatgcacctacgtactgtctcttttagttggggttccttgtaagattggagttcgcgtatatgctttctgtttttagtttaggacaattgcaccaatagggtgcaactgcagatttatccctgttttttagactttgcgtgtgtgcctttagattttttgaaatgaaactgctgtatgtctctattccgttaaaccgttgtatgtctctacttcggttagtcgtatttagtatttaacggtgtcaagtcttgataatacgacaagggataattatgttagtgtccctgttttagggtagaactgtatatctatccttgttttttagactttgcgtgtttgcctgtacaattattatgcttaacatgatgaggatgttatgctcttattatgttaaaaacatagttaaattgttg

SEQ ID NO: 3683 - DNA, 1627 bp, Zea Mays
cttccctctgtgcgaaacagagcatctgaacccttacttgaagatattttagctacatgtattcggatctgatctagttagaagtgtataataccatctcaaaagagttacaagtgtatacatgtattatgactactaatttccatttttcggcaaaattattggttgttcatgtgtacacacatgtcttttgctgacttggagcaagcctctcaacatgtcgtgggccgcaatcgagaatgatcctggtgtttttacggaactgttgcagcagatgcaactgaagggtcttcaagttgatgaactctactcacttgacctggatgctctcaatgatcttcagccaatatatgggctaatattgctatacaaatggcgacctccagaaaaggatgagggtcctgtcatcaaggatgcaatcccaaaccttttctttgccaaccagataattaacaaagcctgcgcaacccaagctatcgtttcggttctcttgaactctcctggcattacccttagtgatgagcttaaaaagctcaaggaatttgcaaaggatttgccacctgagctcaaaggactggctatagtaaactgcgcaagcattcgtatgttaaacaattcgtttgcaaggtcagaggcctctgaggagcagaaaccacctagcggggatgatgatgtataccatttcataaactacgttccagtggatggtgtcctgtacgagcttgatgggctaaaggaaggaccaataagtctagggaaatgcccaggtggtgttggtgatgcagggtggtggcttaggctagcgcagcctgtgatcaaagagcacatcgacctgttctctcagaacgagataagattcagcgtgatggcgatcttgaagaaccggaaggagatgttcacggtggagatcaaagaactccagaggaagagggagggcctcttgcagcagatgggcgatcccaacgcaagcaggcatgttgagcagtcactcgcggaggtggcagctcagatcgagtctgtgacggagaagatcataatggaggaggagaaggtgaagaagtggaaagcggagaacctgaggaggaagcataactacgtgcccttcctattcaatttcctcaagattctcgaggagaagcagcagctgaagcccctgatagagaaggcgaaggcgaagcagaagtcccacggccccagctaggtgaaaagccgcaatgcacctacgtactgtctcttttagttggggttccttgtaagattggagttcgcgtatatgctttctgtttttagtttaggacaattgcaccaatagggtgcaactgcagatttatccctgttttttagactttgcgtgtgtgcctttagattttttgaaatgaaactgctgtatgtctctattccgttaaaccgttgtatgtctctacttcggttagtcgtatttagtatttaacggtgtcaagtcttgataatacgacaagggataattatgttagtgtccctgttttagggtagaactgtatatctatccttgttttttagactttgcgtgtttgcctgtacaattattatgcttaacatgatgaggatgttatgctcttattatgttaaaaacatagttaaattgttg

SEQ ID NO: 3684 - DNA, 4140 bp, Zea Mays
atggcgtgcgggtcactggacactgggtcagctgggctggaaaggcaaaacaaacagaatcatcagtgttacgtaataatccttggattttgcgctgtttaccatggtgttcccaaaaggcccctggcctttcttatagcccaagctacccccttcttcctcctctcatctctctcgggactttccccaatccactccactccaatccacttccctcctctgtcaaccctagccgcgccgccggcagtctgctcgggtggcgcatacatgacccacccttcctcgccgtcgtcctctgcgccgccaccgccgcccgccgcggcggcggcggcggcggcggccgaggccacctccctcgcgccgggtttccgcttccaccccaccgacgaggagctcgtgtcgtactacctcaagcgcaaggttctcggccgcccgctcaaggtcgacgccatcgccgaggtcgacctgtacaagctcgagccctgggacctgcccccgcgctcccgcctccgctcccgcgactcccagtggtacttcttcagccgcctcgaccgcaagcacgccaaccgcgctcgcaccaaccgcgccacgtcgggagggtactggaagaccaccggcaaggacagggaggtgcgccatgggcccagggtcgtcgggatgaagaagacgctcgtattccacgccgggcgcgcccccaagggcgagcgcaccaactgggtcatgcacgagtaccgcctcgagggcgacgccgccgtggagataccgcaggactcgtttgtggtgtgccggatattccagaaagctggcccaggtcctcagaatggggcacagtatggagcgccgttcgttgaggaggaatgggaggaggacgatgcagatgtcggtttgcttccagtggagggtgatgctgctgtcgaccctgaggttccccctggccctgtggagatccctggtgctttggagagaggctatcttcaaatgagtgatctcattcaggtatgtttgcaacttctgcaagcagtcaacttgcatgagtttttttgccagtgtttctgtacatagatttcaattaggtgtggatgtttagatccaggttgtacttattagccgtcaaaacctgaagacaataaatgaagagaggtatatttgctgtatctctgaaagtattccattgtgttgttagttacaatgaacggtacctggagaagtgttaggtaccgtaaacctcattttcattggttggctagtgctcctaattgtatgtgttattctcataaatcttctgtatgagcccttcaatttttcgttcatacacaattatgtagcatctttgttactttttcatgaaagcctttgtcatgcactggataattccattccatcttaaatcatgccacttttatgtttgaagtaaacatcaggacctttagattgaagcattgattagattgtttgaatgacctacctactactttcagcatctatcattcataaagtcctggtaccttatttaataatacactgttttgtgggtaacgggcagttgttatggatattgttattcacctgttgtatagtttttttgggcgcttttggtgggttagaatagaagggcgggcctggtgcagcggtagagcctaccatctataaccgggaggtcccgggtttgagccccagtctctgcatattatgcgggtaaggcttggcacttaaagatacccttccccagaccccgcagagtgcgggaagcctatggcactgggtacaccccttttctttatagatgggttagaataattcctttaagagcacctttcctgttgttatgttgttgggcacttaaagataccccttcccagaccccgcagagtgcgggaagactatagcactgggtacaccccttttttttataggtgggttagaataattcctttaagagcacctttcctgttgttatgttgttgctaagtctaattttggttatctagtatcagaatttttcatcggatgcttatggtgtctgactgaagtaaaaggatgttaaaatatgctatgacttttttcttcacatacttctctaggttaacagttgatggtgatctgcacttttttcttagcgcacttctctaggataacagttgatggcatgtagtccgttataagattcatgttctgctcattgtcaaaagaggcccacagctgtggaatgtacctgtaacaatcttgatttaataaaactccctttatcgaaaaaagctgtggaatgtaccttgttgacagaccatgactcttgtcacaccttacatcatattgattaatcatgtaccttgcatttatcaggtttgctggacttccttctgctttggcatttaccttgttctaacttgtattttgatgaaattctatcccatgctgtgtagcaaggacactgacattttttggttgttgtttggcgtgaaccttactttttctctcaggattaggtagcaagttgtatgactgtatgagattacgactacaagagtcatgatatcatagtattcatgtctgaacattgaaaaggtttgggattctgtgttgccatttacatctttaactgtgtggtgtgaactccacatcatgctacagaatgcagattgtcaaactgaatagttaacactaagttttttaagaaatttcttcaatttaaaagtgagcttactattcatcatgcagcgtctctcttttttctgtaaaatatgatttatatgtggtattttttgtttatttaattcatattgatattggtatcaaatttgcacattggtagattcatggttctaattatggtgttcttttctttttcagggtttgggtgatcgaaatggaaatggtacacctagtttaccagtttctgatacttcacataacagcaaccattctgaagatgtagatggaaattctggggacattttaagtgacccaaaccttggctctaattttattcagtgtgttgaacctggggagcaaaatagcttaatgcttaatggaaatatcatatctaatgcaaatgctggagatttttttaataattccagccccagtgatgggttcctagagctgaaggattttgcagatgctgcagatctggatttccctttgggcaatggatcaaccatatggccttcagatggttgggcatggaaaacacctgactcagcggaagctgtaaatggagctaacgatgagattcctccactccctgatgaccagattttccagccagatgaactggaacaactgttgcagtcaatacaagaagattcccatttgggctcaactatcattgaccccatgcattcttccatgacaaattcagttctgcctgaggacgattatttgatgttctatgatgcacccttcgattccactatgtgtgatgggtatggacagaatggaattcttggctccgcagcagccaatctatctggcattggcatgatggaggatggtatggcatactttgatgcaatggatgataattcatttaatgatactctgggctccatacagcagtcagctggtagcagttcccatgcttttaatggcccagtccttacccaagaggtcaacaatactatgtgtacatatagtccaactcaaaaggttttagaacctaattttctagttggtgccccgtcatctgctaggttacctgaagctggtagtcagttaaattgtgttgttttaccagatggtcaggctaagagtagtactattggaaagggatttgtaaagattttggactcaatctccgctcccccagcttttgctggagaattcccagctatccaccgcaaatctttggctcatatttctggggggcgccccaacacactccatgtttctgctgaagtgatccgcgtaggaagtttagctgttccttctggcgcagataagtgggcgctgcataaagatcaagacatggagctggtcttttctgcagattttgagcctgatacccgtcttcactgtgctgcaatagccattaccgcgatgctgcgaggtgaattcaggccttttcttagtttcggcaacaatgctcaaagtgaggtatggggtggggaatgtaacctaagatatgtacaaggccgtctcgga

SEQ ID NO: 3685 - DNA, 1345 bp, Zea Mays
tacgactacaagagtcatgatatcatagtattcatgtctgaacattgaaaagggtttgggtgatcgaaatggaaatggtacacctagtttaccagtttctgatacttcacataacagcaaccattctgaagatgtagatggaaattctggggacattttaagtgacccaaaccttggctctaattttattcagtgtgttgaacctggggagcaaaatagcttaatgcttaatggaaatatcatatctaatgcaaatgctggagatttttttaataattccagccccagtgatgggttcctagagctgaaggattttgcagatgctgcagatctggatttccctttgggcaatggatcaaccatatggccttcagatggttgggcatggaaaacacctgactcagcggaagctgtaaatggagctaacgatgagattcctccactccctgatgaccagattttccagccagatgaactggaacaactgttgcagtcaatacaagaagattcccatttgggctcaactatcattgaccccatgcattcttccatgacaaattcagttctgcctgaggacgattatttgatgttctatgatgcacccttcgattccactatgtgtgatgggtatggacagaatggaattcttggctccgcagcagccaatctatctggcattggcatgatggaggatggtatggcatactttgatgcaatggatgataattcatttaatgatactctgggctccatacagcagtcagctggtagcagttcccatgcttttaatggcccagtccttacccaagaggtcaacaatactatgtgtacatatagtccaactcaaaaggttttagaacctaattttctagttggtgccccgtcatctgctaggttacctgaagctggtagtcagttaaattgtgttgttttaccagatggtcaggctaagagtagtactattggaaagggatttgtaaagattttggactcaatctccgctcccccagcttttgctggagaattcccagctatccaccgcaaatctttggctcatatttctggggggcgccccaacacactccatgtttctgctgaagtgatccgcgtaggaagtttagctgttccttctggcgcagataagtgggcgctgcataaagatcaagacatggagctggtcttttctgcagattttgagcctgatacccgtcttcactgtgctgcaatagccattaccgcgatgctgcgaggtgaattcaggccttttcttagtttcggcaacaatgctcaaagtgaggtatggggtggggaatgtaacctaagatatgtacaaggccgtctcgga

SEQ ID NO: 3686 - DNA, 953 bp, Zea Mays
aggattaataaaagtaaaaaaattccaaccgcacacggcacctcctctcgtccgttcgccgcctggctcgcaccgctgacagtgcgtcagtccaggtcgatactccctctttccaagatccggtcattctctctcggggtcggctaccgccgccgccgtacgccaggtgccgactgccgagaccttctccgatctgtttgccggcgaagagcgcccgccaaatctgcccctggtttcaaccgattgaaccccgatgtccgacgtcgagaaccctggcgtgggtgggaagccgccgccgtacaaggaccctgacaatgggagtcagcgattcctactcgagttggagttcgtgcagtgcctcgccaaccctacctacatccactatctagcgcagaatagatatttcgaggatgaggcatttatcgggtacctcaagtatctaaaatactggcagcgaccagagtatatcaaatacataatgtatccacactgccttttctttcttgagcttctccaaaatgccaatttccgaaatgcaatggcacatccaacaaacaaggatgggctaattgaagttcttgcgcaacttttcaacggacactgccggattcgagcacagttgctgcctcaggagccttattatttccttttgttttagtgctggttatttggccttgtagttgagggttcgtgagtttttagaatggaagcttctgacttagagtgaagttagaacaaatactccatgtcgcatgaacttgcacacgtgactttaggtgtcagcattctcctgaatgatcataccatttaccttaatgtttcagcatattgcttggcagcaggaaatatgtactgttcataaactatacatatgcccgttggccccaatacaaagttgacattttggcaatattctgttcatacaaaacaactgtacatgttttagtattttt

SEQ ID NO: 3687 - DNA, 1705 bp, Zea Mays
aggattaataaaagtaaaaaaattccaaccgcacacggcacctcctctcgtccgttcgccgcctggctcgcaccgctgacagtgcgtcagtccaggtcgatactccctctttccaagatccggtcattctctctcggggtcggctaccgccgccgccgtacgccaggtgccgactgccgagaccttctccgatctgtttgccggcgaagagcgcccgccaaatctgcccctggtttcaaccgattgaaccccgatgtccgacgtcgagaaccctggcgtgggtgggaagccgccgccgtacaaggaccctgacaatgggagtcagcgattcctactcgagttggagttcgtgcagtgcctcgccaaccctacctacatccactgtatccacactgccttttctttcttgagcttctccaaaatgccaatttccgaaatgcaatggcacatccaacaaacaaggagcttgctcataggcagcaatatttcttctggaaaaactacaggaataacagactgaagcacatcataccgcgccctcctcctgaacctgcaccttcacaggcacctgctacattgcccctacaagcgtccgtgccgacacctgtagctccacctgttcctgcaccaacatcgtctatgccacctgtggtagcaggtggtgcatctgcaatgtctcctatgcagtttgtaggaactccaggcactaatatgccgaagaatgacatgagaaatgctatggacaatagaaaaaggaagtatgcaccacctcccttgcaatcatccaacagtcattttatgaagttatttgtccatgcattgttttctttccttgctattttgtctgtgctatgaaatcattggtgaactattattttcgaaggacatgatccaattcagtttgatttatggccactcttccaatatagatcatgaagattctcctttccttacaggaaagatgattgagactctcaacatgttttttctgagggatgctatatcctcttccccattcactttggttgctcttcttcattgaagacggtggagaaatacttcttttacttctctgatctttggcccattatcccagtaaaattcatctgaagttctgtcaacaatgcatattgagtcaagtgttattcgttccattgtgcaaataaagactggataaagactagtcaattgaaatgtgaacgtcttgtagctgtgactgaatctgcatatttcttcagagcttataaatgtgatatgaatgtttcataaaactacagtttggctgatgatatgtatacatcttcatcgcaggatgggctaattgaagttcttgcgcaacttttcaacggacactgccggattcgagcacagttgctgcctcaggagccttattatttccttttgttttagtgctggttatttggccttgtagttgagggttcgtgagtttttagaatggaagcttctgacttagagtgaagttagaacaaatactccatgtcgcatgaacttgcacacgtgactttaggtgtcagcattctcctgaatgatcataccatttaccttaatgtttcagcatattgcttggcagcaggaaatatgtactgttcataaactatacatatgcccgttggccccaatacaaagttgacattttggcaatattctgttcatacaaaacaactgtacatgttttagtattttt

SEQ ID NO: 3688 - DNA, 1538 bp, Zea Mays
aggattaataaaagtaaaaaaattccaaccgcacacggcacctcctctcgtccgttcgccgcctggctcgcaccgctgacagtgcgtcagtccaggtcgatactccctctttccaagatccggtcattctctctcggggtcggctaccgccgccgccgtacgccaggtgccgactgccgagaccttctccgatctgtttgccggcgaagagcgcccgccaaatctgcccctggtttcaaccgattgaaccccgatgtccgacgtcgagaaccctggcgtgggtgggaagccgccgccgtacaaggaccctgacaatgggagtcagcgattcctactcgagttggagttcgtgcagtgcctcgccaaccctacctacatccactatctagcgcagaatagatatttcgaggatgaggcatttatcgggtacctcaagtatctaaaatactggcagcgaccagagtatatcaaatacataatgtatccacactgccttttctttcttgagcttctccaaaatgccaatttccgaaatgcaatggcacatccaacaaacaaggagcttgctcataggcagcaatatttcttctggaaaaactacaggaataacagactgaagcacatcataccgcgccctcctcctgaacctgcaccttcacaggcacctgctacattgcccctacaagcgtccgtgccgacacctgtagctccacctgttcctgcaccaacatcgtctatgccacctgtggtagcaggtggtgcatctgcaatgtctcctatgcagtttgtaggaactccaggcactaatatgccgaagaatgacatgagaaatgctatggacaatagaaaaaggaagtatgcaccacctcccttgcaatcatccaacagtcattttatgaagttatttgtccatgcattgttttctttccttgctattttgtctgtgctatgaaatcattggtgaactattattttcgaaggacatgatccaattcagtttgatttatggccactcttccaatatagatcatgaagattctcctttccttacaggaaagatgattgagactctcaacatgttttttctgagggatgctatatcctcttccccattcactttggttgctcttcttcattgaagacggatgggctaattgaagttcttgcgcaacttttcaacggacactgccggattcgagcacagttgctgcctcaggagccttattatttccttttgttttagtgctggttatttggccttgtagttgagggttcgtgagtttttagaatggaagcttctgacttagagtgaagttagaacaaatactccatgtcgcatgaacttgcacacgtgactttaggtgtcagcattctcctgaatgatcataccatttaccttaatgtttcagcatattgcttggcagcaggaaatatgtactgttcataaactatacatatgcccgttggccccaatacaaagttgacattttggcaatattctgttcatacaaaacaactgtacatgttttagtattttt

SEQ ID NO: 3689 - DNA, 592 bp, Zea Mays
tcagctcttcctcgtggaacagatcacgtaacagccggtccgttttccacgccgcgccatgtgcgccaccagctgattccgagtcctagcctctgactaaattgccgttcccaccgaagcggggtttaagaaccgaagtatcgtggcctttcctctgcatcccatccaagcgccgccccatagctcacttttccttgccccgccgtgccagcatcgttaagggcggatattgccgccgccatagaatctcgggccgtgactagccaaagctttaggcgggagttcaattggattcgcttggtcgcggtgaaggttgccagcgacgtttctggggcgaatcggggcccagcaccttggatttctcgccgttgagttgcagtccaccgcgtaccgcactgctctggagccagggcacgactcgacataaacctagtgaggacacgtatcacttgaagagcaagttggtacctggaatctcaagtgccaggcaagttgtgcccttgaccactttttacccaataatgttctttaatatcatttattcttgcataggttaattttgatgggacccaataggttaccctagattgtt

SEQ ID NO: 3690 - DNA, 595 bp, Zea Mays
tcagctcttcctcgtggaacagatcacgtaacagccggtccgttttccacgccgcgccatgtgcgccaccagctgattccgagtcctagcctctgactaaattgccgttcccaccgaagcggggtttaagaaccgaagtatcgtggcctttcctctgcatcccatccaagcgccgccccatagctcacttttccttgccccgccgtgccagcatcgttaagggcggatattgccgccgccatagaatctcgggccgtgactagccaaagctttaggcgggagttcaattggattcgcttggtcgcggtgaaggttgccagcgacgtttctggggcgaatcggggcccagcaccttggatttctcgccgttgagttgcagtccaccgcgtaccgcactgctctggagccagggcacgactcgacataaacctagcagtgaggacacgtatcacttgaagagcaagttggtacctggaatctcaagtgccaggcaagttgtgcccttgaccactttttacccaataatgttctttaatatcatttattcttgcataggttaattttgatgggacccaataggttaccctagattgtt

SEQ ID NO: 3691 - DNA, 2565 bp, Zea Mays
tgggggcctcttctccatccgccacctctcggcgcatcatcagctgtgcctgtgagctctctcattcaccggcaccgctgctcttgctcttgtgttcgtaagtaacttcgcattgccttgccccgcccccttgtcctgctccctccggagctccccgcctgctccatttaattactgactgactcatacccttccccgcattcgccttcttgtttcttccatcccacccgtaccagccgccggtccccaatgcccaggcaggcagcccagcacggtgtggtggtctgatccgcggcggcgcgcccgtcgctccctccgcgaatggctcctccagcagggacaggggcagggacggaggggaggccggcgcggcggcgcggcaccggcaccagccccggacgcaccaaggtgtgggtcgagccgccgggcaagagccacggccaccaccaccaccaggctccgccgcccccgtccccgcccaagagggtggccgtggtctactacctctgccgcaaccgccacctcgagcacccgcacttcatcgaggtgccgctcgccgtaccggaggaaggcctctaccttcgagatgtgatgaaccgcctcaacgtgctgcgggggaagggcatggcctccatgtattcttggtcctgcaagagggcagcgagtacatcctcaagggctccgagctcctcgaccgctcgccgccgccgccgccagatcggcagcatgatggcggcgctagcaacccgaatgtggaggagaacctcaagcaccgcaaggaagaagagtccccgcagtctcggggctcgcaggaagggtgctcgtcgtcgtcgtctccttccgcctccgccgctggcaaggagatctcgcctccgcccgccactccgcggccacagcagcaggcgcagtcggcagccctgccgccgccgccgtcgccgtcgccggcttccaccagccgcgaggacgacccgtgccggaccgcgcactcaggctcgtccggcaaccagtcccccgaacccgctgcgagaaacgctccaccgtcagaggctagctccccaggaccgtcggagtacagagtctgcagacccgtcggggctcaggacgcggccacacagacagacgacagcgagagggacgctgctgaaaaccatagtactcgcgtggccggagcgtccaccatggacacgacgtcggatgccgagatccaggaatgccaccggaggagctcgccgctgtcacccaaggtacccgagaccgttcgtgagtcaccgccggccgtgtgctcctccgatgctgcttcgcctggtggcagagtcgagacgttggagtccctgataagagcagaggccagcaggaggagtagcttcaggacattggaggagggacacatgcttggcccggtgggtgtcaaactgaagccggccaacttgctgatgcagcttatcacgtgtgggttcgtgtctgtgaaagaacaccgaggcttcgggttcatcccgacgtacaggcctcggtttacgcaggtcgagttcccttctccggtgttctccactcccgtggcgttgcggcaccttgacagaatcccttgcaatacaaaagcaactgggtcgacgagagctccggagccggaatgtttcagcgggagcttggttgttgagacgaagcagcaggacgagcccgggagagggatcgcctcactcaaacgctcgtcatcttacgacgaggatagagtgtacagagcagcacatcccaaaagcaacacggaaagctcctgtgaggcaggtagtttcaggtgcctcccacagaccatcaggatcatatcgtgtaagcagtcgaggagtggaacagtactctccccccctgcctctgacgtgagaaacggctctatccaacaagaacacagtaccatgtcctcaccgctgggctcatcgaagagcgcgagcaacaggatggccgatccgtcgccgccgggcaaactgtcttgtgcgagagccgagtcgttgttccgcgaggagaaggacatgatcaagatcgaagaaagttgagttgcctctcactgtctctctcatatgcatccatcatctccgtctgctggtgtttgtctctagatactgacaaaaaaaacaccgctcttaaaaaaaaaactgcaggcttccttctggagctcgggtcataatccagtccgcgccgttgtgtgaagaagaaagcgacgacagcagcgaatgaatcacattgtaagggtccgtgttacatatgtttttgttttcttttgttctttttttttcatttcgttttgctgaggatgatggcatctgcgtgcgtagcttttggagtagagggttcaaaggtattgattgattctgtaaaccgtgtgaatgtgatagtccgggcgttttctcacacctcgaagaagagaatagtttgcctttgcttatttttttttttataaaaaaggggcccgcttttgtgtatcttaggcatacagttttacttgctttgtttttcttcaagtaaataagcatggattgtttttcttcttcttcttcccaaatatcaagcaaatagaaa

SEQ ID NO: 3692 - DNA, 2156 bp, Zea Mays
atgagaaccaatcctactacttcgcgtcccgggatttccacaattgaagaaaaaagcgtagggcgtattgatcaaattattggacccgtgctggatatcacttttcccccgggcaagttgccttatatttataatgctttgatagtcaagagtcgagacactgccgataagcaaattaatgtgacttgtgaggtacaacaattattaggaaataatcgagttagagctgtggctatgagtgctacagaggggttgatgagaggaatggaagtgattgacacgggaactcctctcagtgttccagtcggtggagctactctcggacgaatttttaacgttcttggggagcctattgacaatttgggtcctgtggatactagtgcaacatttcctattcatagatctgcgcctgcctttatcgagttagatacgaaattatctatctttgaaacaggtattaaggtggtcgatcttttagctccctatcgacgtggaggaaaaatcggactgtttgggggggcaggagtaggtaaaacagtactcatcatggaattaatcaataacattgctaaagctcatggaggcgtatccgtatttggcggagtaggggaacggactcgtgaaggaaatgatctttatatggaaatgaaggaatccggagtaattaatgaaaaaaatattgaggaatcaaaggtagctctagtctatggccaaatgaatgaaccgccgggagttcgtatgagagttggtttaactgccctaactatggcagaatatttccgagatgttaataagcaagacgtgcttttattcatcgataatatctttcgttttgttcaagcaggatcggaagtatccgccttattaggcagaatgccctccgcagtgggttatcaacctacccttagtacagaaatgggttctttgcaagaaagaattacttctaccaaaaagggatctataacttcgatccaagcagtttatgtacctgcagacgatttgaccgaccctgctcctgccacaacatttgcacatttggacgctactaccgtactttccagaggattagcttccaagggtatttatcccgcagtggatcctttagattcaacctcaactatgttacagcctcggattgttggcaacgaacattatgaaactgcgcaaagagttaaggaaactttacaacgttacaaagaacttcaggacattatcgcaattcttggattggatgaattatcggaggaggatcgtttaactgtagcaagagcacgaaaaatcgagcggttcttatcacaaccgttctttgtggcagaagtttttaccggttctccaggaaagtatgttggtcttgcagaaacaattaggggatttcaactaatcctttccggagaattagacggcctacccgaacaggctttttatttagtggggaacatcgatgaagctagcacgaaagctataaacttagaagaggagagcaaattgaagaaatgaaattaaatctttatgtactgactcctaaacgaattatttgggattgtgaagtgaaagaaatcattttatctactaatagtggccaaattggtgtattaccaaaccacgcccccattaacacagctgtagatatgggtcctttgagaatacgcctcctgaacgaccaatggttaacggcggttctgtggagtggttttgcaagaatagttaataatgagatcatcattttaggaaatgatgcagaactgggtagtgacattgatccagaagaagctcaacaggcacttgaaatagccgaagctaacttgagtaaagctgaaggtacgaaagaattggttgaagcgaagctagctctcagacgagctaggatacgagtcgaggctgtcaattggattcccccatccaattgaagacaatccaaagatttcgttgatacaaagaaaaaggaaagaagggtagaaaaagttattagatagcgaagcgaagtagtccaatgctatctagtatttttctacctactacctactattggatttgaaccaatgactcccgccgtatgaaagcaatactctaaccactgagttaagtaggcaatttatcaccacaaaagaagccccattacttcgatcgattatagattgaatcctttttataagcaa

SEQ ID NO: 3693 - DNA, 1939 bp, Zea Mays
atgataccctgtatgcgtccgattttcatcggcccccatccggccatccgccatcccccaaccccgttcttctccctccgtccgaccgtccctcgacagtgccgaggcgcaacctagcagccgcccacgcggcgcgacatccactggcgcaagcgcaatccgcaagggccccccggcgcgccgccagcctcctggctcggccgcccccgcggctaacccaggggcggaaaggccggccagccgcccacaccccatccggccagccaggcggaaacgacctgccgtgacgtgggaagacgtggagatccaacgaaaattagatttatttcttccttcttcggttcctcagcttgcgtaagatccgtctgggttgtccgccctccattggactacccaaggtgcggcgcatccaccaggtggaagatatctgcgtaagtcaaaacatagaataagagtggactgctattagttttccataggatggaatccttgtggaagctgacctacttgctcgacccggcatcagttgccctcattgccacagccatttctgtggcctatgcatcagcatcacgagctctggactatggcaaggagatggagagaaacttggatttttcagaggcttccattacattggatcgttcgcaggctctaatgattccccttgcaagctcgtgcagtctgttgctgatgttctacttgttctcgtctgtttcacatctcgtgacagcttttactgctgtggcctcagcattggcactgttcttttgcctgtctccacacatcacctatcttaaggcacgattcaatctaatggacccattcatgtccagatgttgttcgaagtcatttacacggttgcaaggtttgctgatgctcttctgcatagccacagtcttagcttggttggtttcagggcattggatgctaaataacctactggggatttccatatgtatagcgtttgtcagccatgtgaggcttcccaacataaagatctgtgcactgcttcttgcctgcttgtttgtgtatgatattttctgggtgttcttctcagaaaggttctttggagcaaatgtcatggtttctgttgccacccagaaggcatctaatcctgttcacacagtagcaaataagctcagcctgcctgggttgcaattgattacaaagaagctggagcttccagtcaagcttgtatttcctaggaatttgttgggtgggattgttccaggaagcaatcctggtgattacatgatgcttggccttggagacatggccattccagggatgcttctagctctggtactcttttttgataaccggaagttaaaggatgtgaacgttgttccatcagacgtgtctcccctgagacggcggaattatgtgtggtatgctctaacagggtatggtattggcttggtagctgcactagctgccgggatcttgtctcagtctccccaaccagccttactgtacctggtgccgtcaacactggggcctgtcatgtacttgtcatggttccggaatgagctgtgggagctatgggaagggtctggaactattctgaacgacaaagctcgtttgttggaggtctgagatccaagtggacaataagaaggatctgagctcaccgggattgaatcttaattaattattaaacattacttgagctcatactgaaagggagtatttataagctgagtgttctattcatgcatgtgagctactatctccgttctcaaatatttgttgcccactagttcatttttaaactagaccgcgacaaataaaaaagaacggagacagtactaagcagttgcccatcgtgaatcatgtaactgtttgtaatagaaaggttcagttcaatgcatttcagctttttttaccaataggttctcttgtctcaacaactgcttgatcgcaaggcagtgccgtg

SEQ ID NO: 3694 - DNA, 1948 bp, Zea Mays
atgataccctgtatgcgtccgattttcatcggcccccatccggccatccgccatcccccaaccccgttcttctccctccgtccgaccgtccctcgacagtgccgaggcgcaacctagcagccgcccacgcggcgcgacatccactggcgcaagcgcaatccgcaagggccccccggcgcgccgccagcctcctggctcggccgcccccgcggctaacccaggggcggaaaggccggccagccgcccacaccccatccggccagccaggcggaaacgacctgccgtgacgtgggaagacgtggagatccaacgaaaattagatttatttcttccttcttcggtccaacaggttcctcagcttgcgtaagatccgtctgggttgtccgccctccattggactacccaaggtgcggcgcatccaccaggtggaagatatctgcgtaagtcaaaacatagaataagagtggactgctattagttttccataggatggaatccttgtggaagctgacctacttgctcgacccggcatcagttgccctcattgccacagccatttctgtggcctatgcatcagcatcacgagctctggactatggcaaggagatggagagaaacttggatttttcagaggcttccattacattggatcgttcgcaggctctaatgattccccttgcaagctcgtgcagtctgttgctgatgttctacttgttctcgtctgtttcacatctcgtgacagcttttactgctgtggcctcagcattggcactgttcttttgcctgtctccacacatcacctatcttaaggcacgattcaatctaatggacccattcatgtccagatgttgttcgaagtcatttacacggttgcaaggtttgctgatgctcttctgcatagccacagtcttagcttggttggtttcagggcattggatgctaaataacctactggggatttccatatgtatagcgtttgtcagccatgtgaggcttcccaacataaagatctgtgcactgcttcttgcctgcttgtttgtgtatgatattttctgggtgttcttctcagaaaggttctttggagcaaatgtcatggtttctgttgccacccagaaggcatctaatcctgttcacacagtagcaaataagctcagcctgcctgggttgcaattgattacaaagaagctggagcttccagtcaagcttgtatttcctaggaatttgttgggtgggattgttccaggaagcaatcctggtgattacatgatgcttggccttggagacatggccattccagggatgcttctagctctggtactcttttttgataaccggaagttaaaggatgtgaacgttgttccatcagacgtgtctcccctgagacggcggaattatgtgtggtatgctctaacagggtatggtattggcttggtagctgcactagctgccgggatcttgtctcagtctccccaaccagccttactgtacctggtgccgtcaacactggggcctgtcatgtacttgtcatggttccggaatgagctgtgggagctatgggaagggtctggaactattctgaacgacaaagctcgtttgttggaggtctgagatccaagtggacaataagaaggatctgagctcaccgggattgaatcttaattaattattaaacattacttgagctcatactgaaagggagtatttataagctgagtgttctattcatgcatgtgagctactatctccgttctcaaatatttgttgcccactagttcatttttaaactagaccgcgacaaataaaaaagaacggagacagtactaagcagttgcccatcgtgaatcatgtaactgtttgtaatagaaaggttcagttcaatgcatttcagctttttttaccaataggttctcttgtctcaacaactgcttgatcgcaaggcagtgccgtg

SEQ ID NO: 3695 - DNA, 1975 bp, Zea Mays
atgataccctgtatgcgtccgattttcatcggcccccatccggccatccgccatcccccaaccccgttcttctccctccgtccgaccgtccctcgacagtgccgaggcgcaacctagcagccgcccacgcggcgcgacatccactggcgcaagcgcaatccgcaagggccccccggcgcgccgccagcctcctggctcggccgcccccgcggctaacccaggggcggaaaggccggccagccgcccacaccccatccggccagccaggcggaaacgacctgccgtgacgtgggaagacgtggagatccaacgaaaattagatttatttcttccttcttcggtgaggaactcaaaacttcccttctaggtccaacaggttcctcagcttgcgtaagatccgtctgggttgtccgccctccattggactacccaaggtgcggcgcatccaccaggtggaagatatctgcgtaagtcaaaacatagaataagagtggactgctattagttttccataggatggaatccttgtggaagctgacctacttgctcgacccggcatcagttgccctcattgccacagccatttctgtggcctatgcatcagcatcacgagctctggactatggcaaggagatggagagaaacttggatttttcagaggcttccattacattggatcgttcgcaggctctaatgattccccttgcaagctcgtgcagtctgttgctgatgttctacttgttctcgtctgtttcacatctcgtgacagcttttactgctgtggcctcagcattggcactgttcttttgcctgtctccacacatcacctatcttaaggcacgattcaatctaatggacccattcatgtccagatgttgttcgaagtcatttacacggttgcaaggtttgctgatgctcttctgcatagccacagtcttagcttggttggtttcagggcattggatgctaaataacctactggggatttccatatgtatagcgtttgtcagccatgtgaggcttcccaacataaagatctgtgcactgcttcttgcctgcttgtttgtgtatgatattttctgggtgttcttctcagaaaggttctttggagcaaatgtcatggtttctgttgccacccagaaggcatctaatcctgttcacacagtagcaaataagctcagcctgcctgggttgcaattgattacaaagaagctggagcttccagtcaagcttgtatttcctaggaatttgttgggtgggattgttccaggaagcaatcctggtgattacatgatgcttggccttggagacatggccattccagggatgcttctagctctggtactcttttttgataaccggaagttaaaggatgtgaacgttgttccatcagacgtgtctcccctgagacggcggaattatgtgtggtatgctctaacagggtatggtattggcttggtagctgcactagctgccgggatcttgtctcagtctccccaaccagccttactgtacctggtgccgtcaacactggggcctgtcatgtacttgtcatggttccggaatgagctgtgggagctatgggaagggtctggaactattctgaacgacaaagctcgtttgttggaggtctgagatccaagtggacaataagaaggatctgagctcaccgggattgaatcttaattaattattaaacattacttgagctcatactgaaagggagtatttataagctgagtgttctattcatgcatgtgagctactatctccgttctcaaatatttgttgcccactagttcatttttaaactagaccgcgacaaataaaaaagaacggagacagtactaagcagttgcccatcgtgaatcatgtaactgtttgtaatagaaaggttcagttcaatgcatttcagctttttttaccaataggttctcttgtctcaacaactgcttgatcgcaaggcagtgccgtg

SEQ ID NO: 3696 - DNA, 2015 bp, Zea Mays
atgataccctgtatgcgtccgattttcatcggcccccatccggccatccgccatcccccaaccccgttcttctccctccgtccgaccgtccctcgacagtgccgaggcgcaacctagcagccgcccacgcggcgcgacatccactggcgcaagcgcaatccgcaagggccccccggcgcgccgccagcctcctggctcggccgcccccgcggctaacccaggggcggaaaggccggccagccgcccacaccccatccggccagccaggcggaaacgacctgccgtgacgtgggaagacgtggagatccaacgaaaattagatttatttcttccttcttcggtgaggaactcaaaacttcccttctaggttcctcagcttgcgtaagatccgtctgggttgtccgccctccattggactacccaaggtggaagatatctgcgtaagtcaaaacatagaataagagtggactgctattagttttccataggatggaatccttgtggaagctgacctacttgctcgacccggcatcagttgccctcattgccacagccatttctgtggcctatgcatcagcatcacgagctctggactatggcaaggagatggagagaaacttggatttttcagaggcttccattacattggatcgttcgcaggctctaatgattccccttgcaagctcgtgcagtctgttgctgatgttctacttgttctcgtctgtttcacatctcgtgacagcttttactgctgtggcctcagcattggcactgttcttttgcctgtctccacacatcacctatcttaaggcacgattcaatctaatggacccattcatgtccagatgttgttcgaagtcatttacacggttgcaaggtttgctgatgctcttctgcatagccacagtcttagcttggttggtttcagggcattggatgctaaataacctactggggatttccatatgtatagcgtttgtcagccatgtgaggcttcccaacataaagatctgtgcactgcttcttgcctgcttgtttgtgtatgatattttctgggtgttcttctcagaaaggttctttggagcaaatgtcatggtttctgttgccacccagaaggcatctaatcctgttcacacagtagcaaataagctcagcctgcctgggttgcaattgattacaaagaagctggagcttccagtcaagcttgtatttcctaggaatttgttgggtgggattgttccaggaagcaatcctggtgattacatgatgcttggccttggagacatgtggtgagaagccttctcactgagccaaaggtcctgggttcgacgcagcctctctgaaaaatgcaggggccattccagggatgcttctagctctggtactcttttttgataaccggaagttaaaggatgtgaacgttgttccatcagacgtgtctcccctgagacggcggaattatgtgtggtatgctctaacagggtatggtattggcttggtagctgcactagctgccgggatcttgtctcagtctccccaaccagccttactgtacctggtgccgtcaacactggggcctgtcatgtacttgtcatggttccggaatgagctgtgggagctatgggaagggtctggaactattctgaacgacaaagctcgtttgttggaggtctgagatccaagtggacaataagaaggatctgagctcaccgggattgaatcttaattaattattaaacattacttgagctcatactgaaagggagtatttataagctgagtgttctattcatgcatgtgagctactatctccgttctcaaatatttgttgcccactagttcatttttaaactagaccgcgacaaataaaaaagaacggagacagtactaagcagttgcccatcgtgaatcatgtaactgtttgtaatagaaaggttcagttcaatgcatttcagctttttttaccaataggttctcttgtctcaacaactgcttgatcgcaaggcagtgccgtg

SEQ ID NO: 3697 - DNA, 2089 bp, Zea Mays
atgataccctgtatgcgtccgattttcatcggcccccatccggccatccgccatcccccaaccccgttcttctccctccgtccgaccgtccctcgacagtgccgaggcgcaacctagcagccgcccacgcggcgcgacatccactggcgcaagcgcaatccgcaagggccccccggcgcgccgccagcctcctggctcggccgcccccgcggctaacccaggggcggaaaggccggccagccgcccacaccccatccggccagccaggcggaaacgacctgccgtgacgtgggaagacgtggagatccaacgaaaattagatttatttcttccttcttcggtccaacaggttcctcagcttgcgtaagatccgtctgggttgtccgccctccattggactacccaaggtgcggcgcatccaccaggtggaagatatctgcgtaagtcaaaacatagaataagagtggactgctattagttttccataggatggaatccttgtggaagctgacctacttgctcgacccggcatcagttgccctcattgccacagccatttctgtggcctatgcatcagcatcacgagctctggactatggcaaggagatggagagaaacttggatttttcagaggcttccattacattggatcgttcgcaggctctaatgattccccttgcaagctcgtgcagtctgttgctgatgttctacttgttctcgtctgtttcacatctcgtgacagcttttactgctgtggcctcagcattggcactgttcttttgcctgtctccacacatcacctatcttaaggcacgattcaatctaatggacccattcatgtccagatgttgttcgaagtcatttacacggttgcaaggtttgctgatgctcttctgcatagccacagtcttagcttggttggtttcagggcattggatgctaaataacctactggggatttccatatgtatagcgtttgtcagccatgtgaggcttcccaacataaagatctgtgcactgcttcttgcctgcttgtttgtgtatgatattttctgggtgttcttctcagaaaggttctttggagcaaatgtcatggtttctgttgccacccagaaggcatctaatcctgttcacacagtagcaaataagctcagcctgcctgggttgcaattgattacaaagaagctggagcttccagtcaagcttgtatttcctaggaatttgttgggtgggattgttccaggaagcaatcctggtgattacatgatgcttggccttggagacatggtaagcacaataaattgtattcttgcaatatttcatgcttttattttggttttagtcctcttttcctggcgcagtggtgagaagccttctcactgagccaaaggtcctgggttcgacgcagcctctctgaaaaatgcaggggccattccagggatgcttctagctctggtactcttttttgataaccggaagttaaaggatgtgaacgttgttccatcagacgtgtctcccctgagacggcggaattatgtgtggtatgctctaacagggtatggtattggcttggtagctgcactagctgccgggatcttgtctcagtctccccaaccagccttactgtacctggtgccgtcaacactggggcctgtcatgtacttgtcatggttccggaatgagctgtgggagctatgggaagggtctggaactattctgaacgacaaagctcgtttgttggaggtctgagatccaagtggacaataagaaggatctgagctcaccgggattgaatcttaattaattattaaacattacttgagctcatactgaaagggagtatttataagctgagtgttctattcatgcatgtgagctactatctccgttctcaaatatttgttgcccactagttcatttttaaactagaccgcgacaaataaaaaagaacggagacagtactaagcagttgcccatcgtgaatcatgtaactgtttgtaatagaaaggttcagttcaatgcatttcagctttttttaccaataggttctcttgtctcaacaactgcttgatcgcaaggcagtgccgtg

SEQ ID NO: 3698 - DNA, 877 bp, Zea Mays
caaagcttaaaatgtttgacttaagacatcctcaaaatgacttgctttagggaactggagggagtatgtctcaaaacataattcaaatgggacgatgtgaaggttgacaagcatcgggagaattaccttggtcatagtgttaaggctccggttggtagatggcagaaaggaaaggatctttactggtatactcgggataagaaatccgacacggaagatgctcttaaggaagaaatcaggagagtgaaggaagaggaggaacaggctatgcgtgaggctcttggcttagctcctaagcgcagcaatcgaactcagggtaatcgcttggataagcatgaatatgctgagctgattaagagaggatcaactgcggaggacttgggagcagggcacgctgaagcagcacaagtgcagggtctaggattgtacaaggcccctcgcgatgagggtggatcaagttctttgagccttgaccctcaaatggagcctgagcaggctgaacccctactagcacccaagcaggaggatgatttggaagataataggaaggggaaaaggccacgtgaacgtgacgagaagagaggggagaaggagcggaaacgagacaggcatggtgatggaaaggagaggaggcgggacaagcacgagaggaggcacgacttggaggacagatcaaagcggcaccgcaaagacaagcagaagaggaggcacgattccgattctgattgataacggccctgcgcctgctcctgtatgactactgtatactgcgaaatttcaaacccatggagccgcttttgtttgatgtatgcctacgctttaaattatgtttgccctaatgatgtttaaggataaaatggcccgtatgctcctctcc

SEQ ID NO: 3699 - DNA, 744 bp, Zea Mays
gtcacttctgtgcttacagtggcttggaatggcagagaaaggatctttactggtatactcgggataagaaatccgacacggaagatgctcttaaggaagaaatcaggagagtgaaggaagaggaggaacaggctatgcgtgaggctcttggcttagctcctaagcgcagcaatcgaactcagggtaatcgcttggataagcatgaatatgctgagctgattaagagaggatcaactgcggaggacttgggagcagggcacgctgaagcagcacaagtgcagggtctaggattgtacaaggcccctcgcgatgagggtggatcaagttctttgagccttgaccctcaaatggagcctgagcaggctgaacccctactagcacccaagcaggaggatgatttggaagataataggaaggggaaaaggccacgtgaacgtgacgagaagagaggggagaaggagcggaaacgagacaggcatggtgatggaaaggagaggaggcgggacaagcacgagaggaggcacgacttggaggacagatcaaagcggcaccgcaaagacaagcagaagaggaggcacgattccgattctgattgataacggccctgcgcctgctcctgtatgactactgtatactgcgaaatttcaaacccatggagccgcttttgtttgatgtatgcctacgctttaaattatgtttgccctaatgatgtttaaggataaaatggcccgtatgctcctctcc

SEQ ID NO: 3700 - DNA, 1215 bp, Zea Mays
  misc_feature (1215)..(1215): n is a, c, g, or t
ttcacgattaactcacaacgaaggcaacgactaggctcggaattaatccccacccgttttcccttccaaactccaaagacacgattgtagttggattaattcccaccccacaaccccccaccacaagaacttgttcgatcgaattcttcttcaactacccgccgcgggaacccaaggaaggaggcaaagcaaaggcttctcgcaggttcgcatcctccggaaccatccactcctctcatcccgctcggagtttgacctctcccgacctgagatccgattgaatcgggtttcccgtcagcggcttctgcggcgggcgccatgaacagcagcaagcaggcgctgatttacagcttcgtggccaagggctccgtcgtgctggcggagcacacggccttctccggcaacttcagcaccgttgccgtccagtgcctccagaagcttccccccaacagcaccagatccacctactcctgtgacggccacaccttcaacttcctcgtcaaccgcggcttcgtgttcctagtggtcgccgatgaggcggccgggaggagcgtccccttcgtcttcctagagagggttagggaagacttcatgcagcggtatgggtccagtatcgatgaggaggggcagcacccgctcgctgatgatgctgatgaggatgactttctgttcgaagaccggttcagcattgcctacaaccttgaccgtgaattcggcccgaggttgaaggaccatatgcagtattgtgttaatcatccagaggaaattaacaagctctccaaggtgaaagcccacctatcggatgtcaaagggatcatgatggacaacattgagaagatattggatcgcggggagaagattgagcttttggtgggtaagacagagaccctacagtcacaggcggacagcttccacaggcatggcagagagttgaggcgaaagatgtggcttcagaacctgaggtttaagctgatggtgggtggcggcattgcggctctgatccttatcatttggctgatggtctgcaggggattcaaatgttagagcacaccaagttgctcgccttttttttttcttttcaggcgtttgatatgcacagactttcaaccaaattgtgttttcagtgtcacggtatcgcaatgtagtggacttcaatccccgcagtctttcccatgttccattacttccatatgataatggtaaaaggtaggaagn

SEQ ID NO: 3701 - DNA, 3881 bp, Zea Mays
ctccccaaatttcgaattctccctctcccccacccgcaccgcaccccgctcctccccctctggacgctgacatttcgaattctccctctcccttccccaccgccgccagccgctcttcgccgtcgcgtgcgccatgtcgtcgcggctggacaaggagaaggcggtgaacgtgcaggtcctcctccgctgcaggccgttcagcgacgatgaggtccgaagcaacgcgccgcaggtcatcacctgcaacgactaccagcgggaggtcgccgtcacgcagagcatcgccgggaagcagttcgaccgggtcttcaccttcgacaaggtttttggaccgacagcaaagcagaaggacttgtatgaccaagccattattcctatcgtcaatgaggtcttggagggtttcaattgcaccatatttgcgtacggccagacaggcactggaaaaacatacaccatggaaggcgagtgcaggagggccaagagtgggccaaaaggtcaattacctgctgacgctggagttatacctcgggcagtgaagcaaatctttgatactttggagaggcagaacaccgagtacagtgttaaggtcacgtttcttgagctgtacaatgaggaaattacagatcttcttgcacctgaagagatatctaaggccacatttgaggatagacagaagaaaaccttacctcttatggaggatgggaagggcggagttcttgttcgaggtctagaggaagaaattgtcacgaatgcaagtgaaatattctctctattagaaagggggtctgcaaagcgccgcactgcagagacattactgaacaagcaatccagtcgatcgcactccctgttctcaatcactattcacataaaagaggcaacccctgaaggagaagaactgataaaatgtggaaaactgaatctagttgacttggctgggtctgagaacatctcccgttctggagctaaggagggccgcgcaagggaggctggcgaaatcaataaaagcttgcttactctgggccgtgtgattacggcactggtagaacaccttggtcatgttccttacaggaggaagaacaaagacttgcattattgctactgtttcaccctccgtgcattgcctcgaagaaaccttgagtactttggattatgcacaccgggcaaagagcattaagaacagacctgaggtaaatcagaaaatgatgaaatcaacattaattaaagatctttatggtgaaattgaccgacttaaggcagaggtatacgctgctcgagaaaaagttggagtgtacattcctaaagacagatatcagcaggaggaaaatgagcgaaaggcaatggctgatcaaatagaacaaatgaatgcttctttggaagcaaaccagaagctaattagtgacctgcaagaaaagtatgattctgagcttcgacattctgctgatttgagcaaaaagcttgaagtcacggagaaatgtatggaccacacaagcaacctactctctgcgacaaaagaagatctgaaacaggcacagtataatctaaaggagaaagattatataatttccgagcagaaaaaagcagaaaatgctttaacacaccaagcttgtgtgctgagatcagacttggaaaaatatactcgcgataatacttcactgtattcaaaaattgctagaggagacaagctaagtgcaacaaacaggtcggtcgtgaatacattccaaactgaccttgcttcgaagttggatactctttccaatacactcaatgcatcaatagaccagcaaaatatgcacctaaaagctgtggaggatttatgccaatcctgtgttgattcccatgacagggctacttctgagctgaaaaagaagattttggcttcaaaatcattatacatgtcacatatggaagctttccaaaatgttgtcctcctacataaagcaagtgcaaatgccacactagaagatatatcatcactgtctgctacaagctgctgtagtcttgatcagctactagtttgtgttgagggagaggctcaaaatatatttaatgacatccataaattgttaaccacacaccgaagcgaaatgacacacttcactcaacaattaagggagagtttccaaataagcttggacaggacaaaagaaatgtctacctatattattgggctctttgacaagtatgttgaggagacctccaaattgcagagtcactcaaataatactcatgaagcacaaatgaaaagcattgaagattttcagatggtttacgaggagcaatcaaaatcagaggagcagaagcttctagcggacattagcagtttagtgtctaaacatattactcgacagagagagttggtgggagttagattgagctctctgggtgatgctgcccgtggaaacaaggcatttttggatgaacacacatcggccatggagtttgtcacaaaagatgctaagaggaagtgggaaacatttgcagagcaggctgagaatgactgcaaagctggctccagctcttctgcagtcaagcattgccgcatggaaaccatgcttcaggagtgcgcatgcactgttgactccgcagttcagcaatggaagaagtcacatgctgctgtcaacgatctcagcagaaagcaagttgctgaagttgaagcactcgtcaggactgcaattgagaacaatgagcaacatgaagtggaagttgcatcttctcgagctgtggctgaagaagacaccaccaatagcagcaaggacatagcccagggcgttgaaaatctgttggaaaaggcacagaaatctagttcaagagtggtctcaatggtggaggctcacttcgcagagctacagaagctgcaagagagccactccacccaggctaccggtatcaacatgcacgcagacaagtctttccaaaccagttacaaggactacgagccgacgggtgaaactccagtgaggtctgagccgaacgtgccaagcaaaggctcgatcgagtcgctgcgagccatgcccatggagaccttgatgaacgagttccgtgagaaccatccgtatgaatctgaatcgagcaaagaatccaagttatctcagatccctcgcttgccgctcagcatcagaaatttgcccaagaattgcactggagtctgaatgctgcattgcattgtgcgaacaataaaaaaaattcaagcgaggtagagctgcatctccgagcggttctcctgctcgacgacctccaggaagacggggtcgacagtgatgtggctgtcgatgcggacggagaaggggcgggaccagagcagcaccgcggcctcgccggcgatctcgacggccgcgtctagctccatgtggcggcgcgcgacgtcggagaggagggcgcgggcgcggtgcgcgagctcgacgccgtcgaggcgcgccgggaggtggagcaggcggcaggaggtggcgggctgctcgccggcgtcgaggcgggcggtgccgaggtgcgcgccgccgtagaggatggagacggtggagggcccgtagcgcacgggcacgacgttggggttggtggcgtgcacggtgagggtgagcccgatgtccagcgccgccggcgggcggaagtggaaggcggacaggctgatggagatgagctcgaaccgcgggtcccgcggccggcacagcactagggccgtggcggcggccgtcgtcgccgcgcccgccagcgccgagccccagctccaccgcctgtgcgatggcggggacgacgcgctgcccatggcgtgagacgcgcgtggggtggtggccggtgggcggtagcccttgttgggatctgggaagcctggaggtggtggttctgatgtgtgtaggcgaaggctttggtgacggcgacctgatccacac

SEQ ID NO: 3702 - DNA, 916 bp, Zea Mays
ctctgacgcggacttcggcccactactcgcccgacagctactgtctccgttcatgcggcggccacctacctatacctcgtagcaagacaccatatcttaagtgctgccatggatttgcacctagagctctacattggtcgccggcgccgcggcggaggcaagactcagaactcagaagtaccctcccatgggagtccacttctgtcggcttgatggagcacctgatggatggagaggagctcgcccaacaggtgaaacctctgctgactgggacaaggcatggtctgccttcaagaagaaagggaagaggaccctgttttctgatttctcaccggacaagtacgtgacctggaacccacggcgcagcgagtatccattgtcagaagaggtcgatccaatcaagagaactgaaagatctaacttgatgttgtggacaagcccccagttcaccttggtcggggcgattatcatcgtcttgacattgctaatctatacactagttgttcctcctcccaagtaactgcagaggtgacaactactggggggggggggggggggtgagctgtaaactagtactatttcaactgggaagtctgtattgtacatttttacgtgtactatggcaactcactatagcagtattgattcaattgcaatcatgtagatacaacaccactgtccattccattctggaggtttttcttcaattgtgtgctaaatggctgctgtctgagtcttatattcacttgttataatgaagaaatatttggggtcaggtagaattatatgttggtcgactcctgatgtgtgtttctaaacagcaacttaccaatcctatctcccaccacatacatatttcaaacttcactatgtaaacaatgcagcgtaaaatagtgtaaacaatgcagcgtaaaat

SEQ ID NO: 3703 - DNA, 855 bp, Zea Mays
tgggagtccacttctgtcggcttgatggagcacctgatggatggagaggagctcgcccaacagaatcttggcggacagccatatatggatgtactgctaggttccgggaggttcttggcgcgacggcctcccctcgcgctcgtccctcgctgctctcgaggctccccggacaaaagcggcagcgacaaaggtgaaacctctgctgactgggacaaggcatggtctgccttcaagaagaaagggaagaggaccctgttttctgatttctcaccggacaagtacgtgacctggaacccacggcgcagcgagtatccattgtcagaagaggtcgatccaatcaagagaactgaaagatctaacttgatgttgtggacaagcccccagttcaccttggtcggggcgattatcatcgtcttgacattgctaatctatacactagttgttcctcctcccaagtaactgcagaggtgacaactactggggggggggggggggggtgagctgtaaactagtactatttcaactgggaagtctgtattgtacatttttacgtgtactatggcaactcactatagcagtattgattcaattgcaatcatgtagatacaacaccactgtccattccattctggaggtttttcttcaattgtgtgctaaatggctgctgtctgagtcttatattcacttgttataatgaagaaatatttggggtcaggtagaattatatgttggtcgactcctgatgtgtgtttctaaacagcaacttaccaatcctatctcccaccacatacatatttcaaacttcactatgtaaacaatgcagcgtaaaatagtgtaaacaatgcagcgtaaaat

SEQ ID NO: 3704 - DNA, 1148 bp, Zea Mays
caattattaattttgaggggaaaaatcgtacgtacattattaattaataacattcggagtcaagtcaatattatgcatcagtaacattgtataaaaaattagacaccttactttgatgtatgttacatgatttaatcatgaacaaataaataaataaacggggaatgggaggtaattatggtggttgaaagaaaaaacgatattttatggtggcggaaataaataacggggaatgagaaatttagaagatagccttagcttccgttgttttatccgcagccacaagttttgctctgcgtctcccaagttcccgatctcggccgcgcgagtcagtgcaccccgtgcgtgatcaacagaatcttggcggacagccatatatggatgtactgctaggttccgggaggttcttggcgcgacggcctcccctcgcgctcgtccctcgctgctctcgaggctccccggacaaaagcggcagcgacaaaggtgaaacctctgctgactgggacaaggcatggtctgccttcaagaagaaagggaagaggaccctgttttctgatttctcaccggacaagtacgtgacctggaacccacggcgcagcgagtatccattgtcagaagaggtcgatccaatcaagagaactgaaagatctaacttgatgttgtggacaagcccccagttcaccttggtcggggcgattatcatcgtcttgacattgctaatctatacactagttgttcctcctcccaagtaactgcagaggtgacaactactggggggggggggggggggtgagctgtaaactagtactatttcaactgggaagtctgtattgtacatttttacgtgtactatggcaactcactatagcagtattgattcaattgcaatcatgtagatacaacaccactgtccattccattctggaggtttttcttcaattgtgtgctaaatggctgctgtctgagtcttatattcacttgttataatgaagaaatatttggggtcaggtagaattatatgttggtcgactcctgatgtgtgtttctaaacagcaacttaccaatcctatctcccaccacatacatatttcaaacttcactatgtaaacaatgcagcgtaaaatagtgtaaacaatgcagcgtaaaat

SEQ ID NO: 3705 - DNA, 963 bp, Zea Mays
cgcttccttggagttgatttatccgctgcagccatgagtaagttgcagtctgagtctgtcaaggatgccatctcccagattgttggggatgccaaggagaagaataggaagttcactgagactgtggaacttcagattggtctgaagaattatgatccacagaaggacaagcgtttcagtggctctgttaagttgccccatatccctcgtcccaagatgaaggtgtgcatgcttggtgatgcccagcatgttgaggaggccgagaagatgggacttgactacatggatgttgaggctctcaagaaaatgaacaagaacaagaagcttgttaagaggcttgccaagaagtaccatgctttcttggcatcagaggccatcatcaagcagattccccgtctccttggtcctggtctcaacaaggcaggcaagttcccgaccctggttactcaccaggaatccctcgagtccaaggtgaacgagactaaggcaaccgtcaagttccagctcaagaaggttctttgcatgggtgttgccgttggcaacttggcgatggaggagaagcagatccagcagaacatccagatgagcgtcaacttccttgtttcccttctgaagaagaactggcagaatgtgagatgcctctacgtcaagagcaccatggggaagccatacagggtgttctaagtatgctcttttgtgaagtctgctaggttctggcaccgaggttttattgaattaaacttttgttaagagtatgtttttggacgatcctatatttcgtcctggcgctactatgtttcagaatggtggtactactataagtatcctggcgctttaagtattgcttgaaaggatcaatataatttgcgtgtcatacccacaaccttttctgccatggttgttccgccctcgtattatctacatggtagcgccctcgtaggtcacaaatctagcctagtaata

SEQ ID NO: 3706 - DNA, 960 bp, Zea Mays
atggagaagagaaatcggattctcgacctgcaggacctcctctctgacgcggacttcggcccactactcgcccgacagctactgtctccgttcgtgcggcggccacctacctacctcgtagcaagacaccatatcttaagtgctgccatggatttgcacctagagctctacattggtcgccggcgccgcggcggaggcaagagtcagaagtaccctctcccatgggaggcaccgtgttccagctgctccacttctgtcggcttgatggagctcctgatggatggagaggagaggagctcgcccaacagaatcttggcggccagccatatatggatgtactgctaggttccgggaggttcttggcacgacggcctcccctcgcgctcgtccctcgctgctctcgaggctccccggacaaaagcggcagcgacaaaggtgaaacctctgctgattgggacaaggcatggtctgccttcaagaagaaagggaagaggaccctgttttctgatttctcaccggacaagtacgtgacctggaacccacagcgcagcgagtatccattgtcagaagaggtggatccaatcaagagaactgaaagatctaacttgatgctgtggacaagcccccagttcaccttggtcggggcgattatcatcgtcttgacattgctaatctatacactagttgttcctcctcccaagtaactgcagaggtgactactactaggggggggggggggggtgagctgtaaactagtagtatttcaactgggaagtctgtattgtacattttttacgtgtgctatggcaactatagcagtattaattcaattgcgatcatgtagatacaacaccactgtccattccattctggaggttttcttcaattgtgtgctaaatggctgctgtctgagtcttatattcacttattataatgaagaaatatttggggtcaggtaga

SEQ ID NO: 3707 - DNA, 2009 bp, Zea Mays
ataataatcacgtcctggccagacaacatcaccaacaaccacatctgcatctcccgtcatctactcgaactcaactcatcgcctcatccgtgtctcatcccattccgtctccgtctccgtctgaactctccatctataaagcttctctgaggcacaagacgagaaggccacagcccacaaagcatgcccggcgagttggaaaagcgcagaatctgcgagacaagaaagcaataggaagggagaaacagggagagaggttgcgtcccagccccacctgccatcgcctcttcttccgctccctcggcggctttccaagattcagattcagattgggggccttttgctgctgcgcggcaattctcgtcgctccagtccccacttcactgttcctgagcgggaggcaccggccggactcgcgatggggcaggacggccagcagatccgccgcgacaagctcatcatcgacacggatcccggcatcgatgatagcatgacgatcctaatggcgttcagagcacctagtgtggaaatcattgggctcacgaccatattcggcaacgtcgacacaaagggcgcaacacgtaacgcgctattgctgtgtgagagagcaggatgccctgaagttccagtagcagagggcagccatgagcccctaaagggaggaaagccccgtgttgctgatttcgttcatgggtcagatggcattgggaatctgtttcttcctgcaccctctgctaagaaggttgaggaaagtgctgctgatttcctgattaataaggtctctgagtttccaggagaggtctctgtgcttgcgttgggacccctgacaaatgtagcattggccatcaaaagagacccttcctttgcaagcaaggttaagaaaatagttgtactgggtggagctttctttgcggctggaaatgtcaaccctgctgctgaagcaaatatccatggagacccagaagcagctgacatagtttttacttcaggagcagatatcgttgtggttggcattaacataacaacacaagtctgcctgacagatgaggatctcttggagctaagaaactcgaaagggaagcatgcagcgttcttatatgagatgtgcaagttctacagagattggcatgccaagtctgatggttttcatggaattttccttcatgatcctgtgagcttcactgccgtacttcatccagagtacttcacattcaagaagggtgtggtgagagtagagacccagggcatttgcactggccacactttgatggatcagggattgaaaaagtatgtttttttttctctctgagtaactcataaaagattgacccgtctgatgttttttagtttcagcattcttacatacaccacattgatatgacataaatctcaccaaattactttataacttttggagtaagcaaaccaaggcaaaagttaccccacatgatctatatgtttcagcagatttcacacttgtttcttcttgttcctcctatgctgcaggtggaattcagagaacccatggtcagggtataaaccgatttcagttgcatggacggttgatgtgccaaaggtcatcagctttataaagaagctgctcatggcaccatgagcaaagtacaaccatttaacgacgtgtcgacatcagcgctctctgatgtccaagaaaatttgacgagtacagatgctctttctcagttgcactgtaattagttcctggacctaggatgattcctattcctccaatagtaagaggaacctttcattgtgaaaggtcatgcagcagtctcgaataccatgaagcaaattctggcatacgacatcatgtctcacacatttgtatcaatacatttcgaatcaataaagtttccctcactctttactgtgcacttttctcaaagatcacaatcttgttgtaatgtgcctctcatgtaaagcaaagtaccaataaggcatatgatagttttgatacaacattcttctgtctgacactactttctgatcag

SEQ ID NO: 3708 - DNA, 1829 bp, Zea Mays
cttctcttcgctgctgagtaatcgatcactcgactcgacagtgggcagtaaagctaaaatcgtatcgtgtctcactataatctgcttagcaacactgctgtcctattaggtccgcagtcgtgctttttccttttcttttcaccaatcaatttccggtcacgcgcctgctacaatctgacagcacagttactgatgctacaagatgatagcatgacgatcctaatggcgttcagagcacctagtgtggaaatcattgggctcacgaccatattcggcaacgtcgacacaaagggcgcaacacgtaacgcgctattgctgtgtgagagagcaggatgccctgaagttccagtagcagagggcagccatgagcccctaaagggaggaaagccccgtgttgctgatttcgttcatgggtcagatggcattgggaatctgtttcttcctgcaccctctgctaagaaggttgaggaaagtgctgctgatttcctgattaataaggtctctgagtttccaggagaggtctctgtgcttgcgttgggacccctgacaaatgtagcattggccatcaaaagagacccttcctttgcaagcaaggttaagaaaatagttgtactgggtggagctttctttgcggctggaaatgtcaaccctgctgctgaagcaaatatccatggagacccagaagcagctgacatagtttttacttcaggagcagatatcgttgtggttggcattaacataacaacacaagtctgcctgacagatgaggatctcttggagctaagaaactcgaaagggaagcatgcagcgttcttatatgagatgtgcaagttctacagagattggcatgccaagtctgatggttttcatggtatttgaaattaataatatactactgttatatgcttttgccaattaccatcaaatatgagaagaaacacgcttctgacagaaaatcgctttctgttcaggaattttccttcatgatcctgtgagcttcactgccgtacttcatccagagtacttcacattcaagaagggtgtggtgagagtagagacccagggcatttgcactggccacactttgatggatcagggattgaaaaagtatgtttttttttctctctgagtaactcataaaagattgacccgtctgatgttttttagtttcagcattcttacatacaccacattgatatgacataaatctcaccaaattactttataacttttggagtaagcaaaccaaggcaaaagttaccccacatgatctatatgtttcagcagatttcacacttgtttcttcttgttcctcctatgctgcaggtggaattcagagaacccatggtcagggtataaaccgatttcagttgcatggacggttgatgtgccaaaggtcatcagctttataaagaagctgctcatggcaccatgagcaaagtacaaccatttaacgacgtgtcgacatcagcgctctctgatgtccaagaaaatttgacgagtacagatgctctttctcagttgcactgtaattagttcctggacctaggatgattcctattcctccaatagtaagaggaacctttcattgtgaaaggtcatgcagcagtctcgaataccatgaagcaaattctggcatacgacatcatgtctcacacatttgtatcaatacatttcgaatcaataaagtttccctcactctttactgtgcacttttctcaaagatcacaatcttgttgtaatgtgcctctcatgtaaagcaaagtaccaataaggcatatgatagttttgatacaacattcttctgtctgacactactttctgatcag

SEQ ID NO: 3709 - DNA, 1329 bp, Zea Mays
cacagttactgatgctacaagatgatagcatgacgatcctaatggcgttcagagcacctagtgtggaaatcattgggctcacgaccatattcggcaacgtcgacacaaagggcgcaacacgtaacgcgctattgctgtgtgagagagcaggatgccctgaagttccagtagcagagggcagccatgagcccctaaagggaggaaagccccgtgttgctgatttcgttcatgggtcagatggcattgggaatctgtttcttcctgcaccctctgctaagaaggttgaggaaagtgctgctgatttcctgattaataaggtctctgagtttccaggagaggtctctgtgcttgcgttgggacccctgacaaatgtagcattggccatcaaaagagacccttcctttgcaagcaaggttaagaaaatagttgtactgggtggagctttctttgcggctggaaatgtcaaccctgctgctgaagcaaatatccatggagacccagaagcagctgacatagtttttacttcaggagcagatatcgttgtggttggcattaacataacaacacaagtctgcctgacagatgaggatctcttggagctaagaaactcgaaagggaagcatgcagcgttcttatatgagatgtgcaagttctacagagattggcatgccaagtctgatggttttcatggaattttccttcatgatcctgtgagcttcactgccgtacttcatccagagtacttcacattcaagaagggtgtggtgagagtagagacccagggcatttgcactggccacactttgatggatcagggattgaaaaagtggaattcagagaacccatggtcagggtataaaccgatttcagttgcatggacggttgatgtgccaaaggtcatcagctttataaagaagctgctcatggcaccatgagcaaagtacaaccatttaacgacgtgtcgacatcagcgctctctgatgtccaagaaaatttgacgagtacagatgctctttctcagttgcactgtaattagttcctggacctaggatgattcctattcctccaatagtaagaggaacctttcattgtgaaaggtcatgcagcagtctcgaataccatgaagcaaattctggcatacgacatcatgtctcacacatttgtatcaatacatttcgaatcaataaagtttccctcactctttactgtgcacttttctcaaagatcacaatcttgttgtaatgtgcctctcatgtaaagcaaagtaccaataaggcatatgatagttttgatacaacattcttctgtctgacactactttctgatcag

SEQ ID NO: 3710 - DNA, 951 bp, Zea Mays
atgagggagctgtcctgcttcggcgacggctccgtcagcgtggccacggccgacgccgccgtctccggccgcggcgcgctcgaccgggcgctgcaggcggccaccaccagcgtgtacagggccgcgctgtcctcgggcaaggaggtgctcgtccgggtgacgtggacccggagcgcggccggagaggccggcgtcgcggtcgccttcgacttcgatgacgacggcggcggcggcacctccgacgcgccgaagccgtcgccggcccggacgaggcctcctgtcctcctgctgcacaagagaagagggagccggtcgctggtcaccggcgccggcacggccgtcggcgtgcactgggacaccgcggaggccaagtacccgtcgccttcgtccccggagcccgaacgcgactactgcctcgccgtcgtggccgacgccgagctcgcgctcctcctcggcgcgggcggcgcggcgcgcgagctctcccgccgcctcggcctcgcaccgagcgctcgcgccgcgcccgcgctcctcgtcagccggcgggagcagctgcgctgcgcggcagcggcggcggcggcgcacgtcacgcgctgcaggttccgcgagggcggggacgagcacgaggtggccgtgcacgcgtgcaggggcggggagggggagctgcgggtcaccatcgacggcgagaaggtgacggaggtgcggcgggtgggctggggcttccggggcaaccgcgccgccgtgctgcccgacggagaggtggtcgacgtcatgtgggacgtgcacgactggtggttcggtgggcggggtggcggcagcgcgggctcgggggcgcagttcatggtgaaggctagggcggagaaggagggcaggctgtggatggccgacgacacagctgccacagagcagtcgcccggcggcttcttcttgcatgtgcagtgctaccgccggtga

SEQ ID NO: 3711 - DNA, 342 bp, Zea Mays
cgtggacccgagttgtcagccgcgaatccaaccaccttgcccgtccatggcggaagcgcccgcggactccgtggcgcgagctcaacgacctcgcgatgtgcttccgggggaatcgggtcgacctcctccgcgcttgtggttaaaagctggagcccttgagttcttctcgccttccccttgttccctaggcgaccgtgttgacacgcgcagacgctaacagtgagggctccaagaccggctcgggagcttcaccttgaattcgggagggatcgaacgacgtagcggcacggattcctcgccggaggtcccaccgccacgggaagccgcccatcgccgcgtccg

SEQ ID NO: 3712 - DNA, 666 bp, Zea Mays
cgacggtgaaactggtccctcagagcgtcccgaggtcctagtcatggagcgtattgtgcttcattctggtgaggggagcagtgctatcatccccgttaggagcaatccctacacgtggggagggccacaacacacgtggcaagactgcgctgccccaggggacaagcccgtgttcaccctcgacgaccaggagaagacgcagctatggcaggacttccaggtcatcggccagcttacggcgaagagcgcgaccaagtgtgtgttcctccatcgtgagcgtggtgtctgggagtgggactcgctgcgtcaccagaagggcctgcttgcccaagcaaacgagcagcttgctcagaagagcactgaagcagcggatctctgggcactttactcgaagctgaaggaagaggctgcctcggtacggggagaagtggctcctctggccgagagggtaagcgagatggaggaggatcttagcaggatattcggtaagcgggagaaattctagaaccaggccgtggaaaccttttcccaagctgagacccttgctaaggaactcgaggcgtagcggactatgtgcatccagaaggaaagtgctctagctgaggccgcagcggcagccgaggcgtcccggatcgaggcttcgcagtggaaggctcaggcggaagg

SEQ ID NO: 3713 - DNA, 1208 bp, Zea Mays
gacttcgccaaaaacgaaaaacctcaccggctccattccaatccatcctttccttatcccctctccctcccttcgttcgccatggcaaccgtgttcctccgttccctcgccatggccatggccgacaccgcgctcccgccctcccacaagctcctccctacggtttccctgccgctcctcccctcgtccacccgcgccgcgccgctcctcctctgcgccagccgccgcctgccgcccgcgcccctcgttgcctcatccgacgccgtcgagacgaacattgaatgggtcgacgacgacgaggaggaggctggagaagccttcgacgaggagggtggggatgttgaggaggaggtgctggcctcaggcgacgagggtgagggggagtacgccgcggtggagccgcccgaggaggcaaaggtctacgttgggaacctcccctacgacatcgaaagcgagggactcgcgcagctcttcgaccaggccggcgtcgtcgaggtcgccgaggttatttacaacaaagagactggccagagccgtgggtttggctttgttaccatgagcactattgaggaagctgataaagccattgagatgttcaaccgctatgaattggacggccgccctcttcgggtgaacgttgcagcagagcgaccacagaggggcttttgatgcgggcggcggtacgagagagatggctgcttgtttgtgataagagcacggagacacaacggaggaggaacggtacaaattagcggaagttgatgctgtcacaagttgctagatccctcccttagcttcgtgattttggttcttgtcgacatcatcatgagttaaattatccaagtaggcttctatgtttgatctatcccgattcctgatgccttgtcacattatcatcgtggcaaatgttttgttggtaaaaccataggagcaaacggagattatttatatctggcgtataaaaccgtacccagtgtgttgcatctaacattcatctctccttgacacttcgacagtgtaatggccaaccagttatcgcttgagtctggaagcattccccgttaggtcctgtttgatttgaggcttgaaacaattttagccggattggtcctataatttagataagattctggtcgaatcctggagaaacgaatgtatcggaatgggaccaagaactatttcagctcaaataaacatatcattccaca

SEQ ID NO: 3714 - DNA, 3459 bp, Zea Mays
cacgcacggacataccagaacaaggcaagcgaacacatttctttcctttctatctccccccaccgctctcgctctcctcctcgctctagccgcgaccacgcgacgccgtgggcacacgcacaagcacacggacccccctcccccctacccgctgcctccgccgcggctcgccggagatggatggctccggcagctgggacgctatagactggaaccaaatcgaggatccgaggccgcggaggtcgggccaggccgtcaaggagagcatggacgacttcttgctcgaggacgaggaggtgctcgcgcagggccatggagttgttctactaaacaaccgtgatgctggtacactttcagttacaaatttccgtcttctctttgtgagccaagcaaaaaaatgtgtcatagagctgggtaccattccactgacgacaattgagaagctaaatgacgatgtgaaactccaacccttgccccacctctctgataagaaccacccccgtgaacttcttcaagtaattggcaaagacatgagaatcattgtgtttgcttttatccccagaacacagcagaaaaatgaagtgtttgatgctttgaggagatacactaaacctgctaatttgagaagtttaccgctacagggagtcgaggaagtttctttgtgtaatgaatggtggaggctaactagagttaattctagttattcattgtgttcaacttacccctctgaactcattgtaccaagaagcataagtgatgaagatttatttcaagcctccccatttcgatcaggcaagcgcttgcctgttatttcatggtgtgaccctgggtctggagctgttctggcaaggtcatctcagccgatggtggggttgatgatgaactttagaaacaatgcggatgagaagcttgtctgtgctctcagcagcagaaccatcgatgagaaaggatctccaaggaaattgtacataattgatgcccggccaagagcaaatgctatagcaaatggggcaaagggagggggctcagaatcatcttctaactaccataaatctgaggttctgtttttaggaatacaaaacatccacaccatgagagagagtctttctcgccttagggactatgtggatgctcatggctcaatttcatcaaatgggagcccttcagctgtatctgttgttggagatcggaggaaccgtggatcaacctggggtggaggcaatctaaatagcatgacatcattttcttcaacactgggggaatggctaaaccatatccagaatattctggttggtgcttcatggattgctgcacaaatttcagaagaagcagcgtcagttcttgtacattgcagtgatggatgggaccgcacaacccagttggtttcacttgcttgtttattgcttgatccctattatcgaactttcagtggattccaggctcttgttgaaaaggattggttagcatttggtcatccatttgcagagagaatgggagttccaacagtagctgagaatggggggtcacagtatgagctactaaggcaaccttcgctcggaaatttaagcagttccccgagtaggaacactttagggccgccagggccatcctctaattctccagtgcaatcccagacatcaaacaacacttcaccaatattgttacagtggcttgattgtatctcacagttgttacgtctgtacccatctgcatttcagttttcatctaaattcctagttgattttatggattgtgtgctatcgtgtcgctttgggaacttcttgtgcaatagtgaacgagaaagggagcaatctggtgtcacaatctcctgtcgttgcatgtggtcacatttggctaatctgagagcttctggcggcagcttccatgagcactataatccattctatgacccagtaaatcataatggtgcactattgccccctgctgcagcacttgccccaacactctggccccagttttttttgaggtggacatgccccattgagtcacaaggtggtgatcttgaatcccagtggcatgctatgaataaaaaatatgcagatacaatgaaggcaaaggatattgctgagtggagggcaaaggatatcaaattgaaattggaatctatgaaacaagacctgcagagggagaaacgtattaatagtacagctctagccgcagcccgaagtgctcaaagggagaatgctgcaattaagaaggcaatagaatctatagggtgcacaattaaattttcgacaagcgaaaacgaggacagaactgaagtgctgtcatgttcattaggaagaggcacagatggtagagctcagcaagatgaaaacggtgacttctctgtagcaattgaggacagcctggtctcggatgcaccggcggaccatttttgcgaatcactctgccccttccgcacaagagaagggtgcagatggccagatgctccgtgtgcacagcttggaagtcagtttgttggtttgaaggcaaattttgatgcttttgaccggctgtcaatacatgactgctattttggaccggagtagttgatcatgaaccagccgtgtcagtacacgcttggcagttgccaatggattttttcagtagttggcacctccaggtcggcatcaatagcaaaagaatgctgagaaacaactcaatgatgcatatttgacgagtatttacaaattccttgattcaatagtttttcactgtctgggtcctccgaatctgcatcaacagaataacctggaaagcaaattaaggatgcgtacctgatatgcatcggaggatcttttttttttgttccaatggtattataagcttctgtgagggaattccagcgttctttgttagttagcaatttgtaggaaccaccgagatagaaatcaatccctttgtatagtttggcaagccattcatactataagcaaaataaagcgaaacatggaagacggtagtagtttgttactctttttctgatagtacagtgttcgacttgtaactcttagctttagaataagatccatgcaaatcctgcttggaaaggaaatgttgtacatgaaggtatagacacgtggactggttcctgatccctccttatagttgtaacgatatagattttttcaagtgccattgccttcctgatgttaactgtgggtaagactgtcaacaggtcttaaaacctgcttctttagcagtgcaggtgtcgcatacttcaaattgttactgaatgtgaagataatttacaattagcgtcgttgagcactgaattcaggactagacgggctcagctgcaatgcattgattacgtctctctctgtttgagtgaatctgaaagactagtagggatatgaatggtataaatattatctgtctgtattcaaatttgatctctgtattcaaattcgaagctaagattcgattcgatccacatttgaggtcagattcgat

SEQ ID NO: 3715 - DNA, 3485 bp, Zea Mays
gcaagcgaacacatttctttcctttctatctccccccaccgctctcgctctcctcctcgctctagccgcgaccacgcgacgccgtgggcacacgcacaagcacacggacccccctcccccctacccgctgcctccgccgcggctcgccggagatggatggctccggcagctgggacgctatagactggaaccaaatcgaggatccgaggccgcggaggtcgggccaggccgtcaaggagagcatggacgacttcttgctcgaggacgaggaggtgctcgcgcagggccatggagttgttctactaaacaaccgtgatgctggtacactttcagttacaaatttccgtcttctctttgtgagccaagcaaaaaaatgtgtcatagagctgggtaccattccactgacgacaattgagaagctaaatgacgatgtgaaactccaacccttgccccacctctctgataagaaccacccccgtgaacttcttcaagtaattggcaaagacatgagaatcattgtgtttgcttttatccccagaacacagcagaaaaatgaagtgtttgatgctttgaggagatacactaaacctgctaatttgtgggatctatatgcattttcttgtgatccatccaccattaagcatgattctgagccaaagtggcgtctcttgagggaatactttcgtctttttaggagaagtttaccgctacagggagtcgaggaagtttctttgtgtaatgaatggtggaggctaactagagttaattctagttattcattgtgttcaacttacccctctgaactcattgtaccaagaagcataagtgatgaagatttatttcaagcctccccatttcgatcaggcaagcgcttgcctgttatttcatggtgtgaccctgggtctggagctgttctggcaaggtcatctcagccgatggtggggttgatgatgaactttagaaacaatgcggatgagaagcttgtctgtgctctcagcagcagaaccatcgatgagaaaggatctccaaggaaattgtacataattgatgcccggccaagagcaaatgctatagcaaatggggcaaagggagggggctcagaatcatcttctaactaccataaatctgaggttctgtttttaggaatacaaaacatccacaccatgagagagagtctttctcgccttagggactatgtggatgctcatggctcaatttcatcaaatgggagcccttcagctgtatctgttgttggagatcggaggaaccgtggatcaacctggggtggaggcaatctaaatagcatgacatcattttcttcaacactgggggaatggctaaaccatatccagaatattctggttggtgcttcatggattgctgcacaaatttcagaagaagcagcgtcagttcttgtacattgcagtgatggatgggaccgcacaacccagttggtttcacttgcttgtttattgcttgatccctattatcgaactttcagtggattccagagagaatgggagttccaacagtagctgagaatggggggtcacagtatgagctactaaggcaaccttcgctcggaaatttaagcagttccccgagtaggaacactttagggccgccagggccatcctctaattctccagtgcaatcccagacatcaaacaacacttcaccaatattgttacagtggcttgattgtatctcacagttgttacgtctgtacccatctgcatttcagttttcatctaaattcctagttgattttatggattgtgtgctatcgtgtcgctttgggaacttcttgtgcaatagtgaacgagaaagggagcaatctggtgtcacaatctcctgtcgttgcatgtggtcacatttggctaatctgagagcttctggcggcagcttccatgagcactataatccattctatgacccagtaaatcataatggtgcactattgccccctgctgcagcacttgccccaacactctggccccagttttttttgaggtggacatgccccattgagtcacaaggtggtgatcttgaatcccagtggcatgctatgaataaaaaatatgcagatacaatgaaggcaaaggatattgctgagtggagggcaaaggatatcaaattgaaattggaatctatgaaacaagacctgcagagggagaaacgtattaatagtacagctctagccgcagcccgaagtgctcaaagggagaatgctgcaattaagaaggcaatagaatctatagggtgcacaattaaattttcgacaagcgaaaacgaggacagaactgaagtgctgtcatgttcattaggaagaggcacagatggtagagctcagcaagatgaaaacggtgacttctctgtagcaattgaggacagcctggtctcggatgcaccggcggaccatttttgcgaatcactctgccccttccgcacaagagaagggtgcagatggccagatgctccgtgtgcacagcttggaagtcagtttgttggtttgaaggcaaattttgatgcttttgaccggctgtcaatacatgactgctattttggaccggagtagttgatcatgaaccagccgtgtcagtacacgcttggcagttgccaatggattttttcagtagttggcacctccaggtcggcatcaatagcaaaagaatgctgagaaacaactcaatgatgcatatttgacgagtatttacaaattccttgattcaatagtttttcactgtctgggtcctccgaatctgcatcaacagaataacctggaaagcaaattaaggatgcgtacctgatatgcatcggaggatcttttttttttgttccaatggtattataagcttctgtgagggaattccagcgttctttgttagttagcaatttgtaggaaccaccgagatagaaatcaatccctttgtatagtttggcaagccattcatactataagcaaaataaagcgaaacatggaagacggtagtagtttgttactctttttctgatagtacagtgttcgacttgtaactcttagctttagaataagatccatgcaaatcctgcttggaaaggaaatgttgtacatgaaggtatagacacgtggactggttcctgatccctccttatagttgtaacgatatagattttttcaagtgccattgccttcctgatgttaactgtgggtaagactgtcaacaggtcttaaaacctgcttctttagcagtgcaggtgtcgcatacttcaaattgttactgaatgtgaagataatttacaattagcgtcgttgagcactgaattcaggactagacgggctcagctgcaatgcattgattacgtctctctctgtttgagtgaatctgaaagactagtagggatatgaatggtataaatattatctgtctgtattcaaatttgatctctgtattcaaattcgaagctaagattcgattcgatccacatttgaggtcagattcgat

SEQ ID NO: 3716 - DNA, 794 bp, Zea Mays
ctccccccaccgctctcgctctcctcctcgctctagccgcgaccacgcgacgccgtgggcacacgcacaagcacacggacccccctcccccctacccgctgcctccgccgcggctcgccggagatggatggctccggcagctgggacgctatagactggaaccaaatcgaggatccgaggccgcggaggtcgggccaggccgtcaaggagagcatggacgacttcttgctcgaggacgaggaggtgctcgcgcagggccatggagttgttctactaaacaaccgtgatgctggtacactttcagttacaaatttccgtcttctctttgtgagccaagcaaaaaaatgtgtcatagagctgggtaccattccactgacgacaattgagaagctaaatgacgatgtgaaactccaacccttgccccacctctctgataagaaccacccccgtgaacttcttcaagtaattggcaaagacatgagaatcattgtgtttgcttttatccccagaacacagcagaaaaatgaagtgtttgatgctttgaggagatacactaaacctgctaatttgtgggatctatatgcattttcttgtgatccatccaccattaagcatgattctgagccaaagtggcgtctcttgagggaatactttcgtctttttaggagaagtttaccgctacagggagtcgaggaagtttctttgtgtaatgaatggtggaggctaactagagttaattctagttattcattgtgttcaacttacccctctgaactcattgtaccaagaagcat

SEQ ID NO: 3717 - DNA, 3325 bp, Zea Mays
ttctgttttagggtttcagaatggcaaggagttcacctcactataactgcgtattcatgatgatttgccatgttagggggccatggagttgttctactaaacaaccgtgatgctggtacactttcagttacaaatttccgtcttctctttgtgagccaagcaaaaaaatgtgtcatagagctgggtaccattccactgacgacaattgagaagctaaatgacgatgtgaaactccaacccttgccccacctctctgataagaaccacccccgtgaacttcttcaagtaattggcaaagacatgagaatcattgtgtttgcttttatccccagaacacagcagaaaaatgaagtgtttgatgctttgaggagatacactaaacctgctaatttgtgggatctatatgcattttcttgtgatccatccaccattaagcatgattctgagccaaagtggcgtctcttgagggaatactttcgtctttttaggagaagtttaccgctacagggagtcgaggaagtttctttgtgtaatgaatggtggaggctaactagagttaattctagttattcattgtgttcaacttacccctctgaactcattgtaccaagaagcataagtgatgaagatttatttcaagcctccccatttcgatcaggcaagcgcttgcctgttatttcatggtgtgaccctgggtctggagctgttctggcaaggtcatctcagccgatggtggggttgatgatgaactttagaaacaatgcggatgagaagcttgtctgtgctctcagcagcagaaccatcgatgagaaaggatctccaaggaaattgtacataattgatgcccggccaagagcaaatgctatagcaaatggggcaaagggagggggctcagaatcatcttctaactaccataaatctgaggttctgtttttaggaatacaaaacatccacaccatgagagagagtctttctcgccttagggactatgtggatgctcatggctcaatttcatcaaatgggagcccttcagctgtatctgttgttggagatcggaggaaccgtggatcaacctggggtggaggcaatctaaatagcatgacatcattttcttcaacactgggggaatggctaaaccatatccagaatattctggttggtgcttcatggattgctgcacaaatttcagaagaagcagcgtcagttcttgtacattgcagtgatggatgggaccgcacaacccagttggtttcacttgcttgtttattgcttgatccctattatcgaactttcagtggattccaggctcttgttgaaaaggattggttagcatttggtcatccatttgcagagagaatgggagttccaacagtagctgagaatggggggtcacagtatgagctactaaggcaaccttcgctcggaaatttaagcagttccccgagtaggaacactttagggccgccagggccatcctctaattctccagtgcaatcccagacatcaaacaacacttcaccaatattgttacagtggcttgattgtatctcacagttgttacgtctgtacccatctgcatttcagttttcatctaaattcctagttgattttatggattgtgtgctatcgtgtcgctttgggaacttcttgtgcaatagtgaacgagaaagggagcaatctggtgtcacaatctcctgtcgttgcatgtggtcacatttggctaatctgagagcttctggcggcagcttccatgagcactataatccattctatgacccagtaaatcataatggtgcactattgccccctgctgcagcacttgccccaacactctggccccagttttttttgaggtggacatgccccattgagtcacaaggtggtgatcttgaatcccagtggcatgctatgaataaaaaatatgcagatacaatgaaggcaaaggatattgctgagtggagggcaaaggatatcaaattgaaattggaatctatgaaacaagacctgcagagggagaaacgtattaatagtacagctctagccgcagcccgaagtgctcaaagggagaatgctgcaattaagaaggcaatagaatctatagggtgcacaattaaattttcgacaagcgaaaacgaggacagaactgaagtgctgtcatgttcattaggaagaggcacagatggtagagctcagcaagatgaaaacggtgacttctctgtagcaattgaggacagcctggtctcggatgcaccggcggaccatttttgcgaatcactctgccccttccgcacaagagaagggtgcagatggccagatgctccgtgtgcacagcttggaagtcagtttgttggtttgaaggcaaattttgatgcttttgaccggctgtcaatacatgactgctattttggaccggagtagttgatcatgaaccagccgtgtcagtacacgcttggcagttgccaatggattttttcagtagttggcacctccaggtcggcatcaatagcaaaagaatgctgagaaacaactcaatgatgcatatttgacgagtatttacaaattccttgattcaatagtttttcactgtctgggtcctccgaatctgcatcaacagaataacctggaaagcaaattaaggatgcgtacctgatatgcatcggaggatcttttttttttgttccaatggtattataagcttctgtgagggaattccagcgttctttgttagttagcaatttgtaggaaccaccgagatagaaatcaatccctttgtatagtttggcaagccattcatactataagcaaaataaagcgaaacatggaagacggtagtagtttgttactctttttctgatagtacagtgttcgacttgtaactcttagctttagaataagatccatgcaaatcctgcttggaaaggaaatgttgtacatgaaggtatagacacgtggactggttcctgatccctccttatagttgtaacgatatagattttttcaagtgccattgccttcctgatgttaactgtgggtaagactgtcaacaggtcttaaaacctgcttctttagcagtgcaggtgtcgcatacttcaaattgttactgaatgtgaagataatttacaattagcgtcgttgagcactgaattcaggactagacgggctcagctgcaatgcattgattacgtctctctctgtttgagtgaatctgaaagactagtagggatatgaatggtataaatattatctgtctgtattcaaatttgatctctgtattcaaattcgaagctaagattcgattcgatccacatttgaggtcagattcgat

SEQ ID NO: 3718 - DNA, 3135 bp, Zea Mays
ctcagctagagactctttcgcaggactatatagatgtgaaactccaacccttgccccacctctctgataagaaccacccccgtgaacttcttcaagtaattggcaaagacatgagaatcattgtgtttgcttttatccccagaacacagcagaaaaatgaagtgtttgatgctttgaggagatacactaaacctgctaatttgtgggatctatatgcattttcttgtgatccatccaccattaagcatgattctgagccaaagtggcgtctcttgagggaatactttcgtctttttaggagaagtttaccgctacagggagtcgaggaagtttctttgtgtaatgaatggtggaggctaactagagttaattctagttattcattgtgttcaacttacccctctgaactcattgtaccaagaagcataagtgatgaagatttatttcaagcctccccatttcgatcaggcaagcgcttgcctgttatttcatggtgtgaccctgggtctggagctgttctggcaaggtcatctcagccgatggtggggttgatgatgaactttagaaacaatgcggatgagaagcttgtctgtgctctcagcagcagaaccatcgatgagaaaggatctccaaggaaattgtacataattgatgcccggccaagagcaaatgctatagcaaatggggcaaagggagggggctcagaatcatcttctaactaccataaatctgaggttctgtttttaggaatacaaaacatccacaccatgagagagagtctttctcgccttagggactatgtggatgctcatggctcaatttcatcaaatgggagcccttcagctgtatctgttgttggagatcggaggaaccgtggatcaacctggggtggaggcaatctaaatagcatgacatcattttcttcaacactgggggaatggctaaaccatatccagaatattctggttggtgcttcatggattgctgcacaaatttcagaagaagcagcgtcagttcttgtacattgcagtgatggatgggaccgcacaacccagttggtttcacttgcttgtttattgcttgatccctattatcgaactttcagtggattccaggctcttgttgaaaaggattggttagcatttggtcatccatttgcagagagaatgggagttccaacagtagctgagaatggggggtcacagtatgagctactaaggcaaccttcgctcggaaatttaagcagttccccgagtaggaacactttagggccgccagggccatcctctaattctccagtgcaatcccagacatcaaacaacacttcaccaatattgttacagtggcttgattgtatctcacagttgttacgtctgtacccatctgcatttcagttttcatctaaattcctagttgattttatggattgtgtgctatcgtgtcgctttgggaacttcttgtgcaatagtgaacgagaaagggagcaatctggtgtcacaatctcctgtcgttgcatgtggtcacatttggctaatctgagagcttctggcggcagcttccatgagcactataatccattctatgacccagtaaatcataatggtgcactattgccccctgctgcagcacttgccccaacactctggccccagttttttttgaggtggacatgccccattgagtcacaaggtggtgatcttgaatcccagtggcatgctatgaataaaaaatatgcagatacaatgaaggcaaaggatattgctgagtggagggcaaaggatatcaaattgaaattggaatctatgaaacaagacctgcagagggagaaacgtattaatagtacagctctagccgcagcccgaagtgctcaaagggagaatgctgcaattaagaaggcaatagaatctatagggtgcacaattaaattttcgacaagcgaaaacgaggacagaactgaagtgctgtcatgttcattaggaagaggcacagatggtagagctcagcaagatgaaaacggtgacttctctgtagcaattgaggacagcctggtctcggatgcaccggcggaccatttttgcgaatcactctgccccttccgcacaagagaagggtgcagatggccagatgctccgtgtgcacagcttggaagtcagtttgttggtttgaaggcaaattttgatgcttttgaccggctgtcaatacatgactgctattttggaccggagtagttgatcatgaaccagccgtgtcagtacacgcttggcagttgccaatggattttttcagtagttggcacctccaggtcggcatcaatagcaaaagaatgctgagaaacaactcaatgatgcatatttgacgagtatttacaaattccttgattcaatagtttttcactgtctgggtcctccgaatctgcatcaacagaataacctggaaagcaaattaaggatgcgtacctgatatgcatcggaggatcttttttttttgttccaatggtattataagcttctgtgagggaattccagcgttctttgttagttagcaatttgtaggaaccaccgagatagaaatcaatccctttgtatagtttggcaagccattcatactataagcaaaataaagcgaaacatggaagacggtagtagtttgttactctttttctgatagtacagtgttcgacttgtaactcttagctttagaataagatccatgcaaatcctgcttggaaaggaaatgttgtacatgaaggtatagacacgtggactggttcctgatccctccttatagttgtaacgatatagattttttcaagtgccattgccttcctgatgttaactgtgggtaagactgtcaacaggtcttaaaacctgcttctttagcagtgcaggtgtcgcatacttcaaattgttactgaatgtgaagataatttacaattagcgtcgttgagcactgaattcaggactagacgggctcagctgcaatgcattgattacgtctctctctgtttgagtgaatctgaaagactagtagggatatgaatggtataaatattatctgtctgtattcaaatttgatctctgtattcaaattcgaagctaagattcgattcgatccacatttgaggtcagattcgat

SEQ ID NO: 3719 - DNA, 1839 bp, Zea Mays
atcaatactggcctttcagtggcaaagtgctgtgcttatgaataaattggcttgattgtatctcacagttgttacgtctgtacccatctgcatttcagttttcatctaaattcctagttgattttatggattgtgtgctatcgtgtcgctttgggaacttcttgtgcaatagtgaacgagaaagggagcaatctggtgtcacaatctcctgtcgttgcatgtggtcacatttggctaatctgagagcttctggcggcagcttccatgagcactataatccattctatgacccagtaaatcataatggtgcactattgccccctgctgcagcacttgccccaacactctggccccagttttttttgaggtggacatgccccattgagtcacaaggtggtgatcttgaatcccagtggcatgctatgaataaaaaatatgcagatacaatgaaggcaaaggatattgctgagtggagggcaaaggatatcaaattgaaattggaatctatgaaacaagacctgcagagggagaaacgtattaatagtacagctctagccgcagcccgaagtgctcaaagggagaatgctgcaattaagaaggcaatagaatctatagggtgcacaattaaattttcgacaagcgaaaacgaggacagaactgaagtgctgtcatgttcattaggaagaggcacagatggtagagctcagcaagatgaaaacggtgacttctctgtagcaattgaggacagcctggtctcggatgcaccggcggaccatttttgcgaatcactctgccccttccgcacaagagaagggtgcagatggccagatgctccgtgtgcacagcttggaagtcagtttgttggtttgaaggcaaattttgatgcttttgaccggctgtcaatacatgactgctattttggaccggagtagttgatcatgaaccagccgtgtcagtacacgcttggcagttgccaatggattttttcagtagttggcacctccaggtcggcatcaatagcaaaagaatgctgagaaacaactcaatgatgcatatttgacgagtatttacaaattccttgattcaatagtttttcactgtctgggtcctccgaatctgcatcaacagaataacctggaaagcaaattaaggatgcgtacctgatatgcatcggaggatcttttttttttgttccaatggtattataagcttctgtgagggaattccagcgttctttgttagttagcaatttgtaggaaccaccgagatagaaatcaatccctttgtatagtttggcaagccattcatactataagcaaaataaagcgaaacatggaagacggtagtagtttgttactctttttctgatagtacagtgttcgacttgtaactcttagctttagaataagatccatgcaaatcctgcttggaaaggaaatgttgtacatgaaggtatagacacgtggactggttcctgatccctccttatagttgtaacgatatagattttttcaagtgccattgccttcctgatgttaactgtgggtaagactgtcaacaggtcttaaaacctgcttctttagcagtgcaggtgtcgcatacttcaaattgttactgaatgtgaagataatttacaattagcgtcgttgagcactgaattcaggactagacgggctcagctgcaatgcattgattacgtctctctctgtttgagtgaatctgaaagactagtagggatatgaatggtataaatattatctgtctgtattcaaatttgatctctgtattcaaattcgaagctaagattcgattcgatccacatttgaggtcagattcgat

SEQ ID NO: 3720 - DNA, 2403 bp, Zea Mays
agaaatcccatcgtacgcgacttcgtattggtaaaagcctttgagtttgatacccatgacatctctaatcgctctcatcaaatcacgattcacataaaaaaggtgtgggagcccgatccgatcgccagatccgccggcctgtgcgccgactcgggcgtccttccacagatcctcttccttctatcgtaggctcgccctcgccgctcgctggagcggaggtctctccctgcagcccatactccttgattcattctattgcctcgccgccggctctatggataagcaggagccagtagccaatggtgaacaaacgataggtcttgctgagaagccgaaggagctgcctgttgccagtaaggatgagaaagcaactgtgcccccgattttagttgattcaaatgctttcaatctaccaagtgaaggccaaacccaagctggcacatctaacatggatgggggccataatggtgcacacaacttttatgcttctcaggcacaaccattctattaccaaggctccggttctgaaaaccctacacaagcatgggatacatatcctccctacatgagtgttgaaggattggaagtgggtccaccagttgtatacaatgaggacccctcattgatgttccatggtggctatggttacgacccatattattctcctattgcaacacctgtaccaaatgctgttagtggagggtgatacaataatgccgattgacccaacacaaggagcttttatcgctgataccctgagtccaaacagcttcctgtttggcccaagacctgaatggttcagatcttcagaaggaactgggtcatttccatcacctgcagcttcacctcaaccttctaggggtgttccagggtcctatgaccaaaacaactttccaatggcttcaagaatggccagtaattatgggggatccgtcaccagctttggccttaatggtagaagtttgatctcaaccgagaaagggcgcaggaggggaaggggcaatgcacttatttgcagctgcaatggtcctcttgactttcttaatgagcaaagtcggggtccacgtgcaactaagcctaagaagcaaccagaggttgacagtaaggatgaggtgcctactacaggagttggtcgtgagttatacaacaagcctgactttgttatggagtacacgaatgcgaggtttttcatcataaaatcgtacagcgaagataatgtgcacaagagtgtcaaatatggtgtttgggctagcaccacaaatggaaacaagaaactggactcagcctatcgcgaagctaaggagaaaggagagcactgtcccattttcctgttattttcggtgaatgccagtgcacaattctgtggtgttgctgagatgattggaccagtggactttgagaaaagtgtggattactggcagcaagataagtggactggtcaattccctgtgaagtggcacatagtgaaggatgttcccaataatcttttccgacatataattcttgaaaacaacgacaataaacctgtaacaaacagcagagatacacaggaggtgaaactagagcaaggaatggagatgctgaagatctttaagaaccatgatgatgatgcatcaatccttgacgactttgagttttacgaggagcgtgagaaagcgctgcaggaaaataaggcacgcctgcatcagcaacatctacccagttctattgttattgagcccaagaaacccttgactgcacccagtgacctcgtgggccatatcaccaagagttttgctgaggctgtgcggcttggtgaggccaagactgtaagccatttgactgagaaggtttctgggggtgatccgtctattcctgtgaagcatgttgaagttaagcagagtggtttatcttaggaactcttgatcgatgtgaatgaactgtaccaaaaattcacccatacgcttcctgatcaaaatgtcgggaatgcatatgcagatggatgatgatgaaacccaagacatcggcaaaagcatgcatgcacactagggtaggtctttgccaaccttggaagcatagtttcttgaatagtttctctctttttttcttctttcttcctagtattttctccccttctcttcgcatcatatgatgattccttagtgtctagcctcaaggagagttgctgtttttgtgtaagcctctgtaagtttcctgttccatcacatatgagtaaggcctttttgtttctttttatttaagtaaaagatccatcttttatgtactgtcgtggcagttttattatactatgtctgaacaaggcctattcactatgtaagcaaaacataaacgctatccaggtgacctggttgtgatgactacagtaataagtaactgaataattttttatgtttgctgggaagg

SEQ ID NO: 3721 - DNA, 1812 bp, Zea Mays
ccatgacatctctaatcgctctcatcaaatcacgattcacataaaaaaggtgtgggagcccgatccgatcgccagatccgccggcctgtgcgccgactcgggcgtccttccacagatcctcttccttctatcgtaggctcgccctcgccgctcgctggagcggaggtctctccctgcagcccatactccttgattcattctattgcctcgccgccggctctatggataagcaggagccagtagccaatggtgaacaaacgataggtcttgctgagaagccgaaggagctgcctgttgccagtaaggatgagaaagcaactgtgcccccgattttagttgattcaaatgctttcaatctaccaagtgaaggccaaacccaagctggcacatctaacatggatgggggccataatggtgcacacaacttttatgcttctcaggcacaaccattctattaccaaggctccggttctgaaaaccctacacaagcatgggatacatatcctccctacatgagtgttgaaggattggaagtgggtccaccagttgtatacaatgaggacccctcattgatgttccatggtggctatggttacgacccatattattctcctattgcaacacctgtaccaaatgctgttagtggaggtggtcagctctactcccctcagcagttcttctcggctccttactaccagcagtcagtaccacctgacatgcaatatttaagctctcctactccaatatcacagggtgatacaataatgccgattgacccaacacaaggagcttttatcgctgataccctgagtccaaacagcttcctgtttggcccaagacctgaatggttcagatcttcagaaggaactgggtcatttccatcacctgcagcttcacctcaaccttctaggggtgttccagggtcctatgaccaaaacaactttccaatggcttcaagaatggtgaaactagagcaaggaatggagatgctgaagatctttaagaaccatgatgatgatgcatcaatccttgacgactttgagttttacgaggagcgtgagaaagcgctgcaggaaaataaggcacgcctgcatcagcaacatctacccagttctattgttattgagcccaagaaacccttgactgcacccagtgacctcgtgggccatatcaccaagagttttgctgaggctgtgcggcttggtgaggccaagactgtaagccatttgactgagaaggtttctgggggtgatccgtctattcctgtgaagcatgttgaagttaagcagagtggtttatcttaggaactcttgatcgatgtgaatgaactgtaccaaaaattcacccatacgcttcctgatcaaaatgtcgggaatgcatatgcagatggatgatgatgaaacccaagacatcggcaaaagcatgcatgcacactagggtaggtctttgccaaccttggaagcatagtttcttgaatagtttctctctttttttcttctttcttcctagtattttctccccttctcttcgcatcatatgatgattccttagtgtctagcctcaaggagagttgctgtttttgtgtaagcctctgtaagtttcctgttccatcacatatgagtaaggcctttttgtttctttttatttaagtaaaagatccatcttttatgtactgtcgtggcagttttattatactatgtctgaacaaggcctattcactatgtaagcaaaacataaacgctatccaggtgacctggttgtgatgactacagtaataagtaactgaataattttttatgtttgctgggaagg

SEQ ID NO: 3722 - DNA, 2726 bp, Zea Mays
ctctaatcgctctcatcaaatcacgattcacataaaaaaggtgtgggagcccgatccgatcgccagatccgccggcctgtgcgccgactcgggcgtccttccacagatcctcttccttctatcgtaggctcgccctcgccgctcgctggagcggaggtctctccctgcagcccatactccttgattcattctattgcctcgccgccggtaagggattttgatctgcacactctgctgctatgaattgatcggagagccgtcaaattcaaattattattatcccgacccgaccggtttgtcgccgattcgattccattgcccttgcccccgtcccccgtgcgtgtcaattatgcgatccgagatgtattgagcttagaaccagggggtctcaaattgagttgatcaggcttcttgctccgcatggtggacgctgctgtttctggcagcgaagatctggcggaatcgcccgagcttcagcttaacgcattgcgagtccttctcggctctatggataagcaggagccagtagccaatggtgaacaaacgataggtcttgctgagaagccgaaggagctgcctgttgccagtaaggatgagaaagcaactgtgcccccgattttagttgattcaaatgctttcaatctaccaagtgaaggccaaacccaagctggcacatctaacatggatgggggccataatggtgcacacaacttttatgcttctcaggcacaaccattctattaccaaggctccggttctgaaaaccctacacaagcatgggatacatatcctccctacatgagtgttgaaggattggaagtgggtccaccagttgtatacaatgaggacccctcattgatgttccatggtggctatggttacgacccatattattctcctattgcaacacctgtaccaaatgctgttagtggagggtgatacaataatgccgattgacccaacacaaggagcttttatcgctgataccctgagtccaaacagcttcctgtttggcccaagacctgaatggttcagatcttcagaaggaactgggtcatttccatcacctgcagcttcacctcaaccttctaggggtgttccagggtcctatgaccaaaacaactttccaatggcttcaagaatgtcatcacctcaccagaagcccttctatggtttgagatccacaactgactcctatggaaggggtttttctcatggtggaatgttcccacaggccagtaattatgggggatccgtcaccagctttggccttaatggtagaagtttgatctcaaccgagaaagggcgcaggaggggaaggggcaatgcacttatttgcagctgcaatggtcctcttgactttcttaatgagcaaagtcggggtccacgtgcaactaagcctaagaagcaaccagaggttgacagtaaggatgaggtgcctactacaggagttggtcgtgagttatacaacaagcctgactttgttatggagtacacgaatgcgaggtttttcatcataaaatcgtacagcgaagataatgtgcacaagagtgtcaaatatggtgtttgggctagcaccacaaatggaaacaagaaactggactcagcctatcgcgaagctaaggagaaaggagagcactgtcccattttcctgttattttcggtgaatgccagtgcacaattctgtggtgttgctgagatgattggaccagtggactttgagaaaagtgtggattactggcagcaagataagtggactggtcaattccctgtgaagtggcacatagtgaaggatgttcccaataatcttttccgacatataattcttgaaaacaacgacaataaacctgtaacaaacagcagagatacacaggaggtgaaactagagcaaggaatggagatgctgaagatctttaagaaccatgatgatgatgcatcaatccttgacgactttgagttttacgaggagcgtgagaaagcgctgcaggaaaataaggcacgcctgcatcagcaacatctacccagttctattgttattgagcccaagaaacccttgactgcacccagtgacctcgtgggccatatcaccaagagttttgctgaggctgtgcggcttggtgaggccaagactgtaagccatttgactgagaaggtttctgggggtgatccgtctattcctgtgaagcatgttgaagttaagcagagtggtttatcttaggaactcttgatcgatgtgaatgaactgtaccaaaaattcacccatacgcttcctgatcaaaatgtcgggaatgcatatgcagatggatgatgatgaaacccaagacatcggcaaaagcatgcatgcacactagggtaggtctttgccaaccttggaagcatagtttcttgaatagtttctctctttttttcttctttcttcctagtattttctccccttctcttcgcatcatatgatgattccttagtgtctagcctcaaggagagttgctgtttttgtgtaagcctctgtaagtttcctgttccatcacatatgagtaaggcctttttgtttctttttatttaagtaaaagatccatcttttatgtactgtcgtggcagttttattatactatgtctgaacaaggcctattcactatgtaagcaaaacataaacgctatccaggtgacctggttgtgatgactacagtaataagtaactgaataattttttatgtttgctgggaagg

SEQ ID NO: 3723 - DNA, 2634 bp, Zea Mays
ctaatcgctctcatcaaatcacgattcacataaaaaaggtgtgggagcccgatccgatcgccagatccgccggcctgtgcgccgactcgggcgtccttccacagatcctcttccttctatcgtaggctcgccctcgccgctcgctggagcggaggtctctccctgcagcccatactccttgattcattctattgcctcgccgccggtaagggattttgatctgcacactctgctgctatgaattgatcggagagccgtcaaattcaaattattattatcccgacccgaccggtttgtcgccgattcgattccattgcccttgcccccgtcccccgtgcgtgtcaattatgcgatccgagatgtattgagcttagaaccagggggtctcaaattgagttgatcaggcttcttgctccgcatggtggacgctgctgtttctggcagcgaagatctggcggaatcgcccgagcttcagcttaacgcattgcgagtccttctcggctctatggataagcaggagccagtagccaatggtgaacaaacgataggtcttgctgagaagccgaaggagctgcctgttgccagtaaggatgagaaagcaactgtgcccccgattttagttgattcaaatgctttcaatctaccaagtgaaggccaaacccaagctggcacatctaacatggatgggggccataatggtgcacacaacttttatgcttctcaggcacaaccattctattaccaaggctccggttctgaaaaccctacacaagcatgggatacatatcctccctacatgagtgttgaaggattggaagtgggtccaccagttgtatacaatgaggacccctcattgatgttccatggtggctatggttacgacccatattattctcctattgcaacacctgtaccaaatgctgttagtggagggtgatacaataatgccgattgacccaacacaaggagcttttatcgctgataccctgagtccaaacagcttcctgtttggcccaagacctgaatggttcagatcttcagaaggaactgggtcatttccatcacctgcagcttcacctcaaccttctaggggtgttccagggtcctatgaccaaaacaactttccaatggcttcaagaatggccagtaattatgggggatccgtcaccagctttggccttaatggtagaagtttgatctcaaccgagaaagggcgcaggaggggaaggggcaatgcacttatttgcagctgcaatggtcctcttgactttcttaatgagcaaagtcggggtccacgtgcaactaagcctaagaagcaaccagaggttgacagtaaggatgaggtgcctactacaggagttggtcgtgagttatacaacaagcctgactttgttatggagtacacgaatgcgaggtttttcatcataaaatcgtacagcgaagataatgtgcacaagagtgtcaaatatggtgtttgggctagcaccacaaatggaaacaagaaactggactcagcctatcgcgaagctaaggagaaaggagagcactgtcccattttcctgttattttcggtgaatgccagtgcacaattctgtggtgttgctgagatgattggaccagtggactttgagaaaagtgtggattactggcagcaagataagtggactggtcaattccctgtgaagtggcacatagtgaaggatgttcccaataatcttttccgacatataattcttgaaaacaacgacaataaacctgtaacaaacagcagagatacacaggaggtgaaactagagcaaggaatggagatgctgaagatctttaagaaccatgatgatgatgcatcaatccttgacgactttgagttttacgaggagcgtgagaaagcgctgcaggaaaataaggcacgcctgcatcagcaacatctacccagttctattgttattgagcccaagaaacccttgactgcacccagtgacctcgtgggccatatcaccaagagttttgctgaggctgtgcggcttggtgaggccaagactgtaagccatttgactgagaaggtttctgggggtgatccgtctattcctgtgaagcatgttgaagttaagcagagtggtttatcttaggaactcttgatcgatgtgaatgaactgtaccaaaaattcacccatacgcttcctgatcaaaatgtcgggaatgcatatgcagatggatgatgatgaaacccaagacatcggcaaaagcatgcatgcacactagggtaggtctttgccaaccttggaagcatagtttcttgaatagtttctctctttttttcttctttcttcctagtattttctccccttctcttcgcatcatatgatgattccttagtgtctagcctcaaggagagttgctgtttttgtgtaagcctctgtaagtttcctgttccatcacatatgagtaaggcctttttgtttctttttatttaagtaaaagatccatcttttatgtactgtcgtggcagttttattatactatgtctgaacaaggcctattcactatgtaagcaaaacataaacgctatccaggtgacctggttgtgatgactacagtaataagtaactgaataattttttatgtttgctgggaagg

SEQ ID NO: 3724 - DNA, 2024 bp, Zea Mays
ctcatcaaatcacgattcacataaaaaaggtgtgggagcccgatccgatcgccagatccgccggcctgtgcgccgactcgggcgtccttccacagatcctcttccttctatcgtaggctcgccctcgccgctcgctggagcggaggtctctccctgcagcccatactccttgattcattctattgcctcgccgccggctctatggataagcaggagccagtagccaatggtgaacaaacgataggtcttgctgagaagccgaaggagctgcctgttgccagtaaggatgagaaagcaactgtgcccccgattttagttgattcaaatgctttcaatctaccaagtgaaggccaaacccaagctggcacatctaacatggatgggggccataatggtgcacacaacttttatgcttctcaggcacaaccattctattaccaagtcatcacctcaccagaagcccttctatggtttgagatccacaactgactcctatggaaggggtttttctcatggtggaatgttcccacaggccagtaattatgggggatccgtcaccagctttggccttaatggtagaagtttgatctcaaccgagaaagggcgcaggaggggaaggggcaatgcacttatttgcagctgcaatggtcctcttgactttcttaatgagcaaagtcggggtccacgtgcaactaagcctaagaagcaaccagaggttgacagtaaggatgaggtgcctactacaggagttggtcgtgagttatacaacaagcctgactttgttatggagtacacgaatgcgaggtttttcatcataaaatcgtacagcgaagataatgtgcacaagagtgtcaaatatggtgtttgggctagcaccacaaatggaaacaagaaactggactcagcctatcgcgaagctaaggagaaaggagagcactgtcccattttcctgttattttcggtgaatgccagtgcacaattctgtggtgttgctgagatgattggaccagtggactttgagaaaagtgtggattactggcagcaagataagtggactggtcaattccctgtgaagtggcacatagtgaaggatgttcccaataatcttttccgacatataattcttgaaaacaacgacaataaacctgtaacaaacagcagagatacacaggaggtgaaactagagcaaggaatggagatgctgaagatctttaagaaccatgatgatgatgcatcaatccttgacgactttgagttttacgaggagcgtgagaaagcgctgcaggaaaataaggcacgcctgcatcagcaacatctacccagttctattgttattgagcccaagaaacccttgactgcacccagtgacctcgtgggccatatcaccaagagttttgctgaggctgtgcggcttggtgaggccaagactgtaagccatttgactgagaaggtttctgggggtgatccgtctattcctgtgaagcatgttgaagttaagcagagtggtttatcttaggaactcttgatcgatgtgaatgaactgtaccaaaaattcacccatacgcttcctgatcaaaatgtcgggaatgcatatgcagatggatgatgatgaaacccaagacatcggcaaaagcatgcatgcacactagggtaggtctttgccaaccttggaagcatagtttcttgaatagtttctctctttttttcttctttcttcctagtattttctccccttctcttcgcatcatatgatgattccttagtgtctagcctcaaggagagttgctgtttttgtgtaagcctctgtaagtttcctgttccatcacatatgagtaaggcctttttgtttctttttatttaagtaaaagatccatcttttatgtactgtcgtggcagttttattatactatgtctgaacaaggcctattcactatgtaagcaaaacataaacgctatccaggtgacctggttgtgatgactacagtaataagtaactgaataattttttatgtttgctgggaagg

SEQ ID NO: 3725 - DNA, 2567 bp, Zea Mays
gagagagagagagagagagagacgggccggggatgaaagggatgaccggatgagcatcttccgatggtcctagacagggcacacgtgggccccaccgtccaggtcactgtcgtggatggctcaccccgtgcctgcactgcagccctttccctagttacatcagcgagcgctagctatgccttgcctttccatcgagctgagctgagcatcatggggtagtgtgtgtgtgaggcgatagagaagctagtgctcataaccaaccaccactcagtcctcctcctctaccctttcccttccgccgcgttcctacttggtcctagagggagagagatctcgaactccaagggcgcatgctccggttgctagctacgatgccgtgtgcgtagctgcggcagcccttgatcgatcaatcgatcgcttgtgcggaaggagccggatcgagtggagtcaggtagactgctagcttccattccaacaagaggttgagctagctagatactccgtggtcgtcgtcgtcgttggacgtacgccagaagagggagctagagaagaataccgtacagctgcttccaacatggcagctgcctcgtctgcccacctgttcggactcggcgacgggcagatgcagatgcagccgcagcagcagcaggcgccgcctcctcctcttgtgaacaacccggccgcgccgccgcccaagaagaagcggaaccaacccgaccctgacgcggaggtgatcgcgctttcccccaagacgctgatggcgacgaaccggttcgtgtgcgaggtgtgcaacaaggggttccagcgggagcagaacctgcagctgcaccggcgcgggcacaacctgccgtggaagctgaagcagaagaaccccaaggagacgcggcggcgggtgtacctgtgcccggagccgacgtgcgtgcaccacgacccgtcccgcgcgctgggcgacctcacgggcatcaagaagcactactgccgcaagcacggcgagaagaagtggaagtgcgacaagtgcaacaagcgctacgccgtgcagtccgactggaaggcgcactccaagacgtgcggaacccgcgagtaccgctgcgactgcggcaccctcttctccaggagggacagcttcatcacccaccgtgcgttctgcgatgcactagcgcaggagagcgcacgggtgccgcccatgggcgccggcatgtatggcactggcggcatggccctcggcctctccgggatggccacatcacagttgcagtcattccaagaccagacccactcctcggccaccaccgccatcagcaacaatccgacggcgcagttcgagcacctcatgcagtcgtccaccggctcccccgttttccgcggcgcgcaaccgacatcatcgtcttcctcgccgttctacctcggcggcgccgaggacggccatcaaagcctatccggccacacctctctgctccacggaaacaagcaggcctaccacggcctgatgctgttgccggagcagcagcaccaggcggggagtaacggcctcctcaacctggggttcttctctggcgggagcagcggtcaggatgcccgcctcgtgttcccggaccagttcaacggtgccgttggcgggaacgtccgcggtgacggcagcgagcacggcaacagcggcgctaacacggaatcagcggccatcttctccgggaacctaatgggaaaccaccaaatggcaagcagcgccggcttttcttcctccttgtacaactcgtccgagaccgctgccccggcgcagatgtcggcgacggcgctgctgcagaaggccgctcagatgggcgcgacgacgagcagcggcaacgtgaactctctgctcagggggcttggtagtagcgccggcggcaccttgaacgggaggcctgccggagcagctgctgggttcatggccggcgagagctcctcggcgaggagcacttcccaggccgagaacgagagccagttccgggacctgatgaacacgctcgcagcttccgggagcggagctgctggcacagcgttcagcgggggtttcccgggcatggacgacagcaagctgagcacgagagacttcctcggcgtcggcggcagcgtcgtgcggagcatgggtggcgcggcagggctgccgctgcggcacggcggtgccgcgggcattggcatgggctcattggacacagaaatgaagtaggcgaatcgaaatccgaaacgagcattattatgctccactcttgggcagaggctcttgcattgcatgcaaggtaagtagtagcacagcctaagcaaacgactatggaaagatgagaccatttgcgcccaaaatgacaaatgaggccgtcaaccatcatatgtttatggtgctgcatgctgcatgaatattgatccttgtttattgtagctccctcctcccagggatcatggaagaatcgatgaagaactaatagcagagaaggctggacaatttgttaaattaaatgccagtatatctagttattttttgttttgatgcataatacttactggtttcctctctgctatagtagtggtatcataac

SEQ ID NO: 3726 - DNA, 2570 bp, Zea Mays
gagagagagagagagagagagacgggccggggatgaaagggatgaccggatgagcatcttccgatggtcctagacagggcacacgtgggccccaccgtccaggtcactgtcgtggatggctcaccccgtgcctgcactgcagccctttccctagttacatcagcgagcgctagctatgccttgcctttccatcgagctgagctgagcatcatggggtagtgtgtgtgtgaggcgatagagaagctagtgctcataaccaaccaccactcagtcctcctcctctaccctttcccttccgccgcgttcctacttggtcctagagggagagagatctcgaactccaagggcgcatgctccggttgctagctacgatgccgtgtgcgtagctgcggcagcccttgatcgatcaatcgatcgcttgtgcggaaggagccggatcgagtggagtcaggtagactgctagcttccattccaacaagaggttgagctagctagatactccgtggtcgtcgtcgtcgttggacgtacgccagaagagggagctagagaagaataccgtacagctgcttccaacatggcagctgcctcgtctgcccacctgttcggactcggcgacgggcagatgcagatgcagccgcagcagcagcaggcgccgcctcctcctcttgtgaacaacccggccgcgccgccgcccaagaagaagcggaaccaacccgcagaccctgacgcggaggtgatcgcgctttcccccaagacgctgatggcgacgaaccggttcgtgtgcgaggtgtgcaacaaggggttccagcgggagcagaacctgcagctgcaccggcgcgggcacaacctgccgtggaagctgaagcagaagaaccccaaggagacgcggcggcgggtgtacctgtgcccggagccgacgtgcgtgcaccacgacccgtcccgcgcgctgggcgacctcacgggcatcaagaagcactactgccgcaagcacggcgagaagaagtggaagtgcgacaagtgcaacaagcgctacgccgtgcagtccgactggaaggcgcactccaagacgtgcggaacccgcgagtaccgctgcgactgcggcaccctcttctccaggagggacagcttcatcacccaccgtgcgttctgcgatgcactagcgcaggagagcgcacgggtgccgcccatgggcgccggcatgtatggcactggcggcatggccctcggcctctccgggatggccacatcacagttgcagtcattccaagaccagacccactcctcggccaccaccgccatcagcaacaatccgacggcgcagttcgagcacctcatgcagtcgtccaccggctcccccgttttccgcggcgcgcaaccgacatcatcgtcttcctcgccgttctacctcggcggcgccgaggacggccatcaaagcctatccggccacacctctctgctccacggaaacaagcaggcctaccacggcctgatgctgttgccggagcagcagcaccaggcggggagtaacggcctcctcaacctggggttcttctctggcgggagcagcggtcaggatgcccgcctcgtgttcccggaccagttcaacggtgccgttggcgggaacgtccgcggtgacggcagcgagcacggcaacagcggcgctaacacggaatcagcggccatcttctccgggaacctaatgggaaaccaccaaatggcaagcagcgccggcttttcttcctccttgtacaactcgtccgagaccgctgccccggcgcagatgtcggcgacggcgctgctgcagaaggccgctcagatgggcgcgacgacgagcagcggcaacgtgaactctctgctcagggggcttggtagtagcgccggcggcaccttgaacgggaggcctgccggagcagctgctgggttcatggccggcgagagctcctcggcgaggagcacttcccaggccgagaacgagagccagttccgggacctgatgaacacgctcgcagcttccgggagcggagctgctggcacagcgttcagcgggggtttcccgggcatggacgacagcaagctgagcacgagagacttcctcggcgtcggcggcagcgtcgtgcggagcatgggtggcgcggcagggctgccgctgcggcacggcggtgccgcgggcattggcatgggctcattggacacagaaatgaagtaggcgaatcgaaatccgaaacgagcattattatgctccactcttgggcagaggctcttgcattgcatgcaaggtaagtagtagcacagcctaagcaaacgactatggaaagatgagaccatttgcgcccaaaatgacaaatgaggccgtcaaccatcatatgtttatggtgctgcatgctgcatgaatattgatccttgtttattgtagctccctcctcccagggatcatggaagaatcgatgaagaactaatagcagagaaggctggacaatttgttaaattaaatgccagtatatctagttattttttgttttgatgcataatacttactggtttcctctctgctatagtagtggtatcataac

SEQ ID NO: 3727 - DNA, 2795 bp, Zea Mays
gagagagagagagagagagagacgggccggggatgaaagggatgaccggatgagcatcttccgatggtcctagacagggcacacgtgggccccaccgtccaggtcactgtcgtggatggctcaccccgtgcctgcactgcagccctttccctagttacatcagcgagcgctagctatgccttgcctttccatcgagctgagctgagcatcatggggtagtgtgtgtgtgaggcgatagagaagctagtgctcataaccaaccaccactcagtcctcctcctctaccctttcccttccgccgcgttcctacttggtcctagagggagagagatctcgaactccaagggcgcatgctccggttgctagctacgatgccgtgtgcgtagctgcggcagcccttgatcgatcaatcgatcgcttgtgcggaaggagccggatcgagtggagtcagctagctagatactccgtggtcgtcgtcgtcgttggacgtacgccagaagagggagctagagaagaataccgtacagctgcttccaacatggcagctgcctcgtctgcccacctgttcggactcggcgacgggcagatgcagatgcagccgcagcagcagcaggcgccgcctcctcctcttgtgaacaacccggccgcgccgccgcccaagaagaagcggaaccaacccggtaacccaagcaagtaccctggctggccttattcgttatttgctgtttaattgatctctaggcaattcatcaaattcttcggtccagctagctctggccgatctttaagagaaccaattattagcaattactagcaggtgtcgttgatgtttaagagaaccaattattagcaatcatacgataatgacaaattaaacacacgcttgcttgcttgcttttgcatgcatgggcatcattcatatcgtcggccggcccctgcagcagaccctgacgcggaggtgatcgcgctttcccccaagacgctgatggcgacgaaccggttcgtgtgcgaggtgtgcaacaaggggttccagcgggagcagaacctgcagctgcaccggcgcgggcacaacctgccgtggaagctgaagcagaagaaccccaaggagacgcggcggcgggtgtacctgtgcccggagccgacgtgcgtgcaccacgacccgtcccgcgcgctgggcgacctcacgggcatcaagaagcactactgccgcaagcacggcgagaagaagtggaagtgcgacaagtgcaacaagcgctacgccgtgcagtccgactggaaggcgcactccaagacgtgcggaacccgcgagtaccgctgcgactgcggcaccctcttctccaggagggacagcttcatcacccaccgtgcgttctgcgatgcactagcgcaggagagcgcacgggtgccgcccatgggcgccggcatgtatggcactggcggcatggccctcggcctctccgggatggccacatcacagttgcagtcattccaagaccagacccactcctcggccaccaccgccatcagcaacaatccgacggcgcagttcgagcacctcatgcagtcgtccaccggctcccccgttttccgcggcgcgcaaccgacatcatcgtcttcctcgccgttctacctcggcggcgccgaggacggccatcaaagcctatccggccacacctctctgctccacggaaacaagcaggcctaccacggcctgatgctgttgccggagcagcagcaccaggcggggagtaacggcctcctcaacctggggttcttctctggcgggagcagcggtcaggatgcccgcctcgtgttcccggaccagttcaacggtgccgttggcgggaacgtccgcggtgacggcagcgagcacggcaacagcggcgctaacacggaatcagcggccatcttctccgggaacctaatgggaaaccaccaaatggcaagcagcgccggcttttcttcctccttgtacaactcgtccgagaccgctgccccggcgcagatgtcggcgacggcgctgctgcagaaggccgctcagatgggcgcgacgacgagcagcggcaacgtgaactctctgctcagggggcttggtagtagcgccggcggcaccttgaacgggaggcctgccggagcagctgctgggttcatggccggcgagagctcctcggcgaggagcacttcccaggccgagaacgagagccagttccgggacctgatgaacacgctcgcagcttccgggagcggagctgctggcacagcgttcagcgggggtttcccgggcatggacgacagcaagctgagcacgagagacttcctcggcgtcggcggcagcgtcgtgcggagcatgggtggcgcggcagggctgccgctgcggcacggcggtgccgcgggcattggcatgggctcattggacacagaaatgaagtaggcgaatcgaaatccgaaacgagcattattatgctccactcttgggcagaggctcttgcattgcatgcaaggtaagtagtagcacagcctaagcaaacgactatggaaagatgagaccatttgcgcccaaaatgacaaatgaggccgtcaaccatcatatgtttatggtgctgcatgctgcatgaatattgatccttgtttattgtagctccctcctcccagggatcatggaagaatcgatgaagaactaatagcagagaaggctggacaatttgttaaattaaatgccagtatatctagttattttttgttttgatgcataatacttactggtttcctctctgctatagtagtggtatcataac

SEQ ID NO: 3728 - DNA, 2120 bp, Zea Mays
agactgctagcttccattccaacaagagctagctagatactccgtggtcgtcgtcgtcgttggacgtacgccagaagagggagctagagaagaataccgtacagctgcttccaacatggcagctgcctcgtctgcccacctgttcggactcggcgacgggcagatgcagatgcagccgcagcagcagcaggcgccgcctcctcctcttgtgaacaacccggccgcgccgccgcccaagaagaagcggaaccaacccggtaacccaacagaccctgacgcggaggtgatcgcgctttcccccaagacgctgatggcgacgaaccggttcgtgtgcgaggtgtgcaacaaggggttccagcgggagcagaacctgcagctgcaccggcgcgggcacaacctgccgtggaagctgaagcagaagaaccccaaggagacgcggcggcgggtgtacctgtgcccggagccgacgtgcgtgcaccacgacccgtcccgcgcgctgggcgacctcacgggcatcaagaagcactactgccgcaagcacggcgagaagaagtggaagtgcgacaagtgcaacaagcgctacgccgtgcagtccgactggaaggcgcactccaagacgtgcggaacccgcgagtaccgctgcgactgcggcaccctcttctccaggagggacagcttcatcacccaccgtgcgttctgcgatgcactagcgcaggagagcgcacgggtgccgcccatgggcgccggcatgtatggcactggcggcatggccctcggcctctccgggatggccacatcacagttgcagtcattccaagaccagacccactcctcggccaccaccgccatcagcaacaatccgacggcgcagttcgagcacctcatgcagtcgtccaccggctcccccgttttccgcggcgcgcaaccgacatcatcgtcttcctcgccgttctacctcggcggcgccgaggacggccatcaaagcctatccggccacacctctctgctccacggaaacaagcaggcctaccacggcctgatgctgttgccggagcagcagcaccaggcggggagtaacggcctcctcaacctggggttcttctctggcgggagcagcggtcaggatgcccgcctcgtgttcccggaccagttcaacggtgccgttggcgggaacgtccgcggtgacggcagcgagcacggcaacagcggcgctaacacggaatcagcggccatcttctccgggaacctaatgggaaaccaccaaatggcaagcagcgccggcttttcttcctccttgtacaactcgtccgagaccgctgccccggcgcagatgtcggcgacggcgctgctgcagaaggccgctcagatgggcgcgacgacgagcagcggcaacgtgaactctctgctcagggggcttggtagtagcgccggcggcaccttgaacgggaggcctgccggagcagctgctgggttcatggccggcgagagctcctcggcgaggagcacttcccaggccgagaacgagagccagttccgggacctgatgaacacgctcgcagcttccgggagcggagctgctggcacagcgttcagcgggggtttcccgggcatggacgacagcaagctgagcacgagagacttcctcggcgtcggcggcagcgtcgtgcggagcatgggtggcgcggcagggctgccgctgcggcacggcggtgccgcgggcattggcatgggctcattggacacagaaatgaagtaggcgaatcgaaatccgaaacgagcattattatgctccactcttgggcagaggctcttgcattgcatgcaaggtaagtagtagcacagcctaagcaaacgactatggaaagatgagaccatttgcgcccaaaatgacaaatgaggccgtcaaccatcatatgtttatggtgctgcatgctgcatgaatattgatccttgtttattgtagctccctcctcccagggatcatggaagaatcgatgaagaactaatagcagagaaggctggacaatttgttaaattaaatgccagtatatctagttattttttgttttgatgcataatacttactggtttcctctctgctatagtagtggtatcataac

SEQ ID NO: 3729 - DNA, 1511 bp, Zea Mays
cgcagaggaatcgagatccaaatcaaatcccacgccatttcacctggcagaaaaagtactactcgatcgcaatcccaccaggcgcgatgagccttcatgaacgcgagacacgcacctcgttctcctccttgaggctgagggtgccgcgcgacgggcatcggctgctccgcatcccctctccaccactcctctccaccccaaaaccccccgcggcgggccacgctaccacctgcccccgcccacgccatggcgtcgaccagcctcgccacgctgccgtcgcagctcgcctccccggtccgcctgcgccgccgcgccgcactctcctccgctagccgcccgcatttcctcctccatcgtgcaaccaaaggtggatcgcaatgcaggctggcggtgacctgcaacgcgcaggcggtggcgccgaccagctttgcgcaggggacgcccgtccggccgacgagcatactggtggtaggcgccacggggacgctggggaggcaggtggtcaggagggcgctggacgagggctacgacgttaggtgcctcgtcaggccgcgcccagcgcccgcagatttcctccgggactggggtgccaccgttgtcaatgccgaccttagcaagccggagaccatacctgcgacccttgttggtattcatgccgtcattgactgtgcgacaggacggccagaagagcccatccggacggtagactgggaaggaaaagttgctctaatacagtgtgcaaaggctatgggaattcaaaatggtctggattatatcatcatccgtttgtgtggtttcatgcagggtcttattgggcaatatgctgttcctatactagaagagaagtccgtctggggaactgatgctccaactcggattgcttacatggatacccaggacgtagctcgactaacgtttatagctatgcggaatgagaaggccaacaagaaactcatgacctttgctggcccacgagcttggacaactcaagaggtgattactttgtgtgagaggttagctgggcaagatgccaatgtaaccactgtacctgttgcagtcttgagatttactcgtcagttgacacggtgcttccaatggacaaatgatgtggctgacagactggcattttcagaggtgctctcaagtgacacagttttctctgctccaatgaatgagacctaccagcttcttggggtggatgggaatgacatcctcagcttagagaagaaggatttctgtgacctagggacataattacaaatctgtgtctcaaatgacagatgagtgagcacaagttttcctgtatatttgcatttttgcatgtgcaagaatgctctgtgctattagtgatgtgtatataatcttaacattttgagctatcaaagttccgaaatttgtgcaaaacagcataaagtctatggtttcacgacgtcaacttaaattatgctcaactcatggcctcatgggttctagcataactgatcaaaaagtaaagaaaagaaaagaaaaaa

SEQ ID NO: 3730 - DNA, 1690 bp, Zea Mays
cgcagaggaatcgagatccaaatcaaatcccacgccatttcacctggcagaaaaagtactactcgatcgcaatcccaccaggcgcgatgagccttcatgaacgcgagacacgcacctcgttctcctccttgaggctgagggtgccgcgcgacgggcatcggctgctccgcatcccctctccaccactcctctccaccccaaaaccccccgcggcgggccacgctaccacctgcccccgcccacgccatggcgtcgaccagcctcgccacgctgccgtcgcagctcgcctccccggtccgcctgcgccgccgcgccgcactctcctccgctagccgcccgcatttcctcctccatcgtgcaaccaaaggtggatcgcaatgcaggctggcggtgacctgcaacgcgcaggcggtggcgccgaccagctttgcgcaggggacgcccgtccggccgacgagcatactggtggtaggcgccacggggacgctggggaggcaggtggtcaggagggcgctggacgagggctacgacgttaggtgcctcgtcaggccgcgcccagcgcccgcagatttcctccgggactggggtgccaccgttgtcaatgccgaccttagcaagccggagaccatacctgcgacccttgttggtattcatgccgtcattgactgtgcgacaggacggccagaagagcccatccggacgactgggaaggaaaagttgctctaatacagtgtgcaaaggctatgggaattcaaaagtatgtgttctattccatccacaactgtgacaagcatcctgaggttcccttgatggaaatcaagtattgtactgagaaatttattcaggacagtggtctggattatatcatcatccgtttgtgtggtttcatgcagggtcttattgggcaatatgctgttcctatactagaagagaagtccgtctggggaactgatgctccaactcggattgcttacatggatacccaggacgtagctcgactaacgtttatagctatgcggaatgagaaggccaacaagaaactcatgacctttgctggcccacgagcttggacaactcaagaggtgattactttgtgtgagaggttagctgggcaagatgccaatgtaaccactgtacctgttgcagtcttgagatttactcgtcagttgacacggtgcttccaatggacaaatgatgtggctgacagactggcattttcagaggtgctctcaagtgacacagttttctctgctccaatgaatgagacctaccagcttcttggggtggatgggaatgacatcctcagcttagagaagtatttacaagattattttaccaacattttgaagaagttaaaggatctcaaggcacaatccaagcaaactgatatattcttttgatataggaaggatttctgtgacctagggacataattacaaatctgtgtctcaaatgacagatgagtgagcacaagttttcctgtatatttgcatttttgcatgtgcaagaatgctctgtgctattagtgatgtgtatataatcttaacattttgagctatcaaagttccgaaatttgtgcaaaacagcataaagtctatggtttcacgacgtcaacttaaattatgctcaactcatggcctcatgggttctagcataactgatcaaaaagtaaagaaaagaaaagaaaaaa

SEQ ID NO: 3731 - DNA, 1652 bp, Zea Mays
cgcagaggaatcgagatccaaatcaaatcccacgccatttcacctggcagaaaaagtactactcgatcgcaatcccaccaggcgcgatgagccttcatgaacgcgagacacgcacctcgttctcctccttgaggctgagggtgccgcgcgacgggcatcggctgctccgcatcccctctccaccactcctctccaccccaaaaccccccgcggcgggccacgctaccacctgcccccgcccacgccatggcgtcgaccagcctcgccacgctgccgtcgcagctcgcctccccggtccgcctgcgccgccgcgccgcactctcctccgctagccgcccgcatttcctcctccatcgtgcaaccaaaggtggatcgcaatgcaggctggcggtgacctgcaacgcgcaggcggtggcgccgaccagctttgcgcaggggacgcccgtccggccgacgagcatactggtggtaggcgccacggggacgctggggaggcaggtggtcaggagggcgctggacgagggctacgacgttaggtgcctcgtcaggccgcgcccagcgcccgcagatttcctccgggactggggtgccaccgttgtcaatgccgaccttagcaagccggagaccatacctgcgacccttgttggtattcatgccgtcattgactgtgcgacaggacggccagaagagcccatccggacggtagactgggaaggaaaagttgctctaatacagtgtgcaaaggctatgggaattcaaaagtatgtgttctattccatccacaactgtgacaagcatcctgaggttcccttgatggaaatcaagtattgtactgagaaatttattcaggacagtggtctggattatatcatcatccgtttgtgtggtttcatgcagggtcttattgggcaatatgctgttcctatactagaagagaagtccgtctggggaactgatgctccaactcggattgcttacatggatacccaggccaacaagaaactcatgacctttgctggcccacgagcttggacaactcaagaggtgattactttgtgtgagaggttagctgggcaagatgccaatgtaaccactgtacctgttgcagtcttgagatttactcgtcagttgacacggtgcttccaatggacaaatgatgtggctgacagactggcattttcagaggtgctctcaagtgacacagttttctctgctccaatgaatgagacctaccagcttcttggggtggatgggaatgacatcctcagcttagagaagtatttacaagattattttaccaacattttgaagaagttaaaggatctcaaggcacaatccaagcaaactgatatattcttttgatataggaaggatttctgtgacctagggacataattacaaatctgtgtctcaaatgacagatgagtgagcacaagttttcctgtatatttgcatttttgcatgtgcaagaatgctctgtgctattagtgatgtgtatataatcttaacattttgagctatcaaagttccgaaatttgtgcaaaacagcataaagtctatggtttcacgacgtcaacttaaattatgctcaactcatggcctcatgggttctagcataactgatcaaaaagtaaagaaaagaaaagaaaaaa

SEQ ID NO: 3732 - DNA, 1881 bp, Zea Mays
gttgattcttgttgccgccattagttggagcatggcaatgtgatagatcactgggagagtgggagaatagctggcacactaaaaagaatgataaacacacgccgcgtggtgaaggaaacagattccttatgctgctgccagatctcaaaccttgagagacaacactgaggagatgaaatggcaggattctctttgtctaccattcaaaagatgctgcctcataccctctgtctataaatagggtctcgccagagacttgaatcatcaaccaaagattttcgcttctcattacttcacctcatttcaatatacatccagccagagactagagatcgacatggcttgccatcttaggtcgataagcttgccgtctaggcctcagtccggcgaagccgcagtgcagcaagagctgtgtattctagatgcaatcatctcctcgccatcaacatgtatcgtcacgatgtgtgacggtttgaggaggcttggagacatctacaacagcgttgtggagatgactcacttgccaagcaaccaagtctgctcttcccagcaaaggaagatgctggatggagaaatcgaatcttccctcgagctgctggatctctgcaacaccatgcaagagatctttgttgagttgaaggccatcatccaagagctgcaggtggctctaagaaaaggagatggcgcaaccgttcaagccaagatccagtcctacagccgcttggtgaagaaggctaagcagtctttcaagaagtcaagcaagaaggccacttctgacaaggcagactgtgcagtggtcaggctcctgaccaaggccagggagatcgccatctctctacttgagaccacggtgcagctcctgtcaaagcaaattgaggtgccgaagcagtcacttgtctcaaaggcgttttccaagagaaaagcagttgtctgcgaggaggaccagttacaggcgttagagtgcagcgttggagatctcgagagcggagcaggacacctgttcaggatattggtccagagcagggtctctctcctgaacatccttagctcatagacactccttgttgctcttgacatcctgtgattggcatccgcgtttttgaggattagctaatcttgatgcagttttgtaatatgtatagagtacaaatgtatagggggggaaatcggaaaggaaaaaaaaagacacagttttgatccaattcatttttgttgacgtgattttgtgcattcagtaaggattgctttgttttcggatgcttaatttgtggatcttgccctgcgtacaagaagcatgccagatcacagccacaatggttaagctgaaatagcagaataaattaatcatccagattccccctaccacgttggtgcagtaaaccaaatttcagccgccctaaaccagctgaatcagccaagttgaaggcgaggcaaaggtgcgtgtcgcccttacagatcgggaggagccaaatggcatggtccgtaccagacggagttgtgtgtgtagggaccagggagctttgggggtcagtgatagaattcaacttcccgtcccctgaattggctccgccgcggctttcgaattgtagagcgctcctcgcggtcctcccacccgtttcgtcctcgtcgtcgggcgtcggcgaccccgccgccttctccacctcgaggccacggactcggctactcagcgttgcattggtggtggggtggcaccggactttatcccgccgccgccggacggcgactgtccaagggtccaactcggaacgaatgtattttctgaaaatgagattccatccttagtagagtggtagagcgatgattttgatggcaacgtgtaaggttcaggagatgttcctcatgtcaaatcaaacaaaaaat

SEQ ID NO: 3733 - DNA, 3010 bp, Zea Mays
tatttagatgattagcaaatccattttacagtaaaaaagatcagggaatcctttaaacatggacctggatcacataaaatgagatgggtagatgagagaataggctttcaagtttcaacaccactctctagactaacaattcttttattgttgcacatatttttttgtctaccataatggtctttgaggaagcaatccttcgtcccaatctgtttgggcagaaaatgcagttgtgtcacagcgcagtagtgcgtacattgtttttgtaagtagcctgaccatatcttgtattcaggtaaatgcaatgctatgctaattattcagcactataaaaattgcagaaacacgtgggtggccaagcatatacgctgctactgcacaagctaatccaccctgtaatgatgtgattatattggaatcgagtgattaaatgcgactaacttgggaacctggtgctggaggcgagcaagggcatctagctgttccttcctccactgacaacttgtctgttcatccatcatctcgtgatctggatcagatgctcatcttgctgcccttcaaccgtgcaggcgagtttgccgctcatattgcagacatagcatcctcctaatcaagctaagtttgtgatgcttcttgggtttggtggcttctgcggaagttcaccagttgggtacacatgagaacgattcttgctgtctgctgggtgctggctcagctatgcagttgcttccacctccttcgctttcgctatataaagaggaaagacagagccaggaagaccaccattgcagcaccttgccttctcttccccatttcaagagaaaaaagaagcttcacaacttcagcttccattcaaagacatggcttgccaccttaggtccgcgagtgtgccttccagccctcgttccaacaaagccaacatcgatgaacagctgcagagcctgaaggcaaccatctcctcaccttcagtggccattgaaaccatggttgacggtctcaacaagatggtgggcatctacagctgcattgacgagctcacatccttggccggcaaccaacgtcagcagaggaaggcagtggaggaggagctcgatcgctcccttgtcctgcttgacctctgcaacgccatgcaagagaactttgcagagctcagggtcagcgtccaggagatgcagctggctctcaagagaggagacgacgtgtctcttcaggccaaggttcagtcttacgctcgcttggccaagaaggcacagaagcagttcaagaagatcagcagcaaggctgcctctgacattgaaggatgcaagatagtcaggctgttggctgaagcaagggagattgctgtgtcgatgctcgaatcgacatcacatctcctctcgaagaagatcacgttgcccagcgctagcaagtggtctcttgtgtccaaggcatttgagaagaagaaattcgtgtgcaaggaggagcaattgcaggcgttggagttggacattgttgatcttgagagcggagttgcgactttgttcaggacgctgatccagagcagagtctctcttctgaacactctcactttgtagatagatcatacaacaactctagtgcctgcgattagcatccgtgttttagaggatctgctgatcatcgaaacaattttgatgtatatatatgagagtgtacagaaatatactcaactggaaatcgatgttttgggtctattttcctgctgtcaattttcgctttccatctttcatctcgttcaacatggaggacagctaaataaaaaaaaacaatcaatgaaatgggagtgctgcagttgaagtttcttcagaaaaataaactatcataaggtgctgatgattcggtccattatcggcctgttaattttaacgatagacataagatcctaataaagtggatcttgctcctttaactgatagcatgccaactctagccatgagatttgcacatgcaactaatagttgttcagcattcggtaaggtgccaacgcataagaaatttggaaggcatgtgatcatcttgaaattgcaggattcagattctaaatgcttaacgcacagcaggcaggagaaacagaccagcctgtcagtgtcatgaagtaccaagaacgctgaagtcaactgttccttccactagcaatctagcatgtatcaaccagcctagcctagccaacagctgcacaactttgctctccaatctcacgatctgaatcttacactaaactatgcacccgtgcagatggttttgctgccagttattgaaacatccaatacaactctttttattaccatactgtttttttgggtgcaaactgatttggagaggtctataaatatcccttttatgcttgttctaacaactgttgtggactgaaggtaaacttgtgtcagggtgaaatatcaggcattgatgaggcattagaaatcactagttagatgttcgtgcattactacgttttttatatatcatctaaatagactcgtataaatgagatagtcatttaaaaaaatgacatcaaacctccacattttgtttaatgtttccctatttttgtctagaggacatatctagtgcacatggaagcttagtacatatggtgcatatattaaatcatcaccactcatcttatatctaacgtctctagttgattattgcaatttataaataacacattccaccactacactccaccacgttggagggtgtgattagtaaaatataccaaacaactacatacgttagatataagatgaatgctgatgatttaatatgtgcactaaacttccatgtacaccagatatgttctcttttgtctattaccatagctcgtttgaaaagttacattgattacaggaaaacaataggttaacatgaaaaaggccaaagccacaaaatcagaaatagaatggttcaattcaatttctactctctttccattagacaagtttcgattatgcttccctttgaacagcttgagcgcttgtgttacagctgt

SEQ ID NO: 3734 - DNA, 2365 bp, Zea Mays
cttcgatccctccttgtacgtccaaccaaacacacctattattcaaagcaaataaatgtatgccaattctaaatgccataattgaatgaaaaaatgaagttacagcatgcaaaggtgagtttgcttactcgagttgcttggctgagagtagggctagaaaataagctcgaggctcccgagccggctcgagctcggagcggctcggctcggagcggctcgcgagcctcgaacgagccgagccgagccccttctttgagctcgtttttgcagcgagccgagccgagccggcttgttccggctcgcgagccttgcaaaaatgatcaatttatgaaataataatgaatattagataattttatagataatagctcattttttagtcttcgatgatgaatatattacaagttataatttaatttactcataatgttcaatgatgattctatatttcaaatttatataatgttaattcaccaaataatgcaacgataagtaccagaatatggctcgcgagtcaaggtcgagccgagcctctttcgccagctcgtggaatggacgagccgagcccagctcgttcaggcaccaagccgcaccgagccgagctcggctcgtttctagccctagctgagagtcactaacttagacaatttctcttcattgtatgtgtgcggggatgtctttctctgaagatacagtggtgattgattggtgaattcaattacaaattgaatttgtgaatatccggataaatgcactaaacttaaagaatatatatctaagagccttctcaagaactacaactagaagaaacagaaactataaataggtggccaacaataattcgcttatcttgtaagaagggcactgaaacttcaccagctcggcacctcccactcatggaacattgtcctttatgtcaatcatgcactgcataggaccatgaaaagcattaggcacaaccatgtcagatgcttgtcaaaaatatagatagattatgtctagccaaccaggctaagatataatagcttgaatacacaaagaacgatatactcttttgcaacaaatttacttagtggtatagagacaagcattaagcaatgcaaagacatgtgttatgcattttaggatcataagtcaccaatgcaacgacatgtattatgttggtagaacaataatataatatagttgttcagagaaagcacttggaatcaacaaaatatatacaatcactatttcacaactcaatctcttgcatatgaacactaggacacaacaatctcctaaaaatgttaaggacatgaggctccacgaagctgtgataatcacgaaggaaatataaaactgaaataagaatatatagatagatcaaactgaaaatagtgatatgtccaagtggtcatatgtccaagtgaccaggggaaagcaagagataacctgttcaaaagcctaaccacaggcggcagcccgctgtcacgatggcatcaaaagtgacagaagagaaacatgacagaattagctcatgggatcaaatgtaccatggacatctctttatgagaaatgagatggcttttgatacaacatatgtccatgagaaatgtgacagaattaacttttgatcccataagcacggatctatagtttttacagaagagaattagcttttaatacagcaattttatgtcattccttacaaatttcgatcttctacagaagagatttgaaaaaaaaattacctgtgaattcagatcaccacagtcggtaacatgtcatttagctaaaacaaataggtaatagcagagtttggaaaacagatagacaggttttgggtttgaaaaatgcacaaatgaatctcaaatgcagaaaactattatatgtacatagctgtaagccataagattggaggagcttatagctgaatgatgcagcaaacaaatgatccaggacgcatccatcagttttatcttagtttgttctaatcagaggcttaatcctgcttacaatgaggttatattggaatccactaatcttaatatctacttcagcttgaactggtaatgctgactgagagaaaaaaaatgcataagcacattagctccaaaatgaattataaactaaaaaagatattgtatgtattcaaaggtaagccttatctgtgtgtaaggaaagtattctccaaaaaatgacaatagaagaaggtagatgaaggggtccctcaaaattctccaagggaaatcaaaggatctaaaatagtagagtttatgttgattggaagacttccttaagtcgtttcaacatagccggtcccaagcccggtaaaggaggagggttgtgttaggtctggcaaaccaacgtaaaaaccagccaa

SEQ ID NO: 3735 - DNA, 4232 bp, Zea Mays
tgagctctgaggttttcatacggggtttcatctctagcctaccccaacgtgcttgggacaaaaggctttgttgttgttgttgttgttgttgttgttaatataatgatatgtagctttatgtggatttgagtaaaaagaaaagttcagttatgcaaaacctccggcgccagcaacagagggataatagcagagtgcttttaatagggtggcaaaagctttgccatagatttattagaagaataacataaaaagaacatagcagaatggagcactgttcttctcacattcgctttccctcttcatttcaagcatcagagctggtcagctggacagtgcttgcagactgtcttcttatctggccaagccatgtcgcgaaatgccaatgtaggtccaacatcagccctgcagaaaatgtgcccaggcatgcatggagatgctgaaacatgacagcaacgttgcatagcaatgttagctatcctgaaatgttgaagcatcatgtgcacgatgtagatctgatccaaaaaatgcatcttgtgtacgtgtttgcctccaatgattgagacatgacaggcttatacactatttagatgcctgaatcaataaattatccaaaagaaaataatcgtcctgtcgtagagatgggcagcaaagtcacaagcaactcaaccggcaagattcttcttgtctgctgattcacgtgtgtgatggttctacttctttcattatatatagagagacaccattagaacaccatacccttaccttcttctctagaaggaagatagcactgcagtttttgctgcaagaatggcttaccatctaagatctccaagtgcgctttctagcccttatatatccagagacaccattagagcaccatacccttcccttctctaaaaggaagacagcactgcagtttttgctccaagagtggcttcaagatctgcaagtgcactttctagcagttgctctcgctccaatgaaatcagtgttgaggaccagttgcagagcacaaggaaactgtatcttcagcctcttcaaccattgcaacaatttacgtgttttggagaggtttggaagcatgttcaacggcattgaggagactatgtccttgcctagcagccaagtcaaccctcgccaatctaagaaaaggaaagcagcggaggacgagcactcttttctgctactcgatctttgcagcgccatgcgtgcgagagagcacctcaggtattaaggtgggtggccatgaaaaacaattggttgtaaaaagaggagaaaacgcagaaattgaatccaacattcagtttcagtcctatatccgctttgcaaagaagatccagaagcagttcaagaagatcagtgaacagtctacttcagccaaccaggagagctgcaggatagtcaagcgggtgaaactagagacactgatagctcaaatcgccagccctactcacatatcatattgaatttaattgcagtgcaaagttctagagtggtctctcatcctccataagacattccaggagagcagagttccatgtgaagtggagcaattagaggtcttggagatagaaattgttgatctggaggctttgttcacaaagctgatccaaagcacattttcccttctcaacactgtcagcttgaagatagtcgtatcaactctgagcctgtcacatctgatttgaggattagctgatcactctatataagaagaattgtacaacaaaactgtcatttttttccaaattagggtctcctttccatcactgaatgcaaaagtcaattgaaaaaaaacattttggatgtgcgtgcgcgagtgtgatacaatgacccaaataagcatttgttcagatttttttaaatgctactccaaagatgcttgacatcagtgattgttattaaagtagttagggcgcactgtccaagttgatatttgcatggctttattatgagatggccacgttgctcagatgcaacatgttgcctctgcaacaagcagcagatccttgtccagtggatctggctatctacagccaaagcaagccagctccaacacacgaagtggagcgtgtaagtagcatgagctgtgcagaataaaatacctgctggcattggcgattgtgcaactacgtaacacgcacttcaccagtaatattgggttagagatcaataaactaatccgtggagcatgcaattgcgtcaagattggccagtagagtaactaatctgttgattcttgttgccaatagttggagcatcacaatgtgatagatcactgggagaatagctggcacactaaaaaattgataaacacacgcgtgatgaaggaaacagattccttatgctgctgccagatctcaaaccttgatagacaacactgaggagatcaagatggcaggattctctttgtctacccttcaaaagatgctgactcataccctcgctctataaaataggtcttggcaaaggcttgactcgtcaagaaaaaaatttcaccaataatacacggttagcaatcactaaactaatccgatgagcatgcaatagtgccaagaatgctgagtagaataactaacctgttgattcttgttgccaatagttggagcatgacaatgtgatagatcactggggcaatagctggcacagtaaaaaattaataaacacacgcgtgatggaggaaacagattccttatgctgctgccagatctaaaaacttgatagacagcattgagaagatgaaatggcaggattccttttgtctacccatcaaaagatgctgcctcataccctcttctctctataaataggtctcgacagagacttgattcatcaggcaaaaaaatcgcttctcatttcttccacctcatttcaataccaaaaaagtttaagccagagactatacatcgatatggcttcccatcttaggtcgataagcttgccgtctaggcttcactccagcgaagctgtagtgcaacaagagctgtgcatcctagaggcagtgatctcctcaccttccacatgtatcgtcacaatgtgtgaaagtttgaggaggcttggagacatctacagcaatgttgaagagatgactcacttgccaagcaaccaagtttgctcttcccagcaaaggaaaatgttggatgcagaaatcgaatcttctctcgagctgctggatctctgcaacaccatgcaagagatctttgttgagttgaaggccattatccaagatctgcaagtggctctaagaaaaggagatgatgccaccgttcaagccaagatccagtcttatagccgcttggtgaagaaggctaaacaatctttcaagaaggcatgcaagaaggtcactcctgccagcacagattgtgcaattatcaggctactgaccaaggctagggagatcaccatctctctacttgagtcgacgctgcagctcttgtcgaagcaaatcgaaatgcctaagcagtcgcttgtctcgaaggcattttccaagagaaaagcagctgtttgcgaggaggaccagttacaggtgttagagtccagcattggagatcttgagagcggagcaggacacctgttcaggatattggtccagagcagggtttctctcctaaacatccttagctcatagatactcctttgttgccttttgacatcctgtgattggcatccgtgtttttggggattagctgatcaattttgtaatatgtatatagtacaaatacatgtacaggaaaaaaatcagaaaggaagaaaggcatataagtttgatccatttcatgtttcccgatgtggtcttctgctgccagtatactttttattgcgatccttattttgtggatcttgctcagcgtacactaagcattccagaccagagccacgagggtggttaagctatgattagcacaataaattaatcatccacattccacttccatgtttgtgtggtataccaatatcaatgaacatttagtttttcagaacggatacaaatttctattccgagtacaggaacaattgcctcaagatgcagatcattctgttagcatgtttattactgtctatacatcacattcccgtgtatcggtgtatgcatttctatcaagaatacacaagccatccagcgccgcatgcattccatcgtgcttcagtcagaatatatctactcgattgataaatttcttaaaccccgagccccggagacaattaacaactaaggccctgttcgggccctg

SEQ ID NO: 3736 - DNA, 2253 bp, Zea Mays
agaaacggctgctggcctgggtttcggattccaagtggagcgggacacaacgaagcggtgacgaagaacaagttaacccaacctggaagcgagtaagcgaccttcttgagcgtgaagccaaaggttggacctcaccgatccgccaccacgccacgaaatcatctcctactccagcagttccgctcctcgcgccgccaccgccaccgccacgatgccggaagacgtgcagatgaacgactcggagccccagtctgcggccccagctcccgccgccgccgcggcgccggcgctctccacactacaccatctgaaggagatcgcgtccgtgatcgaggctggttctctgtccaaggaggtccgccggatctcccgcgccttccgcctcaccgtcgcgctccgccgccgccttgccgcacgggacgtctccgccttcctcgccttcgcgctacccgcgtcctccgaagcctacgggcgcctcatcgccctggtgcccaaggaagatgatactgagatggacgttgatgctgtggctccagcaactcagatttcaatcaaacatggtctccctgagattgaaatatattgctacttgcttgcactgatttttcttattgatcagaagaaatacgatgagtatgtgcaagtgtgagcattgctcgcctgaagaatctaaaccggagaactgttgatgtcttggcatctcgtctgtacttttattactcttatgtgtatgagcttaccaacagccttgctgaaatccgcgggaatctgcttgctctacacagaatggcaactttgcatcgtgacgagctcggccaggaaactctgctgaatcttctcctccgcaattacctccactacaacttgtatgatcaggcagaaaagcttagatcaaaggcacctcgttttgaagcacattccaaccaacaattctgccgatacttgttctacttgggcaaaattaggacaattcagttggagtacactgatgctaaagaaagcctcctgcaagctgctcgtaaggcaccaacaactgcccgtggttttcggatccagtgcaacaaatgggctatcatagtgaggctgctgcttggtgagattccagagaggactgttttcatgcagaaaggaatgaagaaagctctgacaccttattttgagctcacaaatgctgtcagggttggggaccttgaactgttcaggactgtcgctgacaaatttgcaagcacattcagcgcagacaggactcgcaacttgattgtgaggctgcgccacaatgtcattcgaactggactgcgcaacatcagcatttcttactcaaggatctcccttgctgacattgctaagaagctaagactagactctgagaaccctgttgctgatgcggagagcattgtagccaaggccataagagatggcgcaattgacgccaccatagatcatgcaaatggctggatggtatcgaaggaaaccggtgatgtctactctacaaatgagccacaaattgcattcaactccaggattgcgttctgcctcaacatgcacaatgaggcggtcaaggcgatgagattcccccctaattctcataaggaaaaggagagcgccgagaagcgccgagagaggcttcaacaggaggaagaactggctaagcacatggctgaggaggaggatgacgacttctaaattagctgccttttgagcaaccacttgcaattgtggacttgttggaacgcctggttaaaccctgcctctagctactcgagtcatgcaaacactgtaatgttatgttgatcagggtttttctttaaattcaatacttgagttttaatctccttgaattgttaaaccacggaatttacccaccatgcaaatggctttcttttatttcatgcattctctcctcccacttggggcttttctataatgctgtattctgtgttcaatttccgtgtcttaatttaataaaattattattggttaaagtttgattataaagtaattcaatgttgtatacgtttcaaaacggtatgctttttagcgaacagaaacgttattcaactaatttttgttagccagaactagctagatgtttctcggtccatttcaatctgtttttatactagaggtagagcaaggctagacccatgtggacctactggaaagtaattagagaaaaaactattaattaattttgtgacttattactttgagatgcgtgcaaatttatatataggagtagggtggacaagaagg

SEQ ID NO: 3737 - DNA, 2318 bp, Zea Mays
aagtggagcgggacacaacgaagcggtgacgaagaacaagttaacccaacctggaagcgagtaagcgaccttcttgagcgtgaagccaaaggttggacctcaccgatccgccaccacgccacgaaatcatctcctactccagcagttccgctcctcgcgccgccaccgccaccgccacgatgccggaagacgtgcagatgaacgactcggagccccagtctgcggccccagctcccgccgccgccgcggcgccggcgctctccacactacaccatctgaaggagatcgcgtccgtgatcgaggctggttctctgtccaaggaggtccgccggatctcccgcgccttccgcctcaccgtcgcgctccgccgccgccttgccgcacgggacgtctccgccttcctcgccttcgcgctacccgcgtcctccgaagcctacgggcgcctcatcgccctggtgcccaagttggctttcctagtccagagtgctcttttgtgatttggctttcccctgaatatggcagttgtttagcgccgctacttccttagatctgccattactagaagatgatactgagatggacgttgatgctgtggctccagcaactcagatttcaatcaaacatggtctccctgagattgaaatatattgctacttgcttgcactgatttttcttattgatcagaagaaatacgatgagtatgtgcaagtgtgagcattgctcgcctgaagaatctaaaccggagaactgttgatgtcttggcatctcgtctgtacttttattactcttatgtgtatgagcttaccaacagccttgctgaaatccgcgggaatctgcttgctctacacagaatggcaactttgcatcgtgacgagctcggccaggaaactctgctgaatcttctcctccgcaattacctccactacaacttgtatgatcaggcagaaaagcttagatcaaaggcacctcgttttgaagcacattccaaccaacaattctgccgatacttgttctacttgggcaaaattaggacaattcagttggagtacactgatgctaaagaaagcctcctgcaagctgctcgtaaggcaccaacaactgcccgtggttttcggatccagtgcaacaaatgggctatcatagtgaggctgctgcttggtgagattccagagaggactgttttcatgcagaaaggaatgaagaaagctctgacaccttattttgagctcacaaatgctgtcagggttggggaccttgaactgttcaggactgtcgctgacaaatttgcaagcacattcagcgcagacaggactcgcaacttgattgtgaggctgcgccacaatgtcattcgaactggactgcgcaacatcagcatttcttactcaaggatctcccttgctgacattgctaagaagctaagactagactctgagaaccctgttgctgatgcggagagcattgtagccaaggccataagagatggcgcaattgacgccaccatagatcatgcaaatggctggatggtatcgaaggaaaccggtgatgtctactctacaaatgagccacaaattgcattcaactccaggattgcgttctgcctcaacatgcacaatgaggcggtcaaggcgatgagattcccccctaattctcataaggaaaaggagagcgccgagaagcgccgagagaggcttcaacaggaggaagaactggctaagcacatggctgaggaggaggatgacgacttctaaattagctgccttttgagcaaccacttgcaattgtggacttgttggaacgcctggttaaaccctgcctctagctactcgagtcatgcaaacactgtaatgttatgttgatcagggtttttctttaaattcaatacttgagttttaatctccttgaattgttaaaccacggaatttacccaccatgcaaatggctttcttttatttcatgcattctctcctcccacttggggcttttctataatgctgtattctgtgttcaatttccgtgtcttaatttaataaaattattattggttaaagtttgattataaagtaattcaatgttgtatacgtttcaaaacggtatgctttttagcgaacagaaacgttattcaactaatttttgttagccagaactagctagatgtttctcggtccatttcaatctgtttttatactagaggtagagcaaggctagacccatgtggacctactggaaagtaattagagaaaaaactattaattaattttgtgacttattactttgagatgcgtgcaaatttatatataggagtagggtggacaagaagg

SEQ ID NO: 3738 - DNA, 2211 bp, Zea Mays
aagtggagcgggacacaacgaagcggtgacgaagaacaagttaacccaacctggaagcgagtaagcgaccttcttgagcgtgaagccaaaggttggacctcaccgatccgccaccacgccacgaaatcatctcctactccagcagttccgctcctcgcgccgccaccgccaccgccacgatgccggaagacgtgcagatgaacgactcggagccccagtctgcggccccagctcccgccgccgccgcggcgccggcgctctccacactacaccatctgaaggagatcgcgtccgtgatcgaggctggttctctgtccaaggaggtccgccggatctcccgcgccttccgcctcaccgtcgcgctccgccgccgccttgccgcacgggacgtctccgccttcctcgccttcgcgctacccgcgtcctccgaagcctacgggcgcctcatcgccctggtgcccaaggaagatgatactgagatggacgttgatgctgtggctccagcaactcagatttcaatcaaacatggtctccctgagattgaaatatattgctacttgcttgcactgatttttcttattgatcagaagaaatacgatgagtgtgagcattgctcgcctgaagaatctaaaccggagaactgttgatgtcttggcatctcgtctgtacttttattactcttatgtgtatgagcttaccaacagccttgctgaaatccgcgggaatctgcttgctctacacagaatggcaactttgcatcgtgacgagctcggccaggaaactctgctgaatcttctcctccgcaattacctccactacaacttgtatgatcaggcagaaaagcttagatcaaaggcacctcgttttgaagcacattccaaccaacaattctgccgatacttgttctacttgggcaaaattaggacaattcagttggagtacactgatgctaaagaaagcctcctgcaagctgctcgtaaggcaccaacaactgcccgtggttttcggatccagtgcaacaaatgggctatcatagtgaggctgctgcttggtgagattccagagaggactgttttcatgcagaaaggaatgaagaaagctctgacaccttattttgagctcacaaatgctgtcagggttggggaccttgaactgttcaggactgtcgctgacaaatttgcaagcacattcagcgcagacaggactcgcaacttgattgtgaggctgcgccacaatgtcattcgaactggactgcgcaacatcagcatttcttactcaaggatctcccttgctgacattgctaagaagctaagactagactctgagaaccctgttgctgatgcggagagcattgtagccaaggccataagagatggcgcaattgacgccaccatagatcatgcaaatggctggatggtatcgaaggaaaccggtgatgtctactctacaaatgagccacaaattgcattcaactccaggattgcgttctgcctcaacatgcacaatgaggcggtcaaggcgatgagattcccccctaattctcataaggaaaaggagagcgccgagaagcgccgagagaggcttcaacaggaggaagaactggctaagcacatggctgaggaggaggatgacgacttctaaattagctgccttttgagcaaccacttgcaattgtggacttgttggaacgcctggttaaaccctgcctctagctactcgagtcatgcaaacactgtaatgttatgttgatcagggtttttctttaaattcaatacttgagttttaatctccttgaattgttaaaccacggaatttacccaccatgcaaatggctttcttttatttcatgcattctctcctcccacttggggcttttctataatgctgtattctgtgttcaatttccgtgtcttaatttaataaaattattattggttaaagtttgattataaagtaattcaatgttgtatacgtttcaaaacggtatgctttttagcgaacagaaacgttattcaactaatttttgttagccagaactagctagatgtttctcggtccatttcaatctgtttttatactagaggtagagcaaggctagacccatgtggacctactggaaagtaattagagaaaaaactattaattaattttgtgacttattactttgagatgcgtgcaaatttatatataggagtagggtggacaagaagg

SEQ ID NO: 3739 - DNA, 2315 bp, Zea Mays
atgccttcatcgaccacgctcctcgctggctcggtattcgaccgcttcatcccgccactctacgacgacgaccgctacaccacgccacaatcgtctatcggtactatcgccaaccctgacgacgacctcctctaggagctcgatgggttggacgaggacgccgcgagcgccaacgcggctgacgatgattcagacgctgtccacgtccatgcgccgctcaaccccgacgtgatgctcgactcgaacgtcgacactagtggatcaccgtgctacccgtgcctccccgagggcgcgacgctgttccgtcggaacccggatgagaagatccacgatgggctcatcggcggcatcagccagcacatctggagcatcacggacgaggtcgaacacacgacctcagggctggtccagacgctcatcgccatcgacaggcacttcgacctcatcatcaaggcgaggatcaagcacttggatccgttacctccgctcgtccccaacaccgacgcagaggaggaggttctcacgaccacgtccaccaggtgttcgagaatgggcctcaaccgtggcgcatacttcgtccccaacctcctcgtggtctgcatcatgggcgcgcccaaatccaacgaatacagcaccaaccgcgtcctgcaccgcacgcggctacagcgccgtccgctccagcacctgaccgtcgaccctgtcagcgccgtccacggcggcgacgactatgagctgtcccacagcgagtcaggcagtgttctcgcgatcgccgcgtttcccaactcgcacgagaagatccgttgtcagctcgtcaacaggacgaggctggcccgcgacgtccgcctcatcttatccctgacatcgttgaacaaggtgctcagccttcacatgagcacacatgacttcgactgcgccagcgtcgacaggaagtcttgcttgcgggcgtacacgccgacgagcatggaggacgaggttggccacttcagcctcgacgccaaggagtacatcctggatgagcactccaagttcctcaacggcgagctcatgaaccaactcctggacccgctccccctcgatccttacatcgaagctgctctatccccgttaatgcgtgcagcgtcagcatctgatcgggtgtcttcgctgaagaattatcaccacacactagggttatgcgaccattgggctgagaagaggtttaatggtcacaaatgtgtgcagttccacgccatcgaagaggcatcgtttgtcaaggaaatcacgacaatcgtttgtcgagctggttcaggaattggtgttgctaacagatctgcgtgggagggcgagggccgcggcgattccaccttcaccgtggcgagattagcggggtggggggcgaagacgttctcggacccgcttcgcgctctgcctcgccgcggcgttctcctcctcgtcatctccccgactccccctgtcaacaataccgtcttctccccgctttctctcgacgtcgcgctcagcctcctcgccgccggctcgggcggcgccacgcgcgaccagctgctcgccgcgctcggcggaagcgatgggccggacgcggccgacaacctgcacgcgctcgccgagcaggtggcgcgggtcgtgatggccgacgggtccgaggcgggcggcccgcggatcgtgttcgcggacgccgtcttcgccgacgcgtcgttgaagctgaagccggccttcgaggaggtcgccgtgggaaagtacagggggccgagatccactccgtcgacttccagaaaaaggccgcagaagctgctgctcaagtgaacgcatgggcagagaaggccaccggctgctcaaagctttgagcagctcggacgcttcgaacccagaggactccggcttccacaggttgtccgagctgcccaaagctttggggctccggctgccttttagcccggaagaagcagatctgtcagggctcgtcgctgatccgcccgtgccacccaggttctctgtctcgtcgtccgtcttccacaggtcagttgtggaagggaccgaggctgctgcggcatcggcggtcgtaatgaggaggggtgctgcgcgtgggagccgcagggtgtggtgctgttcgtcggccatgtggtcaatcccctaatcgcttgaacgcataataagtggctttgtcttgtctgaaacaaacaaaggttgtgggatgatccatgtagctcatgactgcttcgctgcgtactccgtatgatgaattgatgattgcgtatcaggctcaatgccgagttttattttgttaatttttttaaattaggagggaaacaaacaagccg

SEQ ID NO: 3740 - DNA, 910 bp, Zea Mays
tgcgccgtgttctgccgcgcctacgctcccaccgcgtgtccgcagctctgccccacctcacatctgcgcccgcaatccacgcctccgtcgccgcagcccttcctccacgcagcgtccgtccatccatggctctccctacacgcagcgtcgtgccgctttccgcaatccgtgccttaatccccttccttcgcgcagcacccttccatccatggctcgcttccagaaatccccctacctacggcgcagcgtcgcagtccggaatccacccccaaaatcactacccactctgcggcgatggaagggaatcgaaacgcgtgcttcccccttccatcctcggcgttgcgcggattgcatggccatcgtttcgcgcccccaatccgtcgatgcaaggaacacgtgcttcccccttccatcctcgacgctgcgcgaattgcagattgcgaattgcatggtcatcgtttcgccccagttcattgcccgcatcagatggaagggcgccccgatctgcctcacctccatcaatgaggtgtctgcctttcttgcatggagacgccaaagagaaggaaccagtcactaagtcggcctctgtacggtccatgaacacacatcaacggagcgtgatgtccgctccggttcagacttcacctccttgaatgtttccgacatgagcgccgagtcgataaggaggacacagtaccccagcttcactgaccgcccatctaacctgagggtgttctcctttgctgaattgaagagtgccacccgcaacttccgccggtctctcatggttggctagggtggctttggctgtgtgtacaggggtgtcatcaagacctccgacgatctgaacgaacgaatcgagatcgctgttaagcagttgaatcgtaaaggacttcagggtccaattttg

SEQ ID NO: 3741 - DNA, 1710 bp, Zea Mays
tgcgccgtgttctgccgcgcctacgctcccaccgcgtgtccgcagctctgccccacctcacatctgcgcccgcaatccacgcctccgtcgccgcagcccttcctccacgcagcgtccgtccatccatggctctccctacacgcagcgtcgtgccgctttccgcaatccgtgccttaatccccttccttcgcgcagcacccttccatccatggctcgcttccagaaatccccctacctacggcgcagcgtcgcagtccggaatccacccccaaaatcactacccactctgcggcgatggaagggaatcgaaacgcgtgcttcccccttccatcctcggcgttgcgcggattgcatggccatcgtttcgcgcccccaatccgtcgatgcaaggaacacgtgcttcccccttccatcctcgacgctgcgcgaattgcagattgcgaattgcatggtcatcgtttcgccccagttcattgcccgcatcagatggaagggcgccccgatctgcctcacctccatcaatgaggtgtctgcctttcttgcatggagacgccaaagagaaggaaccagtcactaagtcggcctctgtacggtccatgaacacacatcaacggagcgtgatgtccgctccggttcagacttcacctccttgaatgtttccgacatgagcgccgagtcgataaggaggacacagtaccccagcttcactgaccgcccatctaacctgagggtgttctcctttgctgaattgaagagtgccacccgcaacttccgccggtctctcatggttggctagggtggctttggctgtgtgtacaggggtgtcatcaagacctccgacgatctgaacgaacgaatcgagatcgctgttaagcagttgaatcgtaaaggacttcagggaagagacgacgacatggatgtagattccattctttgtgtgagcactaccgccatatagttgacaacgatgaccgacactgtagattccattctttgtgtgtacaccaaggtatcggtgtctacgttgatctggcgatgcgcttttcacggttactgcgaccgtgatgggcatctaggtgctcaaaccattagttggactgaggaacacggagcagcagcaacaatatcgtaaggagagtgcagaagttggacaaatggtatgccatatcttcagttctcttatgatgcttcagcgctacatcttcagttttctcggctaaaaagagatcatagtcaatagtatacctatgtgtgaaagcgctatgctatttgcttgtttgctgggagaaagaaaagatagatgaaggaagtagctcttccactactggagcaattgctggtggagtggttgctggcgcagccttgctatttgctgttcctgctatcagttttgcctattggcggcacaggaaaccacaagagcattttttcaatgtatatggcttcaaagttagtctttgattattatctttcttgcaacataagggcaaacaacgtttatatgtagcaaacaaatacagtttgcaaacgttttaggaacatgtttttacaataaagatatacttatagtttcaccaatggatggccaaaaaatacaaccttttacatttgtcaaccttttagttcaggaaatatagaacaacagcaagtagattttgataaacccattagaatctcaatataaatatagaatatcgacctctattcttt

SEQ ID NO: 3742 - DNA, 2276 bp, Zea Mays
tgcgccgtgttctgccgcgcctacgctcccaccgcgtgtccgcagctctgccccacctcacatctgcgcccgcaatccacgcctccgtcgccgcagcccttcctccacgcagcgtccgtccatccatggctctccctacacgcagcgtcgtgccgctttccgcaatccgtgccttaatccccttccttcgcgcagcacccttccatccatggctcgcttccagaaatccccctacctacggcgcagcgtcgcagtccggaatccacccccaaaatcactacccactctgcggcgatggaagggaatcgaaacgcgtgcttcccccttccatcctcggcgttgcgcggattgcatggccatcgtttcgcgcccccaatccgtcgatgcaaggaacacgtgcttcccccttccatcctcgacgctgcgcgaattgcagattgcgaattgcatggtcatcgtttcgccccagttcattgcccgcatcagatggaagggcgccccgatctgcctcacctccatcaatgaggtgtctgcctttcttgcatggagacgccaaagagaaggaaccagtcactaagtcggcctctgtacggtccatgaacacacatcaacggagcgtgatgtccgctccggttcagacttcacctccttgaatgtttccgacatgagcgccgagtcgataaggaggacacagtaccccagcttcactgaccgcccatctaacctgagggtgttctcctttgctgaattgaagagtgccacccgcaacttccgccggtctctcatggttggctagggtggctttggctgtgtgtacaggggtgtcatcaagacctccgacgatctgaacgaacgaatcgagatcgctgttaagcagttgaatcgtaaaggacttcagggaagagacgacgacatggatgtagattccattctttgtgtgagcactaccgccatatagttgacaacgatgaccgacactgtagattccattctttgtgtgtacaccaaggtatcggtgtctacgttgatctggcgatgcgcttttcacggttactgcgaccgtgatgggcatctaggtgctcaaaccattagttggactgaggaacacggagcagcagcaacaatatcgtaaggagagtgcagaagttggacaaatggagttaaagtgcacatacctaatcaagtctgtgggtctccaattctgaaatagaaagataatttatgttctcatctttctgaaatgaacaagatgactggcttctgggttaaggttttttatagagcaccatgacttatcagttttgtgaacaaccctaacttatgtggtcctgacaccacaaaaccttgtcctgatgctcctcccttttctccacctcctccatacaaccctacaaccccgatgcaatcaccaggtgatttatttagattgtccagtgaaatccttgagttcaataggacctttccttccttactctttcatctaaatgacatcctaattgggaaaatgtatacctccaaaacaagcataatgttgtcaaggctggagagcggtaaggaataactgcacgttttcctgaaaattaagttgaaaataatttgtaatcaggagctagagcgttacatggtactatgactatgtgctgctattagtctgtggctcagcggtatgtgtgttgtactgctattaatttgctatactagaatactggaatacaataggaagctactaacctgtacctcgtgggatgcaggaatgcagaataagtcaataactaccttgtccttttggttttccctaccctacattagtacgggagtgattaagggtatggaacatatggctttgttgttgacatcttttattttgtgcaggaagtagctcttccactactggagcaattgctggtggagtggttgctggcgcagccttgctatttgctgttcctgctatcagttttgcctattggcggcacaggaaaccacaagagcattttttcaatgtatatggcttcaaagttagtctttgattattatctttcttgcaacataagggcaaacaacgtttatatgtagcaaacaaatacagtttgcaaacgttttaggaacatgtttttacaataaagatatacttatagtttcaccaatggatggccaaaaaatacaaccttttacatttgtcaaccttttagttcaggaaatatagaacaacagcaagtagattttgataaacccattagaatctcaatataaatatagaatatcgacctctattcttt

SEQ ID NO: 3743 - DNA, 2774 bp, Zea Mays
tgcgccgtgttctgccgcgcctacgctcccaccgcgtgtccgcagctctgccccacctcacatctgcgcccgcaatccacgcctccgtcgccgcagcccttcctccacgcagcgtccgtccatccatggctctccctacacgcagcgtcgtgccgctttccgcaatccgtgccttaatccccttccttcgcgcagcacccttccatccatggctcgcttccagaaatccccctacctacggcgcagcgtcgcagtccggaatccacccccaaaatcactacccactctgcggcgatggaagggaatcgaaacgcgtgcttcccccttccatcctcggcgttgcgcggattgcatggccatcgtttcgcgcccccaatccgtcgatgcaaggaacacgtgcttcccccttccatcctcgacgctgcgcgaattgcagattgcgaattgcatggtcatcgtttcgccccagttcattgcccgcatcagatggaagggcgccccgatctgcctcacctccatcaatgaggtgtctgcctttcttgcatggagacgccaaagagaaggaaccagtcactaagtcggcctctgtacggtccatgaacacacatcaacggagcgtgatgtccgctccggttcagacttcacctccttgaatgtttccgacatgagcgccgagtcgataaggaggacacagtaccccagcttcactgaccgcccatctaacctgagggtgttctcctttgctgaattgaagagtgccacccgcaacttccgccggtctctcatggttggctagggtggctttggctgtgtgtacaggggtgtcatcaagacctccgacgatctgaacgaacgaatcgagatcgctgttaagcagttgaatcgtaaaggacttcagggaagagacgacgacatggatgtagattccattctttgtgtgagcactaccgccatatagttgacaacgatgaccgacactgtagattccattctttgtgtgtacaccaaggtatcggtgtctacgttgatctggcgatgcgcttttcacggttactgcgaccgtgatgggcatctaggtgctcaaaccattagttggactgaggaacacggagcagcagcaacaatatcgtaaggagagtgcagaagttggacaaatggtatgccatatcttcagttctcttatgatgcttcagcgctacatcttcagttttctcggctaaaaagagatcatagtcaatagtatacctatgtgtgaaagcgctatgctatttgcttgtttgctgggagaaagaaaagatagatgaaggtaattatacaatttctaatacattgttcagcttttgttatttctgccatatgatacacactggtcatgaggacatgtcgattgtagttcactggtattgtttttttaaaggaagcggcaaaagacttgcctcttcattgtattagattaggaaaaataagataatccacaggaccgaaacacacaccggaagagaaaaaaaaacaaaatcaaaatacaaaaaaagttcactggtattgtaagctttgcagataagagcacaactttttccctcttttctaaaagggaagctcatgttcatttcagcaattcagcttcaaccatttggcattcatgtaatatttcacaggagttaaagtgcacatacctaatcaagtctgtgggtctccaattctgaaatagaaagataatttatgttctcatctttctgaaatgaacaagatgactggcttctgggttaaggttttttatagagcaccatgacttatcagttttgtgaacaaccctaacttatgtggtcctgacaccacaaaaccttgtcctgatgctcctcccttttctccacctcctccatacaaccctacaaccccgatgcaatcaccaggtgatttatttagattgtccagtgaaatccttgagttcaataggacctttccttccttactctttcatctaaatgacatcctaattgggaaaatgtatacctccaaaacaagcataatgttgtcaaggctggagagcggtaaggaataactgcacgttttcctgaaaattaagttgaaaataatttgtaatcaggagctagagcgttacatggtactatgactatgtgctgctattagtctgtggctcagcggtatgtgtgttgtactgctattaatttgctatactagaatactggaatacaataggaagctactaacctgtacctcgtgggatgcaggaatgcagaataagtcaataactaccttgtccttttggttttccctaccctacattagtacgggagtgattaagggtatggaacatatggctttgttgttgacatcttttattttgtgcaggaagtagctcttccactactggagcaattgctggtggagtggttgctggcgcagccttgctatttgctgttcctgctatcagttttgcctattggcggcacaggaaaccacaagagcattttttcaatgtatatggcttcaaagttagtctttgattattatctttcttgcaacataagggcaaacaacgtttatatgtagcaaacaaatacagtttgcaaacgttttaggaacatgtttttacaataaagatatacttatagtttcaccaatggatggccaaaaaatacaaccttttacatttgtcaaccttttagttcaggaaatatagaacaacagcaagtagattttgataaacccattagaatctcaatataaatatagaatatcgacctctattcttt

SEQ ID NO: 3744 - DNA, 1816 bp, Zea Mays
tgcgccgtgttctgccgcgcctacgctcccaccgcgtgtccgcagctctgccccacctcacatctgcgcccgcaatccacgcctccgtcgccgcagcccttcctccacgcagcgtccgtccatccatggctctccctacacgcagcgtcgtgccgctttccgcaatccgtgccttaatccccttccttcgcgcagcacccttccatccatggctcgcttccagaaatccccctacctacggcgcagcgtcgcagtccggaatccacccccaaaatcactacccactctgcggcgatggaagggaatcgaaacgcgtgcttcccccttccatcctcggcgttgcgcggattgcatggccatcgtttcgcgcccccaatccgtcgatgcaaggaacacgtgcttcccccttccatcctcgacgctgcgcgaattgcagattgcgaattgcatggtcatcgtttcgccccagttcattgcccgcatcagatggaagggcgccccgatctgcctcacctccatcaatgaggtgtctgcctttcttgcatggagacgccaaagagaaggaaccagtcactaagtcggcctctgtacggtccatgaacacacatcaacggagcgtgatgtccgctccggttcagacttcacctccttgaatgtttccgacatgagcgccgagtcgataaggaggacacagtaccccagcttcactgaccgcccatctaacctgagggtgttctcctttgctgaattgaagagtgccacccgcaacttccgccggtctctcatggttggctagggtggctttggctgtgtgtacaggggtgtcatcaagacctccgacgatctgaacgaacgaatcgagatcgctgttaagcagttgaatcgtaaaggacttcagggaagagacgacgacatggatgtagattccattctttgtgtgagcactaccgccatatagttgacaacgatgaccgacactgtagattccattctttgtgtgtacaccaaggtatcggtgtctacgttgatctggcgatgcgcttttcacggttactgcgaccgtgatgggcatctaggtgctcaaaccattagttggactgaggaacacggagcagcagcaacaatatcgtaaggagagtgcagaagttggacaaatggagttaaagtgcacatacctaatcaagtctgtgggtctccaattctgaaatagaaagataatttatgttctcatctttctgaaatgaacaagatgactggcttctgggttaaggttttttatagagcaccatgacttatcagttttgtgaacaaccctaacttatgtggtcctgacaccacaaaaccttgtcctgatgctcctcccttttctccacctcctccatacaaccctacaaccccgatgcaatcaccaggaagtagctcttccactactggagcaattgctggtggagtggttgctggcgcagccttgctatttgctgttcctgctatcagttttgcctattggcggcacaggaaaccacaagagcattttttcaatgtatatggcttcaaagttagtctttgattattatctttcttgcaacataagggcaaacaacgtttatatgtagcaaacaaatacagtttgcaaacgttttaggaacatgtttttacaataaagatatacttatagtttcaccaatggatggccaaaaaatacaaccttttacatttgtcaaccttttagttcaggaaatatagaacaacagcaagtagattttgataaacccattagaatctcaatataaatatagaatatcgacctctattcttt

SEQ ID NO: 3745 - DNA, 2331 bp, Zea Mays
tgcgccgtgttctgccgcgcctacgctcccaccgcgtgtccgcagctctgccccacctcacatctgcgcccgcaatccacgcctccgtcgccgcagcccttcctccacgcagcgtccgtccatccatggctctccctacacgcagcgtcgtgccgctttccgcaatccgtgccttaatccccttccttcgcgcagcacccttccatccatggctcgcttccagaaatccccctacctacggcgcagcgtcgcagtccggaatccacccccaaaatcactacccactctgcggcgatggaagggaatcgaaacgcgtgcttcccccttccatcctcggcgttgcgcggattgcatggccatcgtttcgcgcccccaatccgtcgatgcaaggaacacgtgcttcccccttccatcctcgacgctgcgcgaattgcagattgcgaattgcatggtcatcgtttcgccccagttcattgcccgcatcagatggaagggcgccccgatctgcctcacctccatcaatgaggtgtctgcctttcttgcatggagacgccaaagagaaggaaccagtcactaagtcggcctctgtacggtccatgaacacacatcaacggagcgtgatgtccgctccggttcagacttcacctccttgaatgtttccgacatgagcgccgagtcgataaggaggacacagtaccccagcttcactgaccgcccatctaacctgagggtgttctcctttgctgaattgaagagtgccacccgcaacttccgccggtctctcatggttggctagggtggctttggctgtgtgtacaggggtgtcatcaagacctccgacgatctgaacgaacgaatcgagatcgctgttaagcagttgaatcgtaaaggacttcagggaagagacgacgacatggatgtagattccattctttgtgtgagcactaccgccatatagttgacaacgatgaccgacactgtagattccattctttgtgtgtacaccaaggtatcggtgtctacgttgatctggcgatgcgcttttcacgaatatttgcgtctttaggttactgcgaccgtgatgggcatctaggtgctcaaaccattagttggactgaggaacacggagcagcagcaacaatatcgtaaggagagtgcagaagttggacaaatggtatgccatatcttcagttctcttatgatgcttcagcgctacatcttcagttttctcggctaaaaagagatcatagtcaatagtatacctatgtgtgaaagcgctatgctatttgcttgtttgctgggagaaagaaaagatagatgaaggtaattatacaatttctaatacattgttcagcttttgttatttctgccatatgatacacactggtcatgaggacatgtcgattgtagttcactggtattgtttttttaaaggaagcggcaaaagacttgcctcttcattgtattagattaggaaaaataagataatccacaggaccgaaacacacaccggaagagaaaaaaaaacaaaatcaaaatacaaaaaaagttcactggtattgtaagctttgcagataagagcacaactttttccctcttttctaaaagggaagctcatgttcatttcagcaattcagcttcaaccatttggcattcatgtaatatttcacaggagttaaagtgcacatacctaatcaagtctgtgggtctccaattctgaaatagaaagataatttatgttctcatctttctgaaatgaacaagatgactggcttctgggttaaggttttttatagagcaccatgacttatcagttttgtgaacaaccctaacttatgtggtcctgacaccacaaaaccttgtcctgatgctcctcccttttctccacctcctccatacaaccctacaaccccgatgcaatcaccaggaagtagctcttccactactggagcaattgctggtggagtggttgctggcgcagccttgctatttgctgttcctgctatcagttttgcctattggcggcacaggaaaccacaagagcattttttcaatgtatatggcttcaaagttagtctttgattattatctttcttgcaacataagggcaaacaacgtttatatgtagcaaacaaatacagtttgcaaacgttttaggaacatgtttttacaataaagatatacttatagtttcaccaatggatggccaaaaaatacaaccttttacatttgtcaaccttttagttcaggaaatatagaacaacagcaagtagattttgataaacccattagaatctcaatataaatatagaatatcgacctctattcttt

SEQ ID NO: 3746 - DNA, 2425 bp, Zea Mays
tgcgccgtgttctgccgcgcctacgctcccaccgcgtgtccgcagctctgccccacctcacatctgcgcccgcaatccacgcctccgtcgccgcagcccttcctccacgcagcgtccgtccatccatggctctccctacacgcagcgtcgtgccgctttccgcaatccgtgccttaatccccttccttcgcgcagcacccttccatccatggctcgcttccagaaatccccctacctacggcgcagcgtcgcagtccggaatccacccccaaaatcactacccactctgcggcgatggaagggaatcgaaacgcgtgcttcccccttccatcctcggcgttgcgcggattgcatggccatcgtttcgcgcccccaatccgtcgatgcaaggaacacgtgcttcccccttccatcctcgacgctgcgcgaattgcagattgcgaattgcatggtcatcgtttcgccccagttcattgcccgcatcagatggaagggcgccccgatctgcctcacctccatcaatgaggtgtctgcctttcttgcatggagacgccaaagagaaggaaccagtcactaagtcggcctctgtacggtccatgaacacacatcaacggagcgtgatgtccgctccggttcagacttcacctccttgaatgtttccgacatgagcgccgagtcgataaggaggacacagtaccccagcttcactgaccgcccatctaacctgagggtgttctcctttgctgaattgaagagtgccacccgcaacttccgccggtctctcatggttggctagggtggctttggctgtgtgtacaggggtgtcatcaagacctccgacgatctgaacgaacgaatcgagatcgctgttaagcagttgaatcgtaaaggacttcagggaagagacgacgacatggatgtagattccattctttgtgtgagcactaccgccatatagttgacaacgatgaccgacactgtagattccattctttgtgtgtacaccaaggtatcggtgtctacgttgatctggcgatgcgcttttcacggttactgcgaccgtgatgggcatctaggtgctcaaaccattagttggactgaggaacacggagcagcagcaacaatatcgtaaggagagtgcagaagttggacaaatggtatgccatatcttcagttctcttatgatgcttcagcgctacatcttcagttttctcggctaaaaagagatcatagtcaatagtatacctatgtgtgaaagcgctatgctatttgcttgtttgctgggagaaagaaaagatagatgaaggagttaaagtgcacatacctaatcaagtctgtgggtctccaattctgaaatagaaagataatttatgttctcatctttctgaaatgaacaagatgactggcttctgggttaaggttttttatagagcaccatgacttatcagttttgtgaacaaccctaacttatgtggtcctgacaccacaaaaccttgtcctgatgctcctcccttttctccacctcctccatacaaccctacaaccccgatgcaatcaccaggtgatttatttagattgtccagtgaaatccttgagttcaataggacctttccttccttactctttcatctaaatgacatcctaattgggaaaatgtatacctccaaaacaagcataatgttgtcaaggctggagagcggtaaggaataactgcacgttttcctgaaaattaagttgaaaataatttgtaatcaggagctagagcgttacatggtactatgactatgtgctgctattagtctgtggctcagcggtatgtgtgttgtactgctattaatttgctatactagaatactggaatacaataggaagctactaacctgtacctcgtgggatgcaggaatgcagaataagtcaataactaccttgtccttttggttttccctaccctacattagtacgggagtgattaagggtatggaacatatggctttgttgttgacatcttttattttgtgcaggaagtagctcttccactactggagcaattgctggtggagtggttgctggcgcagccttgctatttgctgttcctgctatcagttttgcctattggcggcacaggaaaccacaagagcattttttcaatgtatatggcttcaaagttagtctttgattattatctttcttgcaacataagggcaaacaacgtttatatgtagcaaacaaatacagtttgcaaacgttttaggaacatgtttttacaataaagatatacttatagtttcaccaatggatggccaaaaaatacaaccttttacatttgtcaaccttttagttcaggaaatatagaacaacagcaagtagattttgataaacccattagaatctcaatataaatatagaatatcgacctctattcttt

SEQ ID NO: 3747 - DNA, 2060 bp, Zea Mays
tgcgccgtgttctgccgcgcctacgctcccaccgcgtgtccgcagctctgccccacctcacatctgcgcccgcaatccacgcctccgtcgccgcagcccttcctccacgcagcgtccgtccatccatggctctccctacacgcagcgtcgtgccgctttccgcaatccgtgccttaatccccttccttcgcgcagcacccttccatccatggctcgcttccagaaatccccctacctacggcgcagcgtcgcagtccggaatccacccccaaaatcactacccactctgcggcgatggaagggaatcgaaacgcgtgcttcccccttccatcctcggcgttgcgcggattgcatggccatcgtttcgcgcccccaatccgtcgatgcaaggaacacgtgcttcccccttccatcctcgacgctgcgcgaattgcagattgcgaattgcatggtcatcgtttcgccccagttcattgcccgcatcagatggaagggcgccccgatctgcctcacctccatcaatgaggtgtctgcctttcttgcatggagacgccaaagagaaggaaccagtcactaagtcggcctctgtacggtccatgaacacacatcaacggagcgtgatgtccgctccggttcagacttcacctccttgaatgtttccgacatgagcgccgagtcgataaggaggacacagtaccccagcttcactgaccgcccatctaacctgagggtgttctcctttgctgaattgaagagtgccacccgcaacttccgccggtctctcatggttggctagggtggctttggctgtgtgtacaggggtgtcatcaagacctccgacgatctgaacgaacgaatcgagatcgctgttaagcagttgaatcgtaaaggacttcagggaagagacgacgacatggatgtagattccattctttgtgtgagcactaccgccatatagttgacaacgatgaccgacactgtagattccattctttgtgtgtacaccaaggtatcggtgtctacgttgatctggcgatgcgcttttcacgaatatttgcgtctttaggttactgcgaccgtgatgggcatctaggtgctcaaaccattagttggactgaggaacacggagcagcagcaacaatatcgtaaggagagtgcagaagttggacaaatggtatgccatatcttcagttctcttatgatgcttcagcgctacatcttcagttttctcggctaaaaagagatcatagtcaatagtatacctatgtgtgaaagcgctatgctatttgcttgtttgctgggagaaagaaaagatagatgaaggagttaaagtgcacatacctaatcaagtctgtgggtctccaattctgaaatagaaagataatttatgttctcatctttctgaaatgaacaagatgactggcttctgggttaaggttttttatagagcaccatgacttatcaggtaaagttatagttgtgcacaaaatgtcattttttaatccttaatgcgtgtgctattcacacatgtcttcttttgcagttttgtgaacaaccctaacttatgtggtcctgacaccacaaaaccttgtcctgatgctcctcccttttctccacctcctccatacaaccctacaaccccgatgcaatcaccaggaagtagctcttccactactggagcaattgctggtggagtggttgctggcgcagccttgctatttgctgttcctgctatcagttttgcctattggcggcacaggaaaccacaagagcattttttcaatgtatatggcttcaaagttagtctttgattattatctttcttgcaacataagggcaaacaacgtttatatgtagcaaacaaatacagtttgcaaacgttttaggaacatgtttttacaataaagatatacttatagtttcaccaatggatggccaaaaaatacaaccttttacatttgtcaaccttttagttcaggaaatatagaacaacagcaagtagattttgataaacccattagaatctcaatataaatatagaatatcgacctctattcttt

SEQ ID NO: 3748 - DNA, 1965 bp, Zea Mays
tgcgccgtgttctgccgcgcctacgctcccaccgcgtgtccgcagctctgccccacctcacatctgcgcccgcaatccacgcctccgtcgccgcagcccttcctccacgcagcgtccgtccatccatggctctccctacacgcagcgtcgtgccgctttccgcaatccgtgccttaatccccttccttcgcgcagcacccttccatccatggctcgcttccagaaatccccctacctacggcgcagcgtcgcagtccggaatccacccccaaaatcactacccactctgcggcgatggaagggaatcgaaacgcgtgcttcccccttccatcctcggcgttgcgcggattgcatggccatcgtttcgcgcccccaatccgtcgatgcaaggaacacgtgcttcccccttccatcctcgacgctgcgcgaattgcagattgcgaattgcatggtcatcgtttcgccccagttcattgcccgcatcagatggaagggcgccccgatctgcctcacctccatcaatgaggtgtctgcctttcttgcatggagacgccaaagagaaggaaccagtcactaagtcggcctctgtacggtccatgaacacacatcaacggagcgtgatgtccgctccggttcagacttcacctccttgaatgtttccgacatgagcgccgagtcgataaggaggacacagtaccccagcttcactgaccgcccatctaacctgagggtgttctcctttgctgaattgaagagtgccacccgcaacttccgccggtctctcatggttggctagggtggctttggctgtgtgtacaggggtgtcatcaagacctccgacgatctgaacgaacgaatcgagatcgctgttaagcagttgaatcgtaaaggacttcagggaagagacgacgacatggatgtagattccattctttgtgtgagcactaccgccatatagttgacaacgatgaccgacactgtagattccattctttgtgtgtacaccaaggtatcggtgtctacgttgatctggcgatgcgcttttcacggttactgcgaccgtgatgggcatctaggtgctcaaaccattagttggactgaggaacacggagcagcagcaacaatatcgtaaggagagtgcagaagttggacaaatggtatgccatatcttcagttctcttatgatgcttcagcgctacatcttcagttttctcggctaaaaagagatcatagtcaatagtatacctatgtgtgaaagcgctatgctatttgcttgtttgctgggagaaagaaaagatagatgaaggagttaaagtgcacatacctaatcaagtctgtgggtctccaattctgaaatagaaagataatttatgttctcatctttctgaaatgaacaagatgactggcttctgggttaaggttttttatagagcaccatgacttatcagttttgtgaacaaccctaacttatgtggtcctgacaccacaaaaccttgtcctgatgctcctcccttttctccacctcctccatacaaccctacaaccccgatgcaatcaccaggaagtagctcttccactactggagcaattgctggtggagtggttgctggcgcagccttgctatttgctgttcctgctatcagttttgcctattggcggcacaggaaaccacaagagcattttttcaatgtatatggcttcaaagttagtctttgattattatctttcttgcaacataagggcaaacaacgtttatatgtagcaaacaaatacagtttgcaaacgttttaggaacatgtttttacaataaagatatacttatagtttcaccaatggatggccaaaaaatacaaccttttacatttgtcaaccttttagttcaggaaatatagaacaacagcaagtagattttgataaacccattagaatctcaatataaatatagaatatcgacctctattcttt

SEQ ID NO: 3749 - DNA, 2184 bp, Zea Mays
tgcgccgtgttctgccgcgcctacgctcccaccgcgtgtccgcagctctgccccacctcacatctgcgcccgcaatccacgcctccgtcgccgcagcccttcctccacgcagcgtccgtccatccatggctctccctacacgcagcgtcgtgccgctttccgcaatccgtgccttaatccccttccttcgcgcagcacccttccatccatggctcgcttccagaaatccccctacctacggcgcagcgtcgcagtccggaatccacccccaaaatcactacccactctgcggcgatggaagggaatcgaaacgcgtgcttcccccttccatcctcggcgttgcgcggattgcatggccatcgtttcgcgcccccaatccgtcgatgcaaggaacacgtgcttcccccttccatcctcgacgctgcgcgaattgcagattgcgaattgcatggtcatcgtttcgccccagttcattgcccgcatcagatggaagggcgccccgatctgcctcacctccatcaatgaggtgtctgcctttcttgcatggagacgccaaagagaaggaaccagtcactaagtcggcctctgtacggtccatgaacacacatcaacggagcgtgatgtccgctccggttcagacttcacctccttgaatgtttccgacatgagcgccgagtcgataaggaggacacagtaccccagcttcactgaccgcccatctaacctgagggtgttctcctttgctgaattgaagagtgccacccgcaacttccgccggtctctcatggttggctagggtggctttggctgtgtgtacaggggtgtcatcaagacctccgacgatctgaacgaacgaatcgagatcgctgttaagcagttgaatcgtaaaggacttcagggaagagacgacgacatggatgtagattccattctttgtgtgagcactaccgccatatagttgacaacgatgaccgacactgtagattccattctttgtgtgtacaccaaggtatcggtgtctacgttgatctggcgatgcgcttttcacggttactgcgaccgtgatgggcatctaggtgctcaaaccattagttggactgaggaacacggagcagcagcaacaatatcgtaaggagagtgcagaagttggacaaatgatgactggcttctgggttaaggttttttatagagcaccatgacttatcagttttgtgaacaaccctaacttatgtggtcctgacaccacaaaaccttgtcctgatgctcctcccttttctccacctcctccatacaaccctacaaccccgatgcaatcaccaggtgatttatttagattgtccagtgaaatccttgagttcaataggacctttccttccttactctttcatctaaatgacatcctaattgggaaaatgtatacctccaaaacaagcataatgttgtcaaggctggagagcggtaaggaataactgcacgttttcctgaaaattaagttgaaaataatttgtaatcaggagctagagcgttacatggtactatgactatgtgctgctattagtctgtggctcagcggtatgtgtgttgtactgctattaatttgctatactagaatactggaatacaataggaagctactaacctgtacctcgtgggatgcaggaatgcagaataagtcaataactaccttgtccttttggttttccctaccctacattagtacgggagtgattaagggtatggaacatatggctttgttgttgacatcttttattttgtgcaggaagtagctcttccactactggagcaattgctggtggagtggttgctggcgcagccttgctatttgctgttcctgctatcagttttgcctattggcggcacaggaaaccacaagagcattttttcaatgtatatggcttcaaagttagtctttgattattatctttcttgcaacataagggcaaacaacgtttatatgtagcaaacaaatacagtttgcaaacgttttaggaacatgtttttacaataaagatatacttatagtttcaccaatggatggccaaaaaatacaaccttttacatttgtcaaccttttagttcaggaaatatagaacaacagcaagtagattttgataaacccattagaatctcaatataaatatagaatatcgacctctattcttt

SEQ ID NO: 3750 - DNA, 1561 bp, Zea Mays
tgcgccgtgttctgccgcgcctacgctcccaccgcgtgtccgcagctctgccccacctcacatctgcgcccgcaatccacgcctccgtcgccgcagcccttcctccacgcagcgtccgtccatccatggctctccctacacgcagcgtcgtgccgctttccgcaatccgtgccttaatccccttccttcgcgcagcacccttccatccatggctcgcttccagaaatccccctacctacggcgcagcgtcgcagtccggaatccacccccaaaatcactacccactctgcggcgatggaagggaatcgaaacgcgtgcttcccccttccatcctcggcgttgcgcggattgcatggccatcgtttcgcgcccccaatccgtcgatgcaaggaacacgtgcttcccccttccatcctcgacgctgcgcgaattgcagattgcgaattgcatggtcatcgtttcgccccagttcattgcccgcatcagatggaagggcgccccgatctgcctcacctccatcaatgaggtgtctgcctttcttgcatggagacgccaaagagaaggaaccagtcactaagtcggcctctgtacggtccatgaacacacatcaacggagcgtgatgtccgctccggttcagacttcacctccttgaatgtttccgacatgagcgccgagtcgataaggaggacacagtaccccagcttcactgaccgcccatctaacctgagggtgttctcctttgctgaattgaagagtgccacccgcaacttccgccggtctctcatggttggctagggtggctttggctgtgtgtacaggggtgtcatcaagacctccgacgatctgaacgaacgaatcgagatcgctgttaagcagttgaatcgtaaaggacttcagggaagagacgacgacatggatgtagattccattctttgtgtgagcactaccgccatatagttgacaacgatgaccgacactgtagattccattctttgtgtgtacaccaaggtatcggtgtctacgttgatctggcgatgcgcttttcacggttactgcgaccgtgatgggcatctaggtgctcaaaccattagttggactgaggaacacggagcagcagcaacaatatcgtaaggagagtgcagaagttggacaaatggaagtagctcttccactactggagcaattgctggtggagtggttgctggcgcagccttgctatttgctgttcctgctatcagttttgcctattggcggcacaggaaaccacaagagcattttttcaatgtatatggcttcaaagttagtctttgattattatctttcttgcaacataagggcaaacaacgtttatatgtagcaaacaaatacagtttgcaaacgttttaggaacatgtttttacaataaagatatacttatagtttcaccaatggatggccaaaaaatacaaccttttacatttgtcaaccttttagttcaggaaatatagaacaacagcaagtagattttgataaacccattagaatctcaatataaatatagaatatcgacctctattcttt

SEQ ID NO: 3751 - DNA, 1724 bp, Zea Mays
tgcgccgtgttctgccgcgcctacgctcccaccgcgtgtccgcagctctgccccacctcacatctgcgcccgcaatccacgcctccgtcgccgcagcccttcctccacgcagcgtccgtccatccatggctctccctacacgcagcgtcgtgccgctttccgcaatccgtgccttaatccccttccttcgcgcagcacccttccatccatggctcgcttccagaaatccccctacctacggcgcagcgtcgcagtccggaatccacccccaaaatcactacccactctgcggcgatggaagggaatcgaaacgcgtgcttcccccttccatcctcggcgttgcgcggattgcatggccatcgtttcgcgcccccaatccgtcgatgcaaggaacacgtgcttcccccttccatcctcgacgctgcgcgaattgcagattgcgaattgcatggtcatcgtttcgccccagttcattgcccgcatcagatggaagggcgccccgatctgcctcacctccatcaatgaggtgtctgcctttcttgcatggagacgccaaagagaaggaaccagtcactaagtcggcctctgtacggtccatgaacacacatcaacggagcgtgatgtccgctccggttcagacttcacctccttgaatgtttccgacatgagcgccgagtcgataaggaggacacagtaccccagcttcactgaccgcccatctaacctgagggtgttctcctttgctgaattgaagagtgccacccgcaacttccgccggtctctcatggttggctagggtggctttggctgtgtgtacaggggtgtcatcaagacctccgacgatctgaacgaacgaatcgagatcgctgttaagcagttgaatcgtaaaggacttcagggaagagacgacgacatggatgtagattccattctttgtgtgagcactaccgccatatagttgacaacgatgaccgacactgtagattccattctttgtgtgtacaccaaggtatcggtgtctacgttgatctggcgatgcgcttttcacggttactgcgaccgtgatgggcatctaggtgctcaaaccattagttggactgaggaacacggagcagcagcaacaatatcgtaaggagagtgcagaagttggacaaatgatgactggcttctgggttaaggttttttatagagcaccatgacttatcagttttgtgaacaaccctaacttatgtggtcctgacaccacaaaaccttgtcctgatgctcctcccttttctccacctcctccatacaaccctacaaccccgatgcaatcaccaggaagtagctcttccactactggagcaattgctggtggagtggttgctggcgcagccttgctatttgctgttcctgctatcagttttgcctattggcggcacaggaaaccacaagagcattttttcaatgtatatggcttcaaagttagtctttgattattatctttcttgcaacataagggcaaacaacgtttatatgtagcaaacaaatacagtttgcaaacgttttaggaacatgtttttacaataaagatatacttatagtttcaccaatggatggccaaaaaatacaaccttttacatttgtcaaccttttagttcaggaaatatagaacaacagcaagtagattttgataaacccattagaatctcaatataaatatagaatatcgacctctattcttt

SEQ ID NO: 3752 - DNA, 2314 bp, Zea Mays
tgcgccgtgttctgccgcgcctacgctcccaccgcgtgtccgcagctctgccccacctcacatctgcgcccgcaatccacgcctccgtcgccgcagcccttcctccacgcagcgtccgtccatccatggctctccctacacgcagcgtcgtgccgctttccgcaatccgtgccttaatccccttccttcgcgcagcacccttccatccatggctcgcttccagaaatccccctacctacggcgcagcgtcgcagtccggaatccacccccaaaatcactacccactctgcggcgatggaagggaatcgaaacgcgtgcttcccccttccatcctcggcgttgcgcggattgcatggccatcgtttcgcgcccccaatccgtcgatgcaaggaacacgtgcttcccccttccatcctcgacgctgcgcgaattgcagattgcgaattgcatggtcatcgtttcgccccagttcattgcccgcatcagatggaagggcgccccgatctgcctcacctccatcaatgaggtgtctgcctttcttgcatggagacgccaaagagaaggaaccagtcactaagtcggcctctgtacggtccatgaacacacatcaacggagcgtgatgtccgctccggttcagacttcacctccttgaatgtttccgacatgagcgccgagtcgataaggaggacacagtaccccagcttcactgaccgcccatctaacctgagggtgttctcctttgctgaattgaagagtgccacccgcaacttccgccggtctctcatggttggctagggtggctttggctgtgtgtacaggggtgtcatcaagacctccgacgatctgaacgaacgaatcgagatcgctgttaagcagttgaatcgtaaaggacttcagggaagagacgacgacatggatgtagattccattctttgtgtgagcactaccgccatatagttgacaacgatgaccgacactgtagattccattctttgtgtgtacaccaaggtatcggtgtctacgttgatctggcgatgcgcttttcacggttactgcgaccgtgatgggcatctaggtgctcaaaccattagttggactgaggaacacggagcagcagcaacaatatcgtaaggagagtgcagaagttggacaaatggtatgccatatcttcagttctcttatgatgcttcagcgctacatcttcagttttctcggctaaaaagagatcatagtcaatagtatacctatgtgtgaaagcgctatgctatttgcttgtttgctgggagaaagaaaagatagatgaaggtaattatacaatttctaatacattgttcagcttttgttatttctgccatatgatacacactggtcatgaggacatgtcgattgtagttcactggtattgtttttttaaaggaagcggcaaaagacttgcctcttcattgtattagattaggaaaaataagataatccacaggaccgaaacacacaccggaagagaaaaaaaaacaaaatcaaaatacaaaaaaagttcactggtattgtaagctttgcagataagagcacaactttttccctcttttctaaaagggaagctcatgttcatttcagcaattcagcttcaaccatttggcattcatgtaatatttcacaggagttaaagtgcacatacctaatcaagtctgtgggtctccaattctgaaatagaaagataatttatgttctcatctttctgaaatgaacaagatgactggcttctgggttaaggttttttatagagcaccatgacttatcagttttgtgaacaaccctaacttatgtggtcctgacaccacaaaaccttgtcctgatgctcctcccttttctccacctcctccatacaaccctacaaccccgatgcaatcaccaggaagtagctcttccactactggagcaattgctggtggagtggttgctggcgcagccttgctatttgctgttcctgctatcagttttgcctattggcggcacaggaaaccacaagagcattttttcaatgtatatggcttcaaagttagtctttgattattatctttcttgcaacataagggcaaacaacgtttatatgtagcaaacaaatacagtttgcaaacgttttaggaacatgtttttacaataaagatatacttatagtttcaccaatggatggccaaaaaatacaaccttttacatttgtcaaccttttagttcaggaaatatagaacaacagcaagtagattttgataaacccattagaatctcaatataaatatagaatatcgacctctattcttt

SEQ ID NO: 3753 - DNA, 1931 bp, Zea Mays
ctcgtgtcctctccagtctcaccggttttccatggagattgttccagggttagttaagcaatgaggtgtctgcctttcttgcatggagacgccaaagagaaggaaccagtcactaagtcggcctctgtacggtccatgaacacacatcaacggagcgtgatgtccgctccggttcagacttcacctccttgaatgtttccgacatgagcgccgagtcgataaggaggacacagtaccccagcttcactgaccgcccatctaacctgagggtgttctcctttgctgaattgaagagtgccacccgcaacttccgccggtctctcatggttggctagggtggctttggctgtgtgtacaggggtgtcatcaagacctccgacgatctgaacgaacgaatcgagatcgctgttaagcagttgaatcgtaaaggacttcagggaagagacgacgacatggatgtagattccattctttgtgtgagcactaccgccatatagttgacaacgatgaccgacactgtagattccattctttgtgtgtacaccaaggtatcggtgtctacgttgatctggcgatgcgcttttcacggttactgcgaccgtgatgggcatctaggtgctcaaaccattagttggactgaggaacacggagcagcagcaacaatatcgtaaggagagtgcagaagttggacaaatggtatgccatatcttcagttctcttatgatgcttcagcgctacatcttcagttttctcggctaaaaagagatcatagtcaatagtatacctatgtgtgaaagcgctatgctatttgcttgtttgctgggagaaagaaaagatagatgaaggtaattatacaatttctaatacattgttcagcttttgttatttctgccatatgatacacactggtcatgaggacatgtcgattgtagttcactggtattgtttttttaaaggaagcggcaaaagacttgcctcttcattgtattagattaggaaaaataagataatccacaggaccgaaacacacaccggaagagaaaaaaaaacaaaatcaaaatacaaaaaaagttcactggtattgtaagctttgcagataagagcacaactttttccctcttttctaaaagggaagctcatgttcatttcagcaattcagcttcaaccatttggcattcatgtaatatttcacaggagttaaagtgcacatacctaatcaagtctgtgggtctccaattctgaaatagaaagataatttatgttctcatctttctgaaatgaacaagatgactggcttctgggttaaggttttttatagagcaccatgacttatcaggtaaagttatagttgtgcacaaaatgtcattttttaatccttaatgcgtgtgctattcacacatgtcttcttttgcagttttgtgaacaaccctaacttatgtggtcctgacaccacaaaaccttgtcctgatgctcctcccttttctccacctcctccatacaaccctacaaccccgatgcaatcaccaggaagtagctcttccactactggagcaattgctggtggagtggttgctggcgcagccttgctatttgctgttcctgctatcagttttgcctattggcggcacaggaaaccacaagagcattttttcaatgtatatggcttcaaagttagtctttgattattatctttcttgcaacataagggcaaacaacgtttatatgtagcaaacaaatacagtttgcaaacgttttaggaacatgtttttacaataaagatatacttatagtttcaccaatggatggccaaaaaatacaaccttttacatttgtcaaccttttagttcaggaaatatagaacaacagcaagtagattttgataaacccattagaatctcaatataaatatagaatatcgacctctattcttt

SEQ ID NO: 3754 - DNA, 1527 bp, Zea Mays
ttggtttgtggttgtgccctctccccacatgagggaagagacgacgacatggatgtagattccattctttgtgtgagcactaccgccatatagttgacaacgatgaccgacactgtagattccattctttgtgtgtacaccaaggtatcggtgtctacgttgatctggcgatgcgcttttcacggttactgcgaccgtgatgggcatctaggtgctcaaaccattagttggactgaggaacacggagcagcagcaacaatatcgtaaggagagtgcagaagttggacaaatggtatgccatatcttcagttctcttatgatgcttcagcgctacatcttcagttttctcggctaaaaagagatcatagtcaatagtatacctatgtgtgaaagcgctatgctatttgcttgtttgctgggagaaagaaaagatagatgaaggtaattatacaatttctaatacattgttcagcttttgttatttctgccatatgatacacactggtcatgaggacatgtcgattgtagttcactggtattgtttttttaaaggaagcggcaaaagacttgcctcttcattgtattagattaggaaaaataagataatccacaggaccgaaacacacaccggaagagaaaaaaaaacaaaatcaaaatacaaaaaaagttcactggtattgtaagctttgcagataagagcacaactttttccctcttttctaaaagggaagctcatgttcatttcagcaattcagcttcaaccatttggcattcatgtaatatttcacaggagttaaagtgcacatacctaatcaagtctgtgggtctccaattctgaaatagaaagataatttatgttctcatctttctgaaatgaacaagatgactggcttctgggttaaggttttttatagagcaccatgacttatcaggtaaagttatagttgtgcacaaaatgtcattttttaatccttaatgcgtgtgctattcacacatgtcttcttttgcagttttgtgaacaaccctaacttatgtggtcctgacaccacaaaaccttgtcctgatgctcctcccttttctccacctcctccatacaaccctacaaccccgatgcaatcaccaggaagtagctcttccactactggagcaattgctggtggagtggttgctggcgcagccttgctatttgctgttcctgctatcagttttgcctattggcggcacaggaaaccacaagagcattttttcaatgtatatggcttcaaagttagtctttgattattatctttcttgcaacataagggcaaacaacgtttatatgtagcaaacaaatacagtttgcaaacgttttaggaacatgtttttacaataaagatatacttatagtttcaccaatggatggccaaaaaatacaaccttttacatttgtcaaccttttagttcaggaaatatagaacaacagcaagtagattttgataaacccattagaatctcaatataaatatagaatatcgacctctattcttt

SEQ ID NO: 3755 - DNA, 2450 bp, Zea Mays
aaggaaataacaacgttctttttgctaaatgttctttagcaatttgattagtcaaagaggttgcttgtttttttgtgggaacgagattcgggactcaggagctcacttgctcccactatgacattgtatatgtaccagacacttgcatatactaattgttttcttttaaatgcactttacttaattatactgacatatgtcattggagctgtgatgcctcatccatccctaaagatgtatagaattcatcgcttggatcaataagtgttgtttaacaggcagaaatgggtgcttaggatcttaccactgtttatttaaaatttagatagataaagagcactgaagattgttagttaattaggaccgacgctttgaatcattagaccaaggaatatgaatgcgcaaattcaaacgtactacaccttttttgtgctttctttttaggacaggagtaattgtccatcgtaacgggggtagaaagtgcagaacgctcattgttctctttttcgttgtctaaaacgttgagtttctgatctgtataagactacaagttgctcagagggccttttctggaaccatttccctcgaactgattttaattgtttccttcttttccttatccacaataccaaactatgttacataaaaactaaatgatacgctgactgctcagaataaaaaaagtggtgctacgatcctccgtctgacttatgatcgcttctcttttcttcagccacttttcttttttgttgtctagaaaacaaaaatatattgttagtgaccagattgtaatagaaaatattgtctgctttattttctcgtcattagataaattatatacccttaaattgcttttgccattgattctagcatatgtcattaactaatgtttttaccacctttttctagaacgcttgtttgtctttgtcactttctgcaaccttggttctgatgttgcttgtcattcatttctcagcgtcgggcttgtaacttgtgtttcgtttgcttggtccatttattttggttgtctgtagggaagagacgacgacatggatgtagattccattctttgtgtgagcactaccgccatatagttgacaacgatgaccgacactgtagattccattctttgtgtgtacaccaaggtatcggtgtctacgttgatctggcgatgcgcttttcacggttactgcgaccgtgatgggcatctaggtgctcaaaccattagttggactgaggaacacggagcagcagcaacaatatcgtaaggagagtgcagaagttggacaaatggtatgccatatcttcagttctcttatgatgcttcagcgctacatcttcagttttctcggctaaaaagagatcatagtcaatagtatacctatgtgtgaaagcgctatgctatttgcttgtttgctgggagaaagaaaagatagatgaaggtaattatacaatttctaatacattgttcagcttttgttatttctgccatatgatacacactggtcatgaggacatgtcgattgtagttcactggtattgtttttttaaaggaagcggcaaaagacttgcctcttcattgtattagattaggaaaaataagataatccacaggaccgaaacacacaccggaagagaaaaaaaaacaaaatcaaaatacaaaaaaagttcactggtattgtaagctttgcagataagagcacaactttttccctcttttctaaaagggaagctcatgttcatttcagcaattcagcttcaaccatttggcattcatgtaatatttcacaggagttaaagtgcacatacctaatcaagtctgtgggtctccaattctgaaatagaaagataatttatgttctcatctttctgaaatgaacaagatgactggcttctgggttaaggttttttatagagcaccatgacttatcagttttgtgaacaaccctaacttatgtggtcctgacaccacaaaaccttgtcctgatgctcctcccttttctccacctcctccatacaaccctacaaccccgatgcaatcaccaggaagtagctcttccactactggagcaattgctggtggagtggttgctggcgcagccttgctatttgctgttcctgctatcagttttgcctattggcggcacaggaaaccacaagagcattttttcaatgtatatggcttcaaagttagtctttgattattatctttcttgcaacataagggcaaacaacgtttatatgtagcaaacaaatacagtttgcaaacgttttaggaacatgtttttacaataaagatatacttatagtttcaccaatggatggccaaaaaatacaaccttttacatttgtcaaccttttagttcaggaaatatagaacaacagcaagtagattttgataaacccattagaatctcaatataaatatagaatatcgacctctattcttt

SEQ ID NO: 3756 - DNA, 1952 bp, Zea Mays
aaggaaataacaacgttctttttgctaaatgttctttagcaatttgattagtcaaagaggttgcttgtttttttgtgggaacgagattcgggactcaggagctcacttgctcccactatgacattgtatatgtaccagacacttgcatatactaattgttttcttttaaatgcactttacttaattatactgacatatgtcattggagctgtgatgcctcatccatccctaaagatgtatagaattcatcgcttggatcaataagtgttgtttaacaggcagaaatgggtgcttaggatcttaccactgtttatttaaaatttagatagataaagagcactgaagattgttagttaattaggaccgacgctttgaatcattagaccaaggaatatgaatgcgcaaattcaaacgtactacaccttttttgtgctttctttttaggacaggagtaattgtccatcgtaacgggggtagaaagtgcagaacgctcattgttctctttttcgttgtctaaaacgttgagtttctgatctgtataagactacaagttgctcagagggccttttctggaaccatttccctcgaactgattttaattgtttccttcttttccttatccacaataccaaactatgttacataaaaactaaatgatacgctgactgctcagaataaaaaaagtggtgctacgatcctccgtctgacttatgatcgcttctcttttcttcagccacttttcttttttgttgtctagaaaacaaaaatatattgttagtgaccagattgtaatagaaaatattgtctgctttattttctcgtcattagataaattatatacccttaaattgcttttgccattgattctagcatatgtcattaactaatgtttttaccacctttttctagaacgcttgtttgtctttgtcactttctgcaaccttggttctgatgttgcttgtcattcatttctcagcgtcgggcttgtaacttgtgtttcgtttgcttggtccatttattttggttgtctgtagggaagagacgacgacatggatgtagattccattctttgtgtgagcactaccgccatatagttgacaacgatgaccgacactgtagattccattctttgtgtgtacaccaaggtatcggtgtctacgttgatctggcgatgcgcttttcacggttactgcgaccgtgatgggcatctaggtgctcaaaccattagttggactgaggaacacggagcagcagcaacaatatcgtaaggagagtgcagaagttggacaaatggagttaaagtgcacatacctaatcaagtctgtgggtctccaattctgaaatagaaagataatttatgttctcatctttctgaaatgaacaagatgactggcttctgggttaaggttttttatagagcaccatgacttatcagttttgtgaacaaccctaacttatgtggtcctgacaccacaaaaccttgtcctgatgctcctcccttttctccacctcctccatacaaccctacaaccccgatgcaatcaccaggaagtagctcttccactactggagcaattgctggtggagtggttgctggcgcagccttgctatttgctgttcctgctatcagttttgcctattggcggcacaggaaaccacaagagcattttttcaatgtatatggcttcaaagttagtctttgattattatctttcttgcaacataagggcaaacaacgtttatatgtagcaaacaaatacagtttgcaaacgttttaggaacatgtttttacaataaagatatacttatagtttcaccaatggatggccaaaaaatacaaccttttacatttgtcaaccttttagttcaggaaatatagaacaacagcaagtagattttgataaacccattagaatctcaatataaatatagaatatcgacctctattcttt

SEQ ID NO: 3757 - DNA, 2910 bp, Zea Mays
aaggaaataacaacgttctttttgctaaatgttctttagcaatttgattagtcaaagaggttgcttgtttttttgtgggaacgagattcgggactcaggagctcacttgctcccactatgacattgtatatgtaccagacacttgcatatactaattgttttcttttaaatgcactttacttaattatactgacatatgtcattggagctgtgatgcctcatccatccctaaagatgtatagaattcatcgcttggatcaataagtgttgtttaacaggcagaaatgggtgcttaggatcttaccactgtttatttaaaatttagatagataaagagcactgaagattgttagttaattaggaccgacgctttgaatcattagaccaaggaatatgaatgcgcaaattcaaacgtactacaccttttttgtgctttctttttaggacaggagtaattgtccatcgtaacgggggtagaaagtgcagaacgctcattgttctctttttcgttgtctaaaacgttgagtttctgatctgtataagactacaagttgctcagagggccttttctggaaccatttccctcgaactgattttaattgtttccttcttttccttatccacaataccaaactatgttacataaaaactaaatgatacgctgactgctcagaataaaaaaagtggtgctacgatcctccgtctgacttatgatcgcttctcttttcttcagccacttttcttttttgttgtctagaaaacaaaaatatattgttagtgaccagattgtaatagaaaatattgtctgctttattttctcgtcattagataaattatatacccttaaattgcttttgccattgattctagcatatgtcattaactaatgtttttaccacctttttctagaacgcttgtttgtctttgtcactttctgcaaccttggttctgatgttgcttgtcattcatttctcagcgtcgggcttgtaacttgtgtttcgtttgcttggtccatttattttggttgtctgtagggaagagacgacgacatggatgtagattccattctttgtgtgagcactaccgccatatagttgacaacgatgaccgacactgtagattccattctttgtgtgtacaccaaggtatcggtgtctacgttgatctggcgatgcgcttttcacggttactgcgaccgtgatgggcatctaggtgctcaaaccattagttggactgaggaacacggagcagcagcaacaatatcgtaaggagagtgcagaagttggacaaatggtatgccatatcttcagttctcttatgatgcttcagcgctacatcttcagttttctcggctaaaaagagatcatagtcaatagtatacctatgtgtgaaagcgctatgctatttgcttgtttgctgggagaaagaaaagatagatgaaggtaattatacaatttctaatacattgttcagcttttgttatttctgccatatgatacacactggtcatgaggacatgtcgattgtagttcactggtattgtttttttaaaggaagcggcaaaagacttgcctcttcattgtattagattaggaaaaataagataatccacaggaccgaaacacacaccggaagagaaaaaaaaacaaaatcaaaatacaaaaaaagttcactggtattgtaagctttgcagataagagcacaactttttccctcttttctaaaagggaagctcatgttcatttcagcaattcagcttcaaccatttggcattcatgtaatatttcacaggagttaaagtgcacatacctaatcaagtctgtgggtctccaattctgaaatagaaagataatttatgttctcatctttctgaaatgaacaagatgactggcttctgggttaaggttttttatagagcaccatgacttatcagttttgtgaacaaccctaacttatgtggtcctgacaccacaaaaccttgtcctgatgctcctcccttttctccacctcctccatacaaccctacaaccccgatgcaatcaccaggtgatttatttagattgtccagtgaaatccttgagttcaataggacctttccttccttactctttcatctaaatgacatcctaattgggaaaatgtatacctccaaaacaagcataatgttgtcaaggctggagagcggtaaggaataactgcacgttttcctgaaaattaagttgaaaataatttgtaatcaggagctagagcgttacatggtactatgactatgtgctgctattagtctgtggctcagcggtatgtgtgttgtactgctattaatttgctatactagaatactggaatacaataggaagctactaacctgtacctcgtgggatgcaggaatgcagaataagtcaataactaccttgtccttttggttttccctaccctacattagtacgggagtgattaagggtatggaacatatggctttgttgttgacatcttttattttgtgcaggaagtagctcttccactactggagcaattgctggtggagtggttgctggcgcagccttgctatttgctgttcctgctatcagttttgcctattggcggcacaggaaaccacaagagcattttttcaatgtatatggcttcaaagttagtctttgattattatctttcttgcaacataagggcaaacaacgtttatatgtagcaaacaaatacagtttgcaaacgttttaggaacatgtttttacaataaagatatacttatagtttcaccaatggatggccaaaaaatacaaccttttacatttgtcaaccttttagttcaggaaatatagaacaacagcaagtagattttgataaacccattagaatctcaatataaatatagaatatcgacctctattcttt

SEQ ID NO: 3758 - DNA, 2101 bp, Zea Mays
aaggaaataacaacgttctttttgctaaatgttctttagcaatttgattagtcaaagaggttgcttgtttttttgtgggaacgagattcgggactcaggagctcacttgctcccactatgacattgtatatgtaccagacacttgcatatactaattgttttcttttaaatgcactttacttaattatactgacatatgtcattggagctgtgatgcctcatccatccctaaagatgtatagaattcatcgcttggatcaataagtgttgtttaacaggcagaaatgggtgcttaggatcttaccactgtttatttaaaatttagatagataaagagcactgaagattgttagttaattaggaccgacgctttgaatcattagaccaaggaatatgaatgcgcaaattcaaacgtactacaccttttttgtgctttctttttaggacaggagtaattgtccatcgtaacgggggtagaaagtgcagaacgctcattgttctctttttcgttgtctaaaacgttgagtttctgatctgtataagactacaagttgctcagagggccttttctggaaccatttccctcgaactgattttaattgtttccttcttttccttatccacaataccaaactatgttacataaaaactaaatgatacgctgactgctcagaataaaaaaagtggtgctacgatcctccgtctgacttatgatcgcttctcttttcttcagccacttttcttttttgttgtctagaaaacaaaaatatattgttagtgaccagattgtaatagaaaatattgtctgctttattttctcgtcattagataaattatatacccttaaattgcttttgccattgattctagcatatgtcattaactaatgtttttaccacctttttctagaacgcttgtttgtctttgtcactttctgcaaccttggttctgatgttgcttgtcattcatttctcagcgtcgggcttgtaacttgtgtttcgtttgcttggtccatttattttggttgtctgtagggaagagacgacgacatggatgtagattccattctttgtgtgagcactaccgccatatagttgacaacgatgaccgacactgtagattccattctttgtgtgtacaccaaggtatcggtgtctacgttgatctggcgatgcgcttttcacggttactgcgaccgtgatgggcatctaggtgctcaaaccattagttggactgaggaacacggagcagcagcaacaatatcgtaaggagagtgcagaagttggacaaatggtatgccatatcttcagttctcttatgatgcttcagcgctacatcttcagttttctcggctaaaaagagatcatagtcaatagtatacctatgtgtgaaagcgctatgctatttgcttgtttgctgggagaaagaaaagatagatgaaggagttaaagtgcacatacctaatcaagtctgtgggtctccaattctgaaatagaaagataatttatgttctcatctttctgaaatgaacaagatgactggcttctgggttaaggttttttatagagcaccatgacttatcagttttgtgaacaaccctaacttatgtggtcctgacaccacaaaaccttgtcctgatgctcctcccttttctccacctcctccatacaaccctacaaccccgatgcaatcaccaggaagtagctcttccactactggagcaattgctggtggagtggttgctggcgcagccttgctatttgctgttcctgctatcagttttgcctattggcggcacaggaaaccacaagagcattttttcaatgtatatggcttcaaagttagtctttgattattatctttcttgcaacataagggcaaacaacgtttatatgtagcaaacaaatacagtttgcaaacgttttaggaacatgtttttacaataaagatatacttatagtttcaccaatggatggccaaaaaatacaaccttttacatttgtcaaccttttagttcaggaaatatagaacaacagcaagtagattttgataaacccattagaatctcaatataaatatagaatatcgacctctattcttt

SEQ ID NO: 3759 - DNA, 2561 bp, Zea Mays
aaggaaataacaacgttctttttgctaaatgttctttagcaatttgattagtcaaagaggttgcttgtttttttgtgggaacgagattcgggactcaggagctcacttgctcccactatgacattgtatatgtaccagacacttgcatatactaattgttttcttttaaatgcactttacttaattatactgacatatgtcattggagctgtgatgcctcatccatccctaaagatgtatagaattcatcgcttggatcaataagtgttgtttaacaggcagaaatgggtgcttaggatcttaccactgtttatttaaaatttagatagataaagagcactgaagattgttagttaattaggaccgacgctttgaatcattagaccaaggaatatgaatgcgcaaattcaaacgtactacaccttttttgtgctttctttttaggacaggagtaattgtccatcgtaacgggggtagaaagtgcagaacgctcattgttctctttttcgttgtctaaaacgttgagtttctgatctgtataagactacaagttgctcagagggccttttctggaaccatttccctcgaactgattttaattgtttccttcttttccttatccacaataccaaactatgttacataaaaactaaatgatacgctgactgctcagaataaaaaaagtggtgctacgatcctccgtctgacttatgatcgcttctcttttcttcagccacttttcttttttgttgtctagaaaacaaaaatatattgttagtgaccagattgtaatagaaaatattgtctgctttattttctcgtcattagataaattatatacccttaaattgcttttgccattgattctagcatatgtcattaactaatgtttttaccacctttttctagaacgcttgtttgtctttgtcactttctgcaaccttggttctgatgttgcttgtcattcatttctcagcgtcgggcttgtaacttgtgtttcgtttgcttggtccatttattttggttgtctgtagggaagagacgacgacatggatgtagattccattctttgtgtgagcactaccgccatatagttgacaacgatgaccgacactgtagattccattctttgtgtgtacaccaaggtatcggtgtctacgttgatctggcgatgcgcttttcacggttactgcgaccgtgatgggcatctaggtgctcaaaccattagttggactgaggaacacggagcagcagcaacaatatcgtaaggagagtgcagaagttggacaaatggtatgccatatcttcagttctcttatgatgcttcagcgctacatcttcagttttctcggctaaaaagagatcatagtcaatagtatacctatgtgtgaaagcgctatgctatttgcttgtttgctgggagaaagaaaagatagatgaaggagttaaagtgcacatacctaatcaagtctgtgggtctccaattctgaaatagaaagataatttatgttctcatctttctgaaatgaacaagatgactggcttctgggttaaggttttttatagagcaccatgacttatcagttttgtgaacaaccctaacttatgtggtcctgacaccacaaaaccttgtcctgatgctcctcccttttctccacctcctccatacaaccctacaaccccgatgcaatcaccaggtgatttatttagattgtccagtgaaatccttgagttcaataggacctttccttccttactctttcatctaaatgacatcctaattgggaaaatgtatacctccaaaacaagcataatgttgtcaaggctggagagcggtaaggaataactgcacgttttcctgaaaattaagttgaaaataatttgtaatcaggagctagagcgttacatggtactatgactatgtgctgctattagtctgtggctcagcggtatgtgtgttgtactgctattaatttgctatactagaatactggaatacaataggaagctactaacctgtacctcgtgggatgcaggaatgcagaataagtcaataactaccttgtccttttggttttccctaccctacattagtacgggagtgattaagggtatggaacatatggctttgttgttgacatcttttattttgtgcaggaagtagctcttccactactggagcaattgctggtggagtggttgctggcgcagccttgctatttgctgttcctgctatcagttttgcctattggcggcacaggaaaccacaagagcattttttcaatgtatatggcttcaaagttagtctttgattattatctttcttgcaacataagggcaaacaacgtttatatgtagcaaacaaatacagtttgcaaacgttttaggaacatgtttttacaataaagatatacttatagtttcaccaatggatggccaaaaaatacaaccttttacatttgtcaaccttttagttcaggaaatatagaacaacagcaagtagattttgataaacccattagaatctcaatataaatatagaatatcgacctctattcttt

SEQ ID NO: 3760 - DNA, 1696 bp, Zea Mays
aggaaataacaacgttctttttgctaaatgttctttagcaatttgattagtcaaagaggttgcttgtttttttgtgggaacgagattcgggactcaggagctcacttgctcccactatgacattgtatatgtaccagacacttgcatatactaattgttttcttttaaatgcactttacttaattatactgacatatgtcattggagctgtgatgcctcatccatccctaaagatgtatagaattcatcgcttggatcaataagtgttgtttaacaggcagaaatgggtgcttaggatcttaccactgtttatttaaaatttagatagataaagagcactgaagattgttagttaattaggaccgacgctttgaatcattagaccaaggaatatgaatgcgcaaattcaaacgtactacaccttttttgtgctttctttttaggacaggagtaattgtccatcgtaacgggggtagaaagtgcagaacgctcattgttctctttttcgttgtctaaaacgttgagtttctgatctgtataagactacaagttgctcagagggccttttctggaaccatttccctcgaactgattttaattgtttccttcttttccttatccacaataccaaactatgttacataaaaactaaatgatacgctgactgctcagaataaaaaaagtggtgctacgatcctccgtctgacttatgatcgcttctcttttcttcagccacttttcttttttgttgtctagaaaacaaaaatatattgttagtgaccagattgtaatagaaaatattgtctgctttattttctcgtcattagataaattatatacccttaaattgcttttgccattgattctagcatatgtcattaactaatgtttttaccacctttttctagaacgcttgtttgtctttgtcactttctgcaaccttggttctgatgttgcttgtcattcatttctcagcgtcgggcttgtaacttgtgtttcgtttgcttggtccatttattttggttgtctgtagggaagagacgacgacatggatgtagattccattctttgtgtgagcactaccgccatatagttgacaacgatgaccgacactgtagattccattctttgtgtgtacaccaaggtatcggtgtctacgttgatctggcgatgcgcttttcacggttactgcgaccgtgatgggcatctaggtgctcaaaccattagttggactgaggaacacggagcagcagcaacaatatcgtaaggagagtgcagaagttggacaaatggaagtagctcttccactactggagcaattgctggtggagtggttgctggcgcagccttgctatttgctgttcctgctatcagttttgcctattggcggcacaggaaaccacaagagcattttttcaatgtatatggcttcaaagttagtctttgattattatctttcttgcaacataagggcaaacaacgtttatatgtagcaaacaaatacagtttgcaaacgttttaggaacatgtttttacaataaagatatacttatagtttcaccaatggatggccaaaaaatacaaccttttacatttgtcaaccttttagttcaggaaatatagaacaacagcaagtagattttgataaacccattagaatctcaatataaatatagaatatcgacctctattcttt

SEQ ID NO: 3761 - DNA, 1936 bp, Zea Mays
taacaacgttctttttgctaaatgttctttagcaatttgattagtcaaagaggttgcttgtttttttgtgggaacgagattcgggactcaggagctcacttgctcccactatgacattgtatatgtaccagacacttgcatatactaattgttttcttttaaatgcactttacttaattatactgacatatgtcattggagctgtgatgcctcatccatccctaaagatgtatagaattcatcgcttggatcaataagtgttgtttaacaggcagaaatgggtgcttaggatcttaccactgtttatttaaaatttagatagataaagagcactgaagattgttagttaattaggaccgacgctttgaatcattagaccaaggaatatgaatgcgcaaattcaaacgtactacaccttttttgtgctttctttttaggacaggagtaattgtccatcgtaacgggggtagaaagtgcagaacgctcattgttctctttttcgttgtctaaaacgttgagtttctgatctgtataagactacaagttgctcagagggccttttctggaaccatttccctcgaactgattttaattgtttccttcttttccttatccacaataccaaactatgttacataaaaactaaatgatacgctgactgctcagaataaaaaaagtggtgctacgatcctccgtctgacttatgatcgcttctcttttcttcagccacttttcttttttgttgtctagaaaacaaaaatatattgttagtgaccagattgtaatagaaaatattgtctgctttattttctcgtcattagataaattatatacccttaaattgcttttgccattgattctagcatatgtcattaactaatgtttttaccacctttttctagaacgcttgtttgtctttgtcactttctgcaaccttggttctgatgttgcttgtcattcatttctcagcgtcgggcttgtaacttgtgtttcgtttgcttggtccatttattttggttgtctgtagggaagagacgacgacatggatgtagattccattctttgtgtgagcactaccgccatatagttgacaacgatgaccgacactgtagattccattctttgtgtgtacaccaaggtatcggtgtctacgttgatctggcgatgcgcttttcacggttactgcgaccgtgatgggcatctaggtgctcaaaccattagttggactgaggaacacggagcagcagcaacaatatcgtaaggagagtgcagaagttggacaaatgtgcacatacctaatcaagtctgtgggtctccaattctgaaatagaaagataatttatgttctcatctttctgaaatgaacaagatgactggcttctgggttaaggttttttatagagcaccatgacttatcagttttgtgaacaaccctaacttatgtggtcctgacaccacaaaaccttgtcctgatgctcctcccttttctccacctcctccatacaaccctacaaccccgatgcaatcaccaggaagtagctcttccactactggagcaattgctggtggagtggttgctggcgcagccttgctatttgctgttcctgctatcagttttgcctattggcggcacaggaaaccacaagagcattttttcaatgtatatggcttcaaagttagtctttgattattatctttcttgcaacataagggcaaacaacgtttatatgtagcaaacaaatacagtttgcaaacgttttaggaacatgtttttacaataaagatatacttatagtttcaccaatggatggccaaaaaatacaaccttttacatttgtcaaccttttagttcaggaaatatagaacaacagcaagtagattttgataaacccattagaatctcaatataaatatagaatatcgacctctattcttt

SEQ ID NO: 3762 - DNA, 2402 bp, Zea Mays
caacgttctttttgctaaatgttctttagcaatttgattagtcaaagaggttgcttgtttttttgtgggaacgagattcgggactcaggagctcacttgctcccactatgacattgtatatgtaccagacacttgcatatactaattgttttcttttaaatgcactttacttaattatactgacatatgtcattggagctgtgatgcctcatccatccctaaagatgtatagaattcatcgcttggatcaataagtgttgtttaacaggcagaaatgggtgcttaggatcttaccactgtttatttaaaatttagatagataaagagcactgaagattgttagttaattaggaccgacgctttgaatcattagaccaaggaatatgaatgcgcaaattcaaacgtactacaccttttttgtgctttctttttaggacaggagtaattgtccatcgtaacgggggtagaaagtgcagaacgctcattgttctctttttcgttgtctaaaacgttgagtttctgatctgtataagactacaagttgctcagagggccttttctggaaccatttccctcgaactgattttaattgtttccttcttttccttatccacaataccaaactatgttacataaaaactaaatgatacgctgactgctcagaataaaaaaagtggtgctacgatcctccgtctgacttatgatcgcttctcttttcttcagccacttttcttttttgttgtctagaaaacaaaaatatattgttagtgaccagattgtaatagaaaatattgtctgctttattttctcgtcattagataaattatatacccttaaattgcttttgccattgattctagcatatgtcattaactaatgtttttaccacctttttctagaacgcttgtttgtctttgtcactttctgcaaccttggttctgatgttgcttgtcattcatttctcagcgtcgggcttgtaacttgtgtttcgtttgcttggtccatttattttggttgtctgtagggaagagacgacgacatggatgtagattccattctttgtgtgagcactaccgccatatagttgacaacgatgaccgacactgtagattccattctttgtgtgtacaccaaggtatcggtgtctacgttgatctggcgatgcgcttttcacggttactgcgaccgtgatgggcatctaggtgctcaaaccattagttggactgaggaacacggagcagcagcaacaatatcgtaaggagagtgcagaagttggacaaatggagttaaagtgcacatacctaatcaagtctgtgggtctccaattctgaaatagaaagataatttatgttctcatctttctgaaatgaacaagatgactggcttctgggttaaggttttttatagagcaccatgacttatcagttttgtgaacaaccctaacttatgtggtcctgacaccacaaaaccttgtcctgatgctcctcccttttctccacctcctccatacaaccctacaaccccgatgcaatcaccaggtgatttatttagattgtccagtgaaatccttgagttcaataggacctttccttccttactctttcatctaaatgacatcctaattgggaaaatgtatacctccaaaacaagcataatgttgtcaaggctggagagcggtaaggaataactgcacgttttcctgaaaattaagttgaaaataatttgtaatcaggagctagagcgttacatggtactatgactatgtgctgctattagtctgtggctcagcggtatgtgtgttgtactgctattaatttgctatactagaatactggaatacaataggaagctactaacctgtacctcgtgggatgcaggaatgcagaataagtcaataactaccttgtccttttggttttccctaccctacattagtacgggagtgattaagggtatggaacatatggctttgttgttgacatcttttattttgtgcaggaagtagctcttccactactggagcaattgctggtggagtggttgctggcgcagccttgctatttgctgttcctgctatcagttttgcctattggcggcacaggaaaccacaagagcattttttcaatgtatatggcttcaaagttagtctttgattattatctttcttgcaacataagggcaaacaacgtttatatgtagcaaacaaatacagtttgcaaacgttttaggaacatgtttttacaataaagatatacttatagtttcaccaatggatggccaaaaaatacaaccttttacatttgtcaaccttttagttcaggaaatatagaacaacagcaagtagattttgataaacccattagaatctcaatataaatatagaatatcgacctctattcttt

SEQ ID NO: 3763 - DNA, 1836 bp, Zea Mays
caacgttctttttgctaaatgttctttagcaatttgattagtcaaagaggttgcttgtttttttgtgggaacgagattcgggactcaggagctcacttgctcccactatgacattgtatatgtaccagacacttgcatatactaattgttttcttttaaatgcactttacttaattatactgacatatgtcattggagctgtgatgcctcatccatccctaaagatgtatagaattcatcgcttggatcaataagtgttgtttaacaggcagaaatgggtgcttaggatcttaccactgtttatttaaaatttagatagataaagagcactgaagattgttagttaattaggaccgacgctttgaatcattagaccaaggaatatgaatgcgcaaattcaaacgtactacaccttttttgtgctttctttttaggacaggagtaattgtccatcgtaacgggggtagaaagtgcagaacgctcattgttctctttttcgttgtctaaaacgttgagtttctgatctgtataagactacaagttgctcagagggccttttctggaaccatttccctcgaactgattttaattgtttccttcttttccttatccacaataccaaactatgttacataaaaactaaatgatacgctgactgctcagaataaaaaaagtggtgctacgatcctccgtctgacttatgatcgcttctcttttcttcagccacttttcttttttgttgtctagaaaacaaaaatatattgttagtgaccagattgtaatagaaaatattgtctgctttattttctcgtcattagataaattatatacccttaaattgcttttgccattgattctagcatatgtcattaactaatgtttttaccacctttttctagaacgcttgtttgtctttgtcactttctgcaaccttggttctgatgttgcttgtcattcatttctcagcgtcgggcttgtaacttgtgtttcgtttgcttggtccatttattttggttgtctgtagggaagagacgacgacatggatgtagattccattctttgtgtgagcactaccgccatatagttgacaacgatgaccgacactgtagattccattctttgtgtgtacaccaaggtatcggtgtctacgttgatctggcgatgcgcttttcacggttactgcgaccgtgatgggcatctaggtgctcaaaccattagttggactgaggaacacggagcagcagcaacaatatcgtaaggagagtgcagaagttggacaaatggtatgccatatcttcagttctcttatgatgcttcagcgctacatcttcagttttctcggctaaaaagagatcatagtcaatagtatacctatgtgtgaaagcgctatgctatttgcttgtttgctgggagaaagaaaagatagatgaaggaagtagctcttccactactggagcaattgctggtggagtggttgctggcgcagccttgctatttgctgttcctgctatcagttttgcctattggcggcacaggaaaccacaagagcattttttcaatgtatatggcttcaaagttagtctttgattattatctttcttgcaacataagggcaaacaacgtttatatgtagcaaacaaatacagtttgcaaacgttttaggaacatgtttttacaataaagatatacttatagtttcaccaatggatggccaaaaaatacaaccttttacatttgtcaaccttttagttcaggaaatatagaacaacagcaagtagattttgataaacccattagaatctcaatataaatatagaatatcgacctctattcttt

SEQ ID NO: 3764 - DNA, 1894 bp, Zea Mays
cttaattatactgacatatgtcattggagctgtgatgcctcatccatccctaaagatgtatagaattcatcgcttggatcaataagtgttgtttaacaggcagaaatgggtgcttaggatcttaccactgtttatttaaaatttagatagataaagagcactgaagattgttagttaattaggaccgacgctttgaatcattagaccaaggaatatgaatgcgcaaattcaaacgtactacaccttttttgtgctttctttttaggacaggagtaattgtccatcgtaacgggggtagaaagtgcagaacgctcattgttctctttttcgttgtctaaaacgttgagtttctgatctgtataagactacaagttgctcagagggccttttctggaaccatttccctcgaactgattttaattgtttccttcttttccttatccacaataccaaactatgttacataaaaactaaatgatacgctgactgctcagaataaaaaaagtggtgctacgatcctccgtctgacttatgatcgcttctcttttcttcagccacttttcttttttgttgtctagaaaacaaaaatatattgttagtgaccagattgtaatagaaaatattgtctgctttattttctcgtcattagataaattatatacccttaaattgcttttgccattgattctagcatatgtcattaactaatgtttttaccacctttttctagaacgcttgtttgtctttgtcactttctgcaaccttggttctgatgttgcttgtcattcatttctcagcgtcgggcttgtaacttgtgtttcgtttgcttggtccatttattttggttgtctgtagggaagagacgacgacatggatgtagattccattctttgtgtgagcactaccgccatatagttgacaacgatgaccgacactgtagattccattctttgtgtgtacaccaaggtatcggtgtctacgttgatctggcgatgcgcttttcacggttactgcgaccgtgatgggcatctaggtgctcaaaccattagttggactgaggaacacggagcagcagcaacaatatcgtaaggagagtgcagaagttggacaaatgcaattcagcttcaaccatttggcattcatgtaatatttcacaggagttaaagtgcacatacctaatcaagtctgtgggtctccaattctgaaatagaaagataatttatgttctcatctttctgaaatgaacaagatgactggcttctgggttaaggttttttatagagcaccatgacttatcaggtaaagttatagttgtgcacaaaatgtcattttttaatccttaatgcgtgtgctattcacacatgtcttcttttgcagttttgtgaacaaccctaacttatgtggtcctgacaccacaaaaccttgtcctgatgctcctcccttttctccacctcctccatacaaccctacaaccccgatgcaatcaccaggaagtagctcttccactactggagcaattgctggtggagtggttgctggcgcagccttgctatttgctgttcctgctatcagttttgcctattggcggcacaggaaaccacaagagcattttttcaatgtatatggcttcaaagttagtctttgattattatctttcttgcaacataagggcaaacaacgtttatatgtagcaaacaaatacagtttgcaaacgttttaggaacatgtttttacaataaagatatacttatagtttcaccaatggatggccaaaaaatacaaccttttacatttgtcaaccttttagttcaggaaatatagaacaacagcaagtagattttgataaacccattagaatctcaatataaatatagaatatcgacctctattcttt

SEQ ID NO: 3765 - DNA, 120 bp, Zea Mays
atgactgtcgctttgtatgatctaacacagaagggacgaacagtatgcttttctttctcgctgcagtttttcagaccaccccggacggaagccgcagcaccagttgcccgccgaaaacac

SEQ ID NO: 3766 - DNA, 3029 bp, Zea Mays
aaaaactgtcacatctccagacgcgcccgccgcccgctgccatgggacccacggaatccaacctcacccgccggctgccgctcggctgccctccggcctccgggcatcgccatcggagtgtgcaggaaccaggaggaggccggtagagtccgtgcacccgggtcccactcccctgaggccgtccgtggctccgtgcaagatggggattgcgcaagggtgcgaggtcaccatccccgcgcctggtcatcagtattcagcagaagaatgagttggtgtctttccgatctcaatgcatttcaccgctccaccagaaattccctctgcccctaccgtactccagtttatctgttatagtgcaacacaatgataaaatggttggtgagatatagttgcttaagatggcaacaggggcggcacacatatatgcttttgtggggaatggaggcttcaatacttagagataatcatactttagttcctgttgcatcatctgcaaacaaattcccgtgtttagaaaaggatagctaactagaaatttgagctaatttatctgcaaatagggtgttgttcatttcagtatgctagttaattaagatcacaccatccttttgtaccatattgtaatattgaagtaaataatcagcttggtcaaagatgctgacacatctcatttgaatgaacatgattatcaaccctagtagtagtaccctatgatgctgccgcacgatttgtaactgtttttttagcaagggcttgacatggtacaatttattataggtcagacttaaactcttgcttccagtttactctaaagtaaccaaatcaccatcactttctacatcagcaaatagaaaagcatggaatgcacaggacattttttttagtgaaattgcacggagctatacatacatgtgggcagacatccactgcagttgcaatggagctttcacagctcttttatatgatgtttgtctgcagagtttggtggctcacagcatatataaaatgcaatataagcataccgatagccttgttaactcagtggttaatctagtacaagttgccagctgatagtaaattgatcaatggggagacagccgtgctgtgacaaggagggggtgaagcgagggccatggacagcggaggaggacaagaagctcattagcttcatcctgacacatggccggtgctgctggcgggcagtgcctaaacttgcagggctgcttcgttgtggcaagagctgccgtctgcggtggactaactatcttcgccctgacctcaagcgtggcctcctcagcactgccgaggagcagcttgtcattgacctccatgccaagctcggaaatagatggtcccagatcgctgccaagttacctggaagaacagacaatgagatcaagaaccactggaacacgcacatcaagaagaagcttatcaagatgggcatcaacccggccacgcaccagcctctagccaactccaaggcagctccctcacactccacaggtacagacgaatccgctaaatccagcgacaccagagaggagctgagcctgaaggatgacaaccatcatagggaggttccgctgtccaccgattcatcggagcagtccagctggccagagccaggcagcaacgtcggcgaccaagaccctgaactgctggtgaattggccgtcggagaccgacttgtcagtggacgagtcttggctgggttttatgagcaacggcaatgagcttggcgatgtcgaggggacgtcgccgtgggacggaacaacagactggctgctggactaccaagattttggcatgtgcagctccaacttggtggacgattcaatgttccgcgcctcaaatggattgaacttctaaatgtcggagaaaggctgtccaatttcaagaaatagggaggaagacagactgcaagtttgagcgcactgcacagctcccagtatagaaaatagatacaacactttcaagaataagattgtgaaaagagagagagagaggcatggggcatatcttgaccatagaatagtgataccttgcccttaaaagtaaggggtttgtattgttagaaacctaatgtttctcggtacgagaagctgaagaactagacccaaatgttcgaaccatgcaaggcatcctatcctatgaacaaagttagggtgttgcagcttttctgtgcaagctaaggctgtgctctgagcagtacaacagcgaggttttatcttgatatctccctgttgctgtccctggcaactgtggagcaattacagagttcaggacatgttgtgttagagactcacactcaccatccttgttccaacatcagactcatcacacaggcttgtggactttgatgtgcgtaatgttaagcagttgcacggcagagacgaaaggaacacgactgtacgtggatcagcaagagccttcctggattctgcacgttggtcagtccagttgcggcggttggtcagtccagttttcatgagggcaaaggtgtgttcccttctctgttccgttgccgtccatgtctgtccctgacaaagatgcaggaccttaaaaggagccagtgaaccaaccatcttccaaatcctgacgtgtttcttccaactccgatgactgaaataaaatgaagtgccagcagaaaccaaagccttgttcgagagctaacttccttccaagctcaccaggtggctttgttgcgtcgtaagcactgttgaacttctccactgcactgatggtgatggcaataacttggctgacagggagggattcatggggactaatctccatgctattcaaaattgaatagcaaactgatttctctctatagatactctctattttcctgtccaccaaaccagccctgaaagattcggaaacccctgtcgtggaaagcttgagcgcgagcctgtttgtgtggcgcagtttagggaaatttggtttataggactaaattttagtacctaaattgccgaacacagatattaaaatagagataaaaaatagagagaatttctcttt

SEQ ID NO: 3767 - DNA, 1932 bp, Zea Mays
aaaaactgtcacatctccagacgcgcccgccgcccgctgccatgggacccacggaatccaacctcacccgccggctgccgctcggctgccctccggcctccgggcatcgccatcggagtgtgcaggaaccaggaggaggccggtagagtccgtgcacccgggtcccactcccctgaggccgtccgtggctccgtgcaagatggggattgcgcaagggtgcgaggtcaccatccccgcgcctggtcatcagtatggtcccagatcgctgccaagttacctggaagaacagacaatgagatcaagaaccactggaacacgcacatcaagaagaagcttatcaagatgggcatcaacccggccacgcaccagcctctagccaactccaaggcagctccctcacactccacaggtacagacgaatccgctaaatccagcgacaccagagaggagctgagcctgaaggatgacaaccatcatagggaggttccgctgtccaccgattcatcggagcagtccagctggccagagccaggcagcaacgtcggcgaccaagaccctgaactgctggtgaattggccgtcggagaccgacttgtcagtggacgagtcttggctgggttttatgagcaacggcaatgagcttggcgatgtcgaggggacgtcgccgtgggacggaacaacagactggctgctggactaccaagattttggcatgtgcagctccaacttggtggacgattcaatgttccgcgcctcaaatggattgaacttctaaatgtcggagaaaggctgtccaatttcaagaaatagggaggaagacagactgcaagtttgagcgcactgcacagctcccagtatagaaaatagatacaacactttcaagaataagattgtgaaaagagagagagagaggcatggggcatatcttgaccatagaatagtgataccttgcccttaaaagtaaggggtttgtattgttagaaacctaatgtttctcggtacgagaagctgaagaactagacccaaatgttcgaaccatgcaaggcatcctatcctatgaacaaagttagggtgttgcagcttttctgtgcaagctaaggctgtgctctgagcagtacaacagcgaggttttatcttgatatctccctgttgctgtccctggcaactgtggagcaattacagagttcaggacatgttgtgttagagactcacactcaccatccttgttccaacatcagactcatcacacaggcttgtggactttgatgtgcgtaatgttaagcagttgcacggcagagacgaaaggaacacgactgtacgtggatcagcaagagccttcctggattctgcacgttggtcagtccagttgcggcggttggtcagtccagttttcatgagggcaaaggtgtgttcccttctctgttccgttgccgtccatgtctgtccctgacaaagatgcaggaccttaaaaggagccagtgaaccaaccatcttccaaatcctgacgtgtttcttccaactccgatgactgaaataaaatgaagtgccagcagaaaccaaagccttgttcgagagctaacttccttccaagctcaccaggtggctttgttgcgtcgtaagcactgttgaacttctccactgcactgatggtgatggcaataacttggctgacagggagggattcatggggactaatctccatgctattcaaaattgaatagcaaactgatttctctctatagatactctctattttcctgtccaccaaaccagccctgaaagattcggaaacccctgtcgtggaaagcttgagcgcgagcctgtttgtgtggcgcagtttagggaaatttggtttataggactaaattttagtacctaaattgccgaacacagatattaaaatagagataaaaaatagagagaatttctcttt

SEQ ID NO: 3768 - DNA, 3116 bp, Zea Mays
aaaactgtcacatctccagacgcgcccgccgcccgctgccatgggacccacggaatccaacctcacccgccggctgccgctcggctgccctccggcctccgggcatcgccatcggagtgtgcaggaaccaggaggaggccggtagagtccgtgcacccgggtcccactcccctgaggccgtccgtggctccgtgcaagatggggattgcgcaagggtgcgaggtcaccatccccgcgcctggtcatcagtattcagcagaagaatgagttggtgtctttccgatctcaatgcatttcaccgctccaccagaaattccctctgcccctaccgtactccagtttatctgttatagtgcaacacaatgataaaatggttggtgagatatagttgcttaagatggcaacaggggcggcacacatatatgcttttgtggggaatggaggcttcaatacttagagataatcatactttagttcctgttgcatcatctgcaaacaaattcccgtgtttagaaaaggatagctaactagaaatttgagctaatttatctgcaaatagggtgttgttcatttcagtatgctagttaattaagatcacaccatccttttgtaccatattgtaatattgaagtaaataatcagcttggtcaaagatgctgacacatctcatttgaatgaacatgattatcaaccctagtagtagtaccctatgatgctgccgcacgatttgtaactgtttttttagcaagggcttgacatggtacaatttattataggtcagacttaaactcttgcttccagtttactctaaagtaaccaaatcaccatcactttctacatcagcaaatagaaaagcatggaatgcacaggacattttttttagtgaaattgcacggagctatacatacatgtgggcagacatccactgcagttgcaatggagctttcacagctcttttatatgatgtttgtctgcagagtttggtggctcacagcatatataaaatgcaatataagcataccgatagccttgttaactcagtggttaatctagtacaagttgccagctgatagtaaattgatcaatggggagacagccgtgctgtgacaaggagggggtgaagcgagggccatggacagcggaggaggacaagaagctcattagcttcatcctgacacatggccggtgctgctggcgggcagtgcctaaacttgcagggctgcttcgttgtggcaagagctgccgtctgcggtggactaactatcttcgccctgacctcaagcgtggcctcctcagcactgccgaggagcagcttgtcattgacctccatgccaagctcggaaatagttaatgatacaccgatgtggatttcatacctgcatgtgaattgaagagcacactagaattgaagggcaatagtaacagcaccgctcagatggtcccagatcgctgccaagttacctggaagaacagacaatgagatcaagaaccactggaacacgcacatcaagaagaagcttatcaagatgggcatcaacccggccacgcaccagcctctagccaactccaaggcagctccctcacactccacaggtacagacgaatccgctaaatccagcgacaccagagaggagctgagcctgaaggatgacaaccatcatagggaggttccgctgtccaccgattcatcggagcagtccagctggccagagccaggcagcaacgtcggcgaccaagaccctgaactgctggtgaattggccgtcggagaccgacttgtcagtggacgagtcttggctgggttttatgagcaacggcaatgagcttggcgatgtcgaggggacgtcgccgtgggacggaacaacagactggctgctggactaccaagattttggcatgtgcagctccaacttggtggacgattcaatgttccgcgcctcaaatggattgaacttctaaatgtcggagaaaggctgtccaatttcaagaaatagggaggaagacagactgcaagtttgagcgcactgcacagctcccagtatagaaaatagatacaacactttcaagaataagattgtgaaaagagagagagagaggcatggggcatatcttgaccatagaatagtgataccttgcccttaaaagtaaggggtttgtattgttagaaacctaatgtttctcggtacgagaagctgaagaactagacccaaatgttcgaaccatgcaaggcatcctatcctatgaacaaagttagggtgttgcagcttttctgtgcaagctaaggctgtgctctgagcagtacaacagcgaggttttatcttgatatctccctgttgctgtccctggcaactgtggagcaattacagagttcaggacatgttgtgttagagactcacactcaccatccttgttccaacatcagactcatcacacaggcttgtggactttgatgtgcgtaatgttaagcagttgcacggcagagacgaaaggaacacgactgtacgtggatcagcaagagccttcctggattctgcacgttggtcagtccagttgcggcggttggtcagtccagttttcatgagggcaaaggtgtgttcccttctctgttccgttgccgtccatgtctgtccctgacaaagatgcaggaccttaaaaggagccagtgaaccaaccatcttccaaatcctgacgtgtttcttccaactccgatgactgaaataaaatgaagtgccagcagaaaccaaagccttgttcgagagctaacttccttccaagctcaccaggtggctttgttgcgtcgtaagcactgttgaacttctccactgcactgatggtgatggcaataacttggctgacagggagggattcatggggactaatctccatgctattcaaaattgaatagcaaactgatttctctctatagatactctctattttcctgtccaccaaaccagccctgaaagattcggaaacccctgtcgtggaaagcttgagcgcgagcctgtttgtgtggcgcagtttagggaaatttggtttataggactaaattttagtacctaaattgccgaacacagatattaaaatagagataaaaaatagagagaatttctcttt

SEQ ID NO: 3769 - DNA, 3011 bp, Zea Mays
gacgcgcccgccgcccgctgccatgggacccacggaatccaacctcacccgccggctgccgctcggctgccctccggcctccgggcatcgccatcggagtgtgcaggaaccaggaggaggccggtagagtccgtgcacccgggtcccactcccctgaggccgtccgtggctccgtgcaagatggggattgcgcaagggtgcgaggtcaccatccccgcgcctggtcatcagtgattcagcagaagaatgagttggtgtctttccgatctcaatgcatttcaccgctccaccagaaattccctctgcccctaccgtactccagtttatctgttatagtgcaacacaatgataaaatggttggtgagatatagttgcttaagatggcaacaggggcggcacacatatatgcttttgtggggaatggaggcttcaatacttagagataatcatactttagttcctgttgcatcatctgcaaacaaattcccgtgtttagaaaaggatagctaactagaaatttgagctaatttatctgcaaatagggtgttgttcatttcagtatgctagttaattaagatcacaccatccttttgtaccatattgtaatattgaagtaaataatcagcttggtcaaagatgctgacacatctcatttgaatgaacatgattatcaaccctagtagtagtaccctatgatgctgccgcacgatttgtaactgtttttttagcaagggcttgacatggtacaatttattataggtcagacttaaactcttgcttccagtttactctaaagtaaccaaatcaccatcactttctacatcagcaaatagaaaagcatggaatgcacaggacattttttttagtgaaattgcacggagctatacatacatgtgggcagacatccactgcagttgcaatggagctttcacagctcttttatatgatgtttgtctgcagagtttggtggctcacagcatatataaaatgcaatataagcataccgatagccttgttaactcagtggttaatctagtacaagttgccagctgatagtaaattgatcaatggggagacagccgtgctgtgacaaggagggggtgaagcgagggccatggacagcggaggaggacaagaagctcattagcttcatcctgacacatggccggtgctgctggcgggcagtgcctaaacttgcagggctgcttcgttgtggcaagagctgccgtctgcggtggactaactatcttcgccctgacctcaagcgtggcctcctcagcactgccgaggagcagcttgtcattgacctccatgccaagctcggaaatagatggtcccagatcgctgccaagttacctggaagaacagacaatgagatcaagaaccactggaacacgcacatcaagaagaagcttatcaagatgggcatcaacccggccacgcaccagcctctagccaactccaaggcagctccctcacactccacaggtacagacgaatccgctaaatccagcgacaccagagaggagctgagcctgaaggatgacaaccatcatagggaggttccgctgtccaccgattcatcggagcagtccagctggccagagccaggcagcaacgtcggcgaccaagaccctgaactgctggtgaattggccgtcggagaccgacttgtcagtggacgagtcttggctgggttttatgagcaacggcaatgagcttggcgatgtcgaggggacgtcgccgtgggacggaacaacagactggctgctggactaccaagattttggcatgtgcagctccaacttggtggacgattcaatgttccgcgcctcaaatggattgaacttctaaatgtcggagaaaggctgtccaatttcaagaaatagggaggaagacagactgcaagtttgagcgcactgcacagctcccagtatagaaaatagatacaacactttcaagaataagattgtgaaaagagagagagagaggcatggggcatatcttgaccatagaatagtgataccttgcccttaaaagtaaggggtttgtattgttagaaacctaatgtttctcggtacgagaagctgaagaactagacccaaatgttcgaaccatgcaaggcatcctatcctatgaacaaagttagggtgttgcagcttttctgtgcaagctaaggctgtgctctgagcagtacaacagcgaggttttatcttgatatctccctgttgctgtccctggcaactgtggagcaattacagagttcaggacatgttgtgttagagactcacactcaccatccttgttccaacatcagactcatcacacaggcttgtggactttgatgtgcgtaatgttaagcagttgcacggcagagacgaaaggaacacgactgtacgtggatcagcaagagccttcctggattctgcacgttggtcagtccagttgcggcggttggtcagtccagttttcatgagggcaaaggtgtgttcccttctctgttccgttgccgtccatgtctgtccctgacaaagatgcaggaccttaaaaggagccagtgaaccaaccatcttccaaatcctgacgtgtttcttccaactccgatgactgaaataaaatgaagtgccagcagaaaccaaagccttgttcgagagctaacttccttccaagctcaccaggtggctttgttgcgtcgtaagcactgttgaacttctccactgcactgatggtgatggcaataacttggctgacagggagggattcatggggactaatctccatgctattcaaaattgaatagcaaactgatttctctctatagatactctctattttcctgtccaccaaaccagccctgaaagattcggaaacccctgtcgtggaaagcttgagcgcgagcctgtttgtgtggcgcagtttagggaaatttggtttataggactaaattttagtacctaaattgccgaacacagatattaaaatagagataaaaaatagagagaatttctcttt

SEQ ID NO: 3770 - DNA, 2404 bp, Zea Mays
cgcgcccgccgcccgctgccatgggacccacggaatccaacctcacccgccggctgccgctcggctgccctccggcctccgggcatcgccatcggagtgtgcaggaaccaggaggaggccggtagagtccgtgcacccgggtcccactcccctgaggccgtccgtggctccgtgcaagatggggattgcgcaagggtgcgaggtcaccatccccgcgcctggtcatcagtattcagcagaagaatgagttggtgtctttccgatctcaatgcatttcaccgctccaccagaaattccctctgcccctaccgtactccagtttatctgttatagtgcaacacaatgataaaatgagtttggtggctcacagcatatataaaatgcaatataagcataccgatagccttgttaactcagtggttaatctagtacaagttgccagctgatagtaaattgatcaatggggagacagccgtgctgtgacaaggagggggtgaagcgagggccatggacagcggaggaggacaagaagctcattagcttcatcctgacacatggccggtgctgctggcgggcagtgcctaaacttgcagggctgcttcgttgtggcaagagctgccgtctgcggtggactaactatcttcgccctgacctcaagcgtggcctcctcagcactgccgaggagcagcttgtcattgacctccatgccaagctcggaaatagatggtcccagatcgctgccaagttacctggaagaacagacaatgagatcaagaaccactggaacacgcacatcaagaagaagcttatcaagatgggcatcaacccggccacgcaccagcctctagccaactccaaggcagctccctcacactccacaggtacagacgaatccgctaaatccagcgacaccagagaggagctgagcctgaaggatgacaaccatcatagggaggttccgctgtccaccgattcatcggagcagtccagctggccagagccaggcagcaacgtcggcgaccaagaccctgaactgctggtgaattggccgtcggagaccgacttgtcagtggacgagtcttggctgggttttatgagcaacggcaatgagcttggcgatgtcgaggggacgtcgccgtgggacggaacaacagactggctgctggactaccaagattttggcatgtgcagctccaacttggtggacgattcaatgttccgcgcctcaaatggattgaacttctaaatgtcggagaaaggctgtccaatttcaagaaatagggaggaagacagactgcaagtttgagcgcactgcacagctcccagtatagaaaatagatacaacactttcaagaataagattgtgaaaagagagagagagaggcatggggcatatcttgaccatagaatagtgataccttgcccttaaaagtaaggggtttgtattgttagaaacctaatgtttctcggtacgagaagctgaagaactagacccaaatgttcgaaccatgcaaggcatcctatcctatgaacaaagttagggtgttgcagcttttctgtgcaagctaaggctgtgctctgagcagtacaacagcgaggttttatcttgatatctccctgttgctgtccctggcaactgtggagcaattacagagttcaggacatgttgtgttagagactcacactcaccatccttgttccaacatcagactcatcacacaggcttgtggactttgatgtgcgtaatgttaagcagttgcacggcagagacgaaaggaacacgactgtacgtggatcagcaagagccttcctggattctgcacgttggtcagtccagttgcggcggttggtcagtccagttttcatgagggcaaaggtgtgttcccttctctgttccgttgccgtccatgtctgtccctgacaaagatgcaggaccttaaaaggagccagtgaaccaaccatcttccaaatcctgacgtgtttcttccaactccgatgactgaaataaaatgaagtgccagcagaaaccaaagccttgttcgagagctaacttccttccaagctcaccaggtggctttgttgcgtcgtaagcactgttgaacttctccactgcactgatggtgatggcaataacttggctgacagggagggattcatggggactaatctccatgctattcaaaattgaatagcaaactgatttctctctatagatactctctattttcctgtccaccaaaccagccctgaaagattcggaaacccctgtcgtggaaagcttgagcgcgagcctgtttgtgtggcgcagtttagggaaatttggtttataggactaaattttagtacctaaattgccgaacacagatattaaaatagagataaaaaatagagagaatttctcttt

SEQ ID NO: 3771 - DNA, 5205 bp, Zea Mays
ccgcccgctgccatgggacccacggaatccaacctcacccgccggctgccgctcggctgccctccggcctccgggcatcgccatcggagtgtgcaggaaccaggaggaggccggtagagtccgtgcacccgggtcccactcccctgaggccgtccgtggctccgtgcaagatggggattgcgcaagggtgcgaggtcaccatccccgcgcctggtcatcagtgtgagttgagattctgcgtctcctcgctcgatttacttgcagccacatgcttgcgagttgcggtacccagcttagctttttcgagtccttgctaatcttggtggggacgacggagacctgatgctatgcttccttccctccctgtgctgttgagttccgcttccacagctcgtgtatggccgacacggtaatcgctgcgaaacgaggtcatgcgcgtcttccttgtgctttcggatgcaccgaggcttgccatccaaaattcgctgcaatgcttagctagatcgaaggcctacttacgctcagaggtgtcagcttggggatccccatcttttatctcttgtcgtggttaaaacagcggcctgatatgtcaggtgtttgttccgcaaaagggttggacttcccacgttttgggatgagagtttgttcggaatagcatgctcaaagtcatggaatttggtcgcagggagtgatcaagtaggtactaggacagtcctctccctttggtggtgctgttgattccttgcaagacctgtacctctgtgctcagataatccagcatgtgctgcattcagatgggagattgaatgaaagtgtgtaataccagtagcttcctcaaatactgcagattgaatgcacgacaggaacattccaactttgttgtcggtatccattcttcatgaagacgtcagtatagccggctccactgaattcttcaaatggaataccttgttaattatctgcaaaattttgtaaccaataatggagcacttggaggctcatagaagctacatttactagctggatttttaaattggtttctctttggagaagtaggtgcaatcttttttgtaagcatagtcaaatttttaccctttcagaaagttcttgtgccgaaagcttgtggaatgtggtactgaggaccacttaattcaaaactaaagtggctaggtgatcatatttcaaggcctaaatatttagaatgcctcccctaatcaagacttttttccccttgtcaatctacatcagttgcactgtttcatagctggaaggttggtaatccaggctgtcaatcagtgaattagtctgacgggatgtagcgatacccagcccattctcttttagtggcatctcctaaagttagtcttcgtaatgtgagcagtagtcatgttcatggaagattcaggaataccaagtctgattcaggaatacaagtcttttgctaggatgttgcactatactgtggttttatacttttatctgtcagtaactgcctaactggtggtgaatttctagtttcttctgcgtgttttgtccatttcattgatcagcttgatcattggtgaatcacaattgaacttggaatgataggctaatactttcaagtagggaatttggtagtttgattcatctggtagggttacatagaaattgaaacttaaatggtttggtaaaaagtaaatctgggacaaaattttaccattaagaacctatatgagacgatatcgcttgtttgattcatcttgatgtaattaacaaccatctattgatgaattctaaggggtaaaggatacaaacagaagttaggatttaggattgacacacttctccccttgcctttttctctactcaactgaattgcaatgtgaaactgaaaattcgtatgatggtagatccttgagtactacctttacagttgttttagaagttttcatattatcttttaggaacaaaatgatagtatttgtcatgatagctagtgtgtgatctgctcatctgcattatgtctcatggaaatgtacatcacaaattatagcttattgataaatattggaaggctggatggatgatacctatgacctaggaaattattgttttcatctgccacttctcttcaaaaagcaaacttctgtttactgcttttacttttcaacacagaaacacacatcgctacctgggatagcaacagtgcacagactctgagagtaacaattaaacagttgcaatttttatggtgtgggcattttgtttgcatggacattttttctcttattttttatacaagatgcatgcagaagaatgagttagcattgtgtatcagaagattgatgctgttctatcagcagttgctaacattttccttggattggattgtgtttatgtagaaataataatctgttaaactttctgtcttgtgttatatttgtctatataaataataagatgctctagttttagtgcacagtctttcacagattggagcttcttgcatatgcagattcagcagaagaatgagttggtgtctttccgatctcaatgcatttcaccgctccaccagaaattccctctgcccctaccgtactccagtttatctgttatagtgcaacacaatgataaaatggttggtgagatatagttgcttaagatggcaacaggggcggcacacatatatgcttttgtggggaatggaggcttcaatacttagagataatcatactttagttcctgttgcatcatctgcaaacaaattcccgtgtttagaaaaggatagctaactagaaatttgagctaatttatctgcaaatagggtgttgttcatttcagtatgctagttaattaagatcacaccatccttttgtaccatattgtaatattgaagtaaataatcagcttggtcaaagatgctgacacatctcatttgaatgaacatgattatcaaccctagtagtagtaccctatgatgctgccgcacgatttgtaactgtttttttagcaagggcttgacatggtacaatttattataggtcagacttaaactcttgcttccagtttactctaaagtaaccaaatcaccatcactttctacatcagcaaatagaaaagcatggaatgcacaggacattttttttagtgaaattgcacggagctatacatacatgtgggcagacatccactgcagttgcaatggagctttcacagctcttttatatgatgtttgtctgcagagtttggtggctcacagcatatataaaatgcaatataagcataccgatagccttgttaactcagtggttaatctagtacaagttgccagctgatagtaaattgatcaatggggagacagccgtgctgtgacaaggagggggtgaagcgagggccatggacagcggaggaggacaagaagctcattagcttcatcctgacacatggccggtgctgctggcgggcagtgcctaaacttgcagggctgcttcgttgtggcaagagctgccgtctgcggtggactaactatcttcgccctgacctcaagcgtggcctcctcagcactgccgaggagcagcttgtcattgacctccatgccaagctcggaaatagatggtcccagatcgctgccaagttacctggaagaacagacaatgagatcaagaaccactggaacacgcacatcaagaagaagcttatcaagatgggcatcaacccggccacgcaccagcctctagccaactccaaggcagctccctcacactccacagggaggttccgctgtccaccgattcatcggagcagtccagctggccagagccaggcagcaacgtcggcgaccaagaccctgaactgctggtgaattggccgtcggagaccgacttgtcagtggacgagtcttggctgggttttatgagcaacggcaatgagcttggcgatgtcgaggggacgtcgccgtgggacggaacaacagactggctgctggactaccaagattttggcatgtgcagctccaacttggtggacgattcaatgttccgcgcctcaaatggattgaacttctaaatgtcggagaaaggctgtccaatttcaagaaatagggaggaagacagactgcaagtttgagcgcactgcacagctcccagtatagaaaatagatacaacactttcaagaataagattgtgaaaagagagagagagaggcatggggcatatcttgaccatagaatagtgataccttgcccttaaaagtaaggggtttgtattgttagaaacctaatgtttctcggtacgagaagctgaagaactagacccaaatgttcgaaccatgcaaggcatcctatcctatgaacaaagttagggtgttgcagcttttctgtgcaagctaaggctgtgctctgagcagtacaacagcgaggttttatcttgatatctccctgttgctgtccctggcaactgtggagcaattacagagttcaggacatgttgtgttagagactcacactcaccatccttgttccaacatcagactcatcacacaggcttgtggactttgatgtgcgtaatgttaagcagttgcacggcagagacgaaaggaacacgactgtacgtggatcagcaagagccttcctggattctgcacgttggtcagtccagttgcggcggttggtcagtccagttttcatgagggcaaaggtgtgttcccttctctgttccgttgccgtccatgtctgtccctgacaaagatgcaggaccttaaaaggagccagtgaaccaaccatcttccaaatcctgacgtgtttcttccaactccgatgactgaaataaaatgaagtgccagcagaaaccaaagccttgttcgagagctaacttccttccaagctcaccaggtggctttgttgcgtcgtaagcactgttgaacttctccactgcactgatggtgatggcaataacttggctgacagggagggattcatggggactaatctccatgctattcaaaattgaatagcaaactgatttctctctatagatactctctattttcctgtccaccaaaccagccctgaaagattcggaaacccctgtcgtggaaagcttgagcgcgagcctgtttgtgtggcgcagtttagggaaatttggtttataggactaaattttagtacctaaattgccgaacacagatattaaaatagagataaaaaatagagagaatttctcttt

SEQ ID NO: 3772 - DNA, 2356 bp, Zea Mays
cgctgccatgggacccacggaatccaacctcacccgccggctgccgctcggctgccctccggcctccgggcatcgccatcggagtgtgcaggaaccaggaggaggccggtagagtccgtgcacccgggtcccactcccctgaggccgtccgtggctccgtgcaagatggggattgcgcaagggtgcgaggtcaccatccccgcgcctggtcatcagtagtttggtggctcacagcatatataaaatgcaatataagcataccgatagccttgttaactcagtggttaatctagtacaagttgccagctgatagtaaattgatcaatggggagacagccgtgctgtgacaaggagggggtgaagcgagggccatggacagcggaggaggacaagaagctcattagcttcatcctgacacatggccggtgctgctggcgggcagtgcctaaacttgcagggctgcttcgttgtggcaagagctgccgtctgcggtggactaactatcttcgccctgacctcaagcgtggcctcctcagcactgccgaggagcagcttgtcattgacctccatgccaagctcggaaatagttaatgatacaccgatgtggatttcatacctgcatgtgaattgaagagcacactagaattgaagggcaatagtaacagcaccgctcagatggtcccagatcgctgccaagttacctggaagaacagacaatgagatcaagaaccactggaacacgcacatcaagaagaagcttatcaagatgggcatcaacccggccacgcaccagcctctagccaactccaaggcagctccctcacactccacaggtacagacgaatccgctaaatccagcgacaccagagaggagctgagcctgaaggatgacaaccatcatagggaggttccgctgtccaccgattcatcggagcagtccagctggccagagccaggcagcaacgtcggcgaccaagaccctgaactgctggtgaattggccgtcggagaccgacttgtcagtggacgagtcttggctgggttttatgagcaacggcaatgagcttggcgatgtcgaggggacgtcgccgtgggacggaacaacagactggctgctggactaccaagattttggcatgtgcagctccaacttggtggacgattcaatgttccgcgcctcaaatggattgaacttctaaatgtcggagaaaggctgtccaatttcaagaaatagggaggaagacagactgcaagtttgagcgcactgcacagctcccagtatagaaaatagatacaacactttcaagaataagattgtgaaaagagagagagagaggcatggggcatatcttgaccatagaatagtgataccttgcccttaaaagtaaggggtttgtattgttagaaacctaatgtttctcggtacgagaagctgaagaactagacccaaatgttcgaaccatgcaaggcatcctatcctatgaacaaagttagggtgttgcagcttttctgtgcaagctaaggctgtgctctgagcagtacaacagcgaggttttatcttgatatctccctgttgctgtccctggcaactgtggagcaattacagagttcaggacatgttgtgttagagactcacactcaccatccttgttccaacatcagactcatcacacaggcttgtggactttgatgtgcgtaatgttaagcagttgcacggcagagacgaaaggaacacgactgtacgtggatcagcaagagccttcctggattctgcacgttggtcagtccagttgcggcggttggtcagtccagttttcatgagggcaaaggtgtgttcccttctctgttccgttgccgtccatgtctgtccctgacaaagatgcaggaccttaaaaggagccagtgaaccaaccatcttccaaatcctgacgtgtttcttccaactccgatgactgaaataaaatgaagtgccagcagaaaccaaagccttgttcgagagctaacttccttccaagctcaccaggtggctttgttgcgtcgtaagcactgttgaacttctccactgcactgatggtgatggcaataacttggctgacagggagggattcatggggactaatctccatgctattcaaaattgaatagcaaactgatttctctctatagatactctctattttcctgtccaccaaaccagccctgaaagattcggaaacccctgtcgtggaaagcttgagcgcgagcctgtttgtgtggcgcagtttagggaaatttggtttataggactaaattttagtacctaaattgccgaacacagatattaaaatagagataaaaaatagagagaatttctcttt

SEQ ID NO: 3773 - DNA, 4645 bp, Zea Mays
cgctgccatgggacccacggaatccaacctcacccgccggctgccgctcggctgccctccggcctccgggcatcgccatcggagtgtgcaggaaccaggaggaggccggtagagtccgtgcacccgggtcccactcccctgaggccgtccgtggctccgtgcaagatggggattgcgcaagggtgcgaggtcaccatccccgcgcctggtcatcagtattgaatgcacgacaggaacattccaactttgttgtcggtatccattcttcatgaagacgtcagtatagccggctccactgaattcttcaaatggaataccttgttaattatctgcaaaattttgtaaccaataatggagcacttggaggctcatagaagctacatttactagctggatttttaaattggtttctctttggagaagtaggtgcaatcttttttgtaagcatagtcaaatttttaccctttcagaaagttcttgtgccgaaagcttgtggaatgtggtactgaggaccacttaattcaaaactaaagtggctaggtgatcatatttcaaggcctaaatatttagaatgcctcccctaatcaagacttttttccccttgtcaatctacatcagttgcactgtttcatagctggaaggttggtaatccaggctgtcaatcagtgaattagtctgacgggatgtagcgatacccagcccattctcttttagtggcatctcctaaagttagtcttcgtaatgtgagcagtagtcatgttcatggaagattcaggaataccaagtctgattcaggaatacaagtcttttgctaggatgttgcactatactgtggttttatacttttatctgtcagtaactgcctaactggtggtgaatttctagtttcttctgcgtgttttgtccatttcattgatcagcttgatcattggtgaatcacaattgaacttggaatgataggctaatactttcaagtagggaatttggtagtttgattcatctggtagggttacatagaaattgaaacttaaatggtttggtaaaaagtaaatctgggacaaaattttaccattaagaacctatatgagacgatatcgcttgtttgattcatcttgatgtaattaacaaccatctattgatgaattctaaggggtaaaggatacaaacagaagttaggatttaggattgacacacttctccccttgcctttttctctactcaactgaattgcaatgtgaaactgaaaattcgtatgatggtagatccttgagtactacctttacagttgttttagaagttttcatattatcttttaggaacaaaatgatagtatttgtcatgatagctagtgtgtgatctgctcatctgcattatgtctcatggaaatgtacatcacaaattatagcttattgataaatattggaaggctggatggatgatacctatgacctaggaaattattgttttcatctgccacttctcttcaaaaagcaaacttctgtttactgcttttacttttcaacacagaaacacacatcgctacctgggatagcaacagtgcacagactctgagagtaacaattaaacagttgcaatttttatggtgtgggcattttgtttgcatggacattttttctcttattttttatacaagatgcatgcagaagaatgagttagcattgtgtatcagaagattgatgctgttctatcagcagttgctaacattttccttggattggattgtgtttatgtagaaataataatctgttaaactttctgtcttgtgttatatttgtctatataaataataagatgctctagttttagtgcacagtctttcacagattggagcttcttgcatatgcagattcagcagaagaatgagttggtgtctttccgatctcaatgcatttcaccgctccaccagaaattccctctgcccctaccgtactccagtttatctgttatagtgcaacacaatgataaaatggttggtgagatatagttgcttaagatggcaacaggggcggcacacatatatgcttttgtggggaatggaggcttcaatacttagagataatcatactttagttcctgttgcatcatctgcaaacaaattcccgtgtttagaaaaggatagctaactagaaatttgagctaatttatctgcaaatagggtgttgttcatttcagtatgctagttaattaagatcacaccatccttttgtaccatattgtaatattgaagtaaataatcagcttggtcaaagatgctgacacatctcatttgaatgaacatgattatcaaccctagtagtagtaccctatgatgctgccgcacgatttgtaactgtttttttagcaagggcttgacatggtacaatttattataggtcagacttaaactcttgcttccagtttactctaaagtaaccaaatcaccatcactttctacatcagcaaatagaaaagcatggaatgcacaggacattttttttagtgaaattgcacggagctatacatacatgtgggcagacatccactgcagttgcaatggagctttcacagctcttttatatgatgtttgtctgcagagtttggtggctcacagcatatataaaatgcaatataagcataccgatagccttgttaactcagtggttaatctagtacaagttgccagctgatagtaaattgatcaatggggagacagccgtgctgtgacaaggagggggtgaagcgagggccatggacagcggaggaggacaagaagctcattagcttcatcctgacacatggccggtgctgctggcgggcagtgcctaaacttgcagggctgcttcgttgtggcaagagctgccgtctgcggtggactaactatcttcgccctgacctcaagcgtggcctcctcagcactgccgaggagcagcttgtcattgacctccatgccaagctcggaaatagatggtcccagatcgctgccaagttacctggaagaacagacaatgagatcaagaaccactggaacacgcacatcaagaagaagcttatcaagatgggcatcaacccggccacgcaccagcctctagccaactccaaggcagctccctcacactccacaggtacagacgaatccgctaaatccagcgacaccagagaggagctgagcctgaaggatgacaaccatcatagggaggttccgctgtccaccgattcatcggagcagtccagctggccagagccaggcagcaacgtcggcgaccaagaccctgaactgctggtgaattggccgtcggagaccgacttgtcagtggacgagtcttggctgggttttatgagcaacggcaatgagcttggcgatgtcgaggggacgtcgccgtgggacggaacaacagactggctgctggactaccaagattttggcatgtgcagctccaacttggtggacgattcaatgttccgcgcctcaaatggattgaacttctaaatgtcggagaaaggctgtccaatttcaagaaatagggaggaagacagactgcaagtttgagcgcactgcacagctcccagtatagaaaatagatacaacactttcaagaataagattgtgaaaagagagagagagaggcatggggcatatcttgaccatagaatagtgataccttgcccttaaaagtaaggggtttgtattgttagaaacctaatgtttctcggtacgagaagctgaagaactagacccaaatgttcgaaccatgcaaggcatcctatcctatgaacaaagttagggtgttgcagcttttctgtgcaagctaaggctgtgctctgagcagtacaacagcgaggttttatcttgatatctccctgttgctgtccctggcaactgtggagcaattacagagttcaggacatgttgtgttagagactcacactcaccatccttgttccaacatcagactcatcacacaggcttgtggactttgatgtgcgtaatgttaagcagttgcacggcagagacgaaaggaacacgactgtacgtggatcagcaagagccttcctggattctgcacgttggtcagtccagttgcggcggttggtcagtccagttttcatgagggcaaaggtgtgttcccttctctgttccgttgccgtccatgtctgtccctgacaaagatgcaggaccttaaaaggagccagtgaaccaaccatcttccaaatcctgacgtgtttcttccaactccgatgactgaaataaaatgaagtgccagcagaaaccaaagccttgttcgagagctaacttccttccaagctcaccaggtggctttgttgcgtcgtaagcactgttgaacttctccactgcactgatggtgatggcaataacttggctgacagggagggattcatggggactaatctccatgctattcaaaattgaatagcaaactgatttctctctatagatactctctattttcctgtccaccaaaccagccctgaaagattcggaaacccctgtcgtggaaagcttgagcgcgagcctgtttgtgtggcgcagtttagggaaatttggtttataggactaaattttagtacctaaattgccgaacacagatattaaaatagagataaaaaatagagagaatttctcttt

SEQ ID NO: 3774 - DNA, 2149 bp, Zea Mays
cgctgccatgggacccacggaatccaacctcacccgccggctgccgctcggctgccctccggcctccgggcatcgccatcggagtgtgcaggaaccaggaggaggccggtagagtccgtgcacccgggtcccactcccctgaggccgtccgtggctccgtgcaagatggggattgcgcaagggtgcgaggtcaccatccccgcgcctggtcatcagtccgtgctgtgacaaggagggggtgaagcgagggccatggacagcggaggaggacaagaagctcattagcttcatcctgacacatggccggtgctgctggcgggcagtgcctaaacttgcagggctgcttcgttgtggcaagagctgccgtctgcggtggactaactatcttcgccctgacctcaagcgtggcctcctcagcactgccgaggagcagcttgtcattgacctccatgccaagctcggaaatagatggtcccagatcgctgccaagttacctggaagaacagacaatgagatcaagaaccactggaacacgcacatcaagaagaagcttatcaagatgggcatcaacccggccacgcaccagcctctagccaactccaaggcagctccctcacactccacaggtacagacgaatccgctaaatccagcgacaccagagaggagctgagcctgaaggatgacaaccatcatagggaggttccgctgtccaccgattcatcggagcagtccagctggccagagccaggcagcaacgtcggcgaccaagaccctgaactgctggtgaattggccgtcggagaccgacttgtcagtggacgagtcttggctgggttttatgagcaacggcaatgagcttggcgatgtcgaggggacgtcgccgtgggacggaacaacagactggctgctggactaccaagattttggcatgtgcagctccaacttggtggacgattcaatgttccgcgcctcaaatggattgaacttctaaatgtcggagaaaggctgtccaatttcaagaaatagggaggaagacagactgcaagtttgagcgcactgcacagctcccagtatagaaaatagatacaacactttcaagaataagattgtgaaaagagagagagagaggcatggggcatatcttgaccatagaatagtgataccttgcccttaaaagtaaggggtttgtattgttagaaacctaatgtttctcggtacgagaagctgaagaactagacccaaatgttcgaaccatgcaaggcatcctatcctatgaacaaagttagggtgttgcagcttttctgtgcaagctaaggctgtgctctgagcagtacaacagcgaggttttatcttgatatctccctgttgctgtccctggcaactgtggagcaattacagagttcaggacatgttgtgttagagactcacactcaccatccttgttccaacatcagactcatcacacaggcttgtggactttgatgtgcgtaatgttaagcagttgcacggcagagacgaaaggaacacgactgtacgtggatcagcaagagccttcctggattctgcacgttggtcagtccagttgcggcggttggtcagtccagttttcatgagggcaaaggtgtgttcccttctctgttccgttgccgtccatgtctgtccctgacaaagatgcaggaccttaaaaggagccagtgaaccaaccatcttccaaatcctgacgtgtttcttccaactccgatgactgaaataaaatgaagtgccagcagaaaccaaagccttgttcgagagctaacttccttccaagctcaccaggtggctttgttgcgtcgtaagcactgttgaacttctccactgcactgatggtgatggcaataacttggctgacagggagggattcatggggactaatctccatgctattcaaaattgaatagcaaactgatttctctctatagatactctctattttcctgtccaccaaaccagccctgaaagattcggaaacccctgtcgtggaaagcttgagcgcgagcctgtttgtgtggcgcagtttagggaaatttggtttataggactaaattttagtacctaaattgccgaacacagatattaaaatagagataaaaaatagagagaatttctcttt

SEQ ID NO: 3775 - DNA, 1103 bp, Zea Mays
atagatcgcctgtgcaccctaagtccatccgtcacaacctcaagatgcccccggggaagaaggggccgcgagtcccacgacatcacgcagaagatacagaacctactcctacagactatgagaaacagagggcaattacaatcatgaagaataatcaaatgatgcaacggttagggattcgtcaattacagtcaatgatggctagtattccaagtggaaggatgaacgataatgctcctcaggaatctggatcgttgtatgatggtgatgatattgaagactctgaggatgagatggaatccctagttgataagtcggtagccagccacatccccaacaatggtgctgaaatctcttcgaaaaatacaagagcctctaaaagggttgttgcacctggagtgcaagaacaaccaattagagttactaggcgaaggagtgctaccataaaccaagagtccaaccaaaatataatggctggtatattatctgattcttgtgatgccacaaaccaagattgcatccaacgcatatctactgttgtacaacctagttcaccaatagagaccgagagcgaagatcccaccggagaccaagaactagtaccaaggcaaagaagtatgggcaggcaacttgagtcattaagcagaggattaggcattaagattccaatccagattcgtgaagggaaaagaagaccagaggcacctatccaagctgccaaatttgcatcagagggtgggatcgcacttaggcagcacatgccgatattttcacattggaaggagtacaagaagaaagagaacgctggtaaaatagaaaactacattggaaagattgctggacaattcaccatggatgctgataatacagcagtgagagcagcatgtattgatatgctaaagggtggtcatcgctagatgaggtataacctaaaaaagaaatacttcaatgaggttcctgcaaatctagtgaggactacatcgcctgtttcgtgcatgactgatgaccaatggaaacttctagtagaaatgtggtctacctcaaagcacaaggacacatgtatgaagaacaaaattagtcgtgaacaagtaaagtttccacaa

SEQ ID NO: 3776 - DNA, 1827 bp, Zea Mays
cctcaagcaagcagagcgccgtgacatcacgaaacatatagagctagctgctctgcctctgcttcaccaatcacctcgcggaggggaaggtttccccctttgacacagccgagctcccctccatcagcagccagctcctcgtcgcaaagcaagaagatgatgctcgcgtacatggaccgcgcgacggcggccgccgagccagaggacgccggccgcgagcccgccaccacggcgggcgggtgcgcggcggcggcggcgacggatttcggcgggctggcgagcgccatgcccgcggccgtggtccgcccggcgagcgcggacgacgtggccagcgccatccgcgcggcggcgctgacgccgcacctcaccgtggccgcccgcgggaacgggcactcggtggccggccaggccatggccgagggcgggctggtcctcgacatgcgctcgctcgcggcgccgtcccggcgcgcgcagatgcagctcgtcgtgcagtgccccgacggcggcggcggccgccgctgcttcgccgacgtccccggcggcgcgctctgggaggaggtgctccactgggccgtcgacaaccacgggctcgccccggcgtcctggacggactacctccgcctcaccgtgggcggcacgctctccaatggcggcgtcagcggccagtccttccgctacgggccccaggtgtccaacgtggccgagctcgaggtggtcaccggcgacggcgagcgccgcgtctgctcgccctcctcccacccggacctcttcttcgccgtgctcggcgggctcggccagttcggcgtcatcacgcgcgcccgcatcccgctccacagggcgccccaggcggtgagcgcgcggacatcgggtcggggcgaaagctaaagcttgctttttgcttgggcactactaactgactgacgttgccattcaggtgcggtggacgcgcgtggtgtacgcgagcatcgcggactacacggcggacgcggagtggctggtgacgcggccccccgacgcggcgttcgactacgtggagggcttcgcgttcgtgaacagcgacgaccccgtgaacggctggccgtccgtgcccatccccggcggcgcccgcttcgacccgtccctcctccccgccggcgccggccccgtcctctactgcctggaggtggccctgtaccagtacgcgcaccggcccgacgacgtcgacgacgacgatgaggaggaccaggacctgccctgccaggataccagccggagagctttcaggcgacaaaagccgcggcgaggggatcagcgaggatctgccgggccaccgccaccgccgccgccccgcgttttatactggagggtgggtgtgctccaagtggtgcctttctgacaacgcgatctaggctatgagtagtgtcgtccaagcgaccgtatccacaatccatcaaccttagcgatcttttgagttcaaaaaaagaaaaaaaaaaccttagcaatctttttttaagttccttccgataaataaaacaggagatcaaggaaagacagagacggccacgacggtatatttttttttggtgccgtgttcgattcataggatccaactgttttgcccacaaacgacaagggaccgcgctgccgccggtgagctccgcttggatggacgtcctgtcgctgcggcccggggtccggacggacgaaagaaatggacgcgagggggggtggcggccatgcactattgaagaggtcggatttgcaactgatgcatgctcctaagttgtatgtagctgtcctagatgattgtttattttcttatatatgtttgggtgagagcgacttgac

SEQ ID NO: 3777 - DNA, 2143 bp, Zea Mays
caagcagagcgccgtgacatcacgaaacatatagagctagctgctctgcctctgcttcaccaatcacctcgcggaggggaaggtttccccctttgacacagccgagctcccctccatcagcagccagctcctcgtcgcaaagcaagaagatgatgctcgcgtacatggaccgcgcgacggcggccgccgagccagaggacgccggccgcgagcccgccaccacggcgggcgggtgcgcggcggcggcggcgacggatttcggcgggctggcgagcgccatgcccgcggccgtggtccgcccggcgagcgcggacgacgtggccagcgccatccgcgcggcggcgctgacgccgcacctcaccgtggccgcccgcgggaacgggcactcggtggccggccaggccatggccgagggcgggctggtcctcgacatgcgctcgctcgcggcgccgtcccggcgcgcgcagatgcagctcgtcgtgcagtgccccgacggcggcggcggccgccgctgcttcgccgacgtccccggcggcgcgctctgggaggaggtgctccactgggccgtcgacaaccacgggctcgccccggcgtcctggacggactacctccgcctcaccgtgggcggcacgctctccaatggcggcgtcagcggccagtccttccgctacgggccccaggtgtccaacgtggccgagctcgaggtggtcaccggcgacggcgagcgccgcgtctgctcgccctcctcccacccggacctcttcttcgccgtgctcggcgggctcggccagttcggcgtcatcacgcgcgcccgcatcccgctccacagggcgccccaggcggtgcggtggacgcgcgtggtgtacgcgagcatcgcggactacacggcggacgcggagtggctggtgacgcggccccccgacgcggcgttcgactacgtggagggcttcgcgttcgtgaacagcgacgaccccgtgaacggctggccgtccgtgcccatccccggcggcgcccgcttcgacccgtccctcctccccgccggcgccggccccgtcctctactgcctggaggtggccctgtaccagtacgcgcaccggcccgacgacgtcgacgacgacgatgaggaggaccaggtgggaccccaacacgtcggtggcgctgccggagggcgaggtcttctacctggtggcgctgctgcggttctgccggagcggcgggccggcggtggacgagctggtggcgcagaacggcgccatcctccgcgcctgccgcgccaacggctacgactacaaggcctacttcccgagctaccgcggcgaggccgactgggcgcgccacttcggcgccgccaggtggaggcgcttcgtggaccgcaaggcccggtacgacccgctggcgatcctcgcgccgggccagaagatcttccctcgggtcccggcgtccgtcgccgtgtagagcaaggggggaggaccagccagctgccagccaagacaggaggaggaggaggaggggaggctgatggatcgccgctgctgttgccggacctgccctgccaggataccagccggagagctttcaggcgacaaaagccgcggcgaggggatcagcgaggatctgccgggccaccgccaccgccgccgccccgcgttttatactggagggtgggtgtgctccaagtggtgcctttctgacaacgcgatctaggctatgagtagtgtcgtccaagcgaccgtatccacaatccatcaaccttagcgatcttttgagttcaaaaaaagaaaaaaaaaaccttagcaatctttttttaagttccttccgataaataaaacaggagatcaaggaaagacagagacggccacgacggtatatttttttttggtgccgtgttcgattcataggatccaactgttttgcccacaaacgacaagggaccgcgctgccgccggtgagctccgcttggatggacgtcctgtcgctgcggcccggggtccggacggacgaaagaaatggacgcgagggggggtggcggccatgcactattgaagaggtcggatttgcaactgatgcatgctcctaagttgtatgtagctgtcctagatgattgtttattttcttatatatgtttgggtgagagcgacttgac

SEQ ID NO: 3778 - DNA, 1430 bp, Zea Mays
cagagcgccgtgacatcacgaaacatatagagctagctgctctgcctctgcttcaccaatcacctcgcggaggggaaggtttccccctttgacacagccgagctcccctccatcagcagccagctcctcgtcgcaaagcaagaagatgatgctcgcgtacatggaccgcgcgacggcggccgccgagccagaggacgccggccgcgagcccgccaccacggcgggcgggtgcgcggcggcggcggcgacggatttcggcgggctggcgagcgccatgcccgcggccgtggtccgcccggcgagcgcggacgacgtggccagcgccatccgcgcggcggcgctgacgccgcacctcaccgtggccgcccgcgggaacgggcactcggtggccggccaggccatggccgagggcgggctggtcctcgacatgcgctcgctcgcggcgccgtcccggcgcgcgcagatgcagctcgtcgtgcagtgccccgacggcggcggcggccgccgctgcttcgccgacgtccccggcggcgcgctctgggaggaggtgctccactgggccgtcgacaaccacgggctcgccccggcgtcctggacggactacctccgcctcaccgtgggcggcacgctctccaatggcggcgtcagcggccagtccttccgctacgggccccaggtgtccaacgtggccgagctcgaggtggtcaccggcgacggcgagcgccgcgtctgctcgccctcctcccacccggacctcttcttcgccgtgctcggcgggctcggccagttcggcgtcatcacgcgcgcccgcatcccgctccacagggcgccccaggcggtgcggtggacgcgcgtggtgtacgcgagcatcgcggactacacggcggacgcggagtggctggtgacgcggccccccgacgcggcgttcgactacgtggagggcttcgcgttcgtgaacagcgacgaccccgtgaacggctggccgtccgtgcccatccccggcggcgcccgcttcgacccgtccctcctccccgccggcgccggccccgtcctctactgcctggaggtggccctgtaccagtacgcgcaccggcccgacgacgtcgacgacgacgatgaggaggaccaggcggcggtgaccgtgagccggatgatggcgccgctcaagcacgtgcggggcctggagttcgcggcggacgtcgggtacgtggacttcctgtcccgcgtgaaccgggtggaggaggaggcccggcgcaacggcagctgggacgcgccgcacccgtggctcaacctcttcgtctccgcgcgcgacatcgccgacttcgaccgcgccgtcatcaagggcatgctcgccgacggcatcgacgggcccatgctcgtctaccctatgctcaagagcaatgtgcagttgccgtttgcggcccgccaag

SEQ ID NO: 3779 - DNA, 2894 bp, Zea Mays
gctagctgctctgcctctgcttcaccaatcacctcgcggaggggaaggtttccccctttgacacagccgagctcccctccatcagcagccagctcctcgtcgcaaagcaagaagatgatgctcgcgtacatggaccgcgcgacggcggccgccgagccagaggacgccggccgcgagcccgccaccacggcgggcgggtgcgcggcggcggcggcgacggatttcggcgggctggcgagcgccatgcccgcggccgtggtccgcccggcgagcgcggacgacgtggccagcgccatccgcgcggcggcgctgacgccgcacctcaccgtggccgcccgcgggaacgggcactcggtggccggccaggccatggccgagggcgggctggtcctcgacatgcgctcgctcgcggcgccgtcccggcgcgcgcagatgcagctcgtcgtgcagtgccccgacggcggcggcggccgccgctgcttcgccgacgtccccggcggcgcgctctgggaggaggtgctccactgggccgtcgacaaccacgggctcgccccggcgtcctggacggactacctccgcctcaccgtgggcggcacgctctccaatggcggcgtcagcggccagtccttccgctacgggccccaggtgtccaacgtggccgagctcgaggtggtcaccggcgacggcgagcgccgcgtctgctcgccctcctcccacccggacctcttcttcgccgtgctcggcgggctcggccagttcggcgtcatcacgcgcgcccgcatcccgctccacagggcgccccaggcggtgcggtggacgcgcgtggtgtacgcgagcatcgcggactacacggcggacgcggagtggctggtgacgcggccccccgacgcggcgttcgactacgtggagggcttcgcgttcgtgaacagcgacgaccccgtgaacggctggccgtccgtgcccatccccggcggcgcccgcttcgacccgtccctcctccccgccggcgccggccccgtcctctactgcctggaggtggccctgtaccagtacgcgcaccggcccgacgacgtcgacgacgacgatgaggaggaccagggcatgtctgactcgcctcgtcgtgtatctcccgctggattcggtgacgggggggctgcgtcctgccaaaccaaaccaccctagactagacagacccccaggggcaggggtcgcgccattggccgcacgcggggaccggcgccagtgagtgcgccgcgccgcacggccgcgccccgatctcgctcgctcgctcgctggtgatcgaatcggcgcgtacaatgcggcatggccccgagccccacacccgcagtggccgtgacgcgattgcgctgcctccggtccggcccatgacccagcggatcgcgtcgcgtcttttggcaacgcccgcgtcatcatatcgcgctctttgtcgtccccacggagcacagcgcagcgcagcgcagcgcagccaaccttttctccgccacgcacgcttcggcggcattcattatttggattttgttcctaccggtcgatccgcgtccgtccgtgcactgcaggcgctaccgtcatgctgaccaacccattgccattggcggcggtgaccgtgagccggatgatggcgccgctcaagcacgtgcggggcctggagttcgcggcggacgtcgggtacgtggacttcctgtcccgcgtgaaccgggtggaggaggaggcccggcgcaacggcagctgggacgcgccgcacccgtggctcaacctcttcgtctccgcgcgcgacatcgccgacttcgaccgcgccgtcatcaagggcatgctcgccgacggcatcgacgggcccatgctcgtctaccctatgctcaagagcaagtgggaccccaacacgtcggtggcgctgccggagggcgaggtcttctacctggtggcgctgctgcggttctgccggagcggcgggccggcggtggacgagctggtggcgcagaacggcgccatcctccgcgcctgccgcgccaacggctacgactacaaggcctacttcccgagctaccgcggcgaggccgactgggcgcgccacttcggcgccgccaggtggaggcgcttcgtggaccgcaaggcccggtacgacccgctggcgatcctcgcgccgggccagaagatcttccctcgggtcccggcgtccgtcgccgtgtagagcaaggggggaggaccagccagctgccagccaagacaggaggaggaggaggaggggaggctgatggatcgccgctgctgttgccggacctgccctgccaggataccagccggagagctttcaggcgacaaaagccgcggcgaggggatcagcgaggatctgccgggccaccgccaccgccgccgccccgcgttttatactggagggtgggtgtgctccaagtggtgcctttctgacaacgcgatctaggctatgagtagtgtcgtccaagcgaccgtatccacaatccatcaaccttagcgatcttttgagttcaaaaaaagaaaaaaaaaaccttagcaatctttttttaagttccttccgataaataaaacaggagatcaaggaaagacagagacggccacgacggtatatttttttttggtgccgtgttcgattcataggatccaactgttttgcccacaaacgacaagggaccgcgctgccgccggtgagctccgcttggatggacgtcctgtcgctgcggcccggggtccggacggacgaaagaaatggacgcgagggggggtggcggccatgcactattgaagaggtcggatttgcaactgatgcatgctcctaagttgtatgtagctgtcctagatgattgtttattttcttatatatgtttgggtgagagcgacttgac

SEQ ID NO: 3780 - DNA, 3141 bp, Zea Mays
aaaccaaacccctcgcgccatcacgcttccctccctcgtgcgtttgcaccgtcacgcttccctcccttgtgcgtttgcgccgtcacgacttctgcgatgccccgcccccgttcacgcgacaaggcggcatccccgccgtcgccggccggtgcccggcaacgcacccccgcgccgtccccgtccacctctctccacctcggtatcggccccgcgtcccccgacaacgacctcggcgtcggatccctcgacctcaagcaacccgccgctgcgcctccccgacacagcctgctcctcgcgggcgccgccctccgcctcggcctcggccccgcctcccccgatgacgaccgcggcgccagatcccccaacctcagcccacccgccgccgcgcctccccgacgcagcctgcgcctcgcgggtagtcgaaacactctctccgtgtcgggcaggggcgagaagggggcgaggagggcccatgctcgagtctccgcctcctcccttgctaccaccgtctcgcctagggccgggaactctagtagcgatgacagcgggtcgggggcggatacggctttggcgagcggcgagcgttatggcagtgcggtgccgttcacgacccggtctcgtatcgtgaagcggcgggcggaggcgagccctcaggcgggcggggaggtggggatcgggtcggctggtcgaggccaggtgcctgacgaaatgctgcaccgggacgtggggacgccgtcgaagcggtgcaggaccgtattggtcggaggagtggagacagtgtatatgtctgatacagagagtgattctgatgaggattgcatgatgctgggtccaagtgggaccgaactgaatcctattgctgtggatatgactgaaaatgggagtctggatgatcctgccaatgcaagcgacgtggagtctttgcagacgcataatctgctagggacgacaaatgttggggtggttgagcaatcagtatatccttcaggaagtgcttcaagttttgaagcaagaatctctgcagatatgtatgtctcgagccattacagttctagaaagggaagcaaagtgaacgggaagcttgttttggagaataacagttctcgtgctgatgctaatgtgggctctgcagttggtaccagtccccgcaaattcaatccatacagcaaaggaaagggaaagatggttgcagaagatactttatcatctctggtctccagtgaggacgagccagatttggatccagtgcattccaaagagactcaggttaatccaggatcagtttctgcttctatggtgtcatatcgcagacaaaaagcaaaagagagagctatcaggttggctcctgaatttgctttctttaaagcagataaagatgagcatagtgaagatgatgatgaagaactagagcctggtcctgactctcaggactggccaggctcattcgtaactgctgcaaggatgtatgaagaaagagaagctaagttgagagctcgagagttgaattcttcaaagctgaacaaatctgcaaatagggtcattgtttggtcgccttcaaaggatgagaagaatccagcacgagctcaagctgccccatcacttacaagcttatgcttaaatacacttgcgaaacattctgaatgtattggaacacttgaaggtattccagaggagctaaagaataggctgttcaagattctgtgtcattctaggaagatgaatacttatcttctcaatgaactattatgtgacagtcctacagaactgcatctcagtgagtgttcatggctgagtgaggatgactttgagaaaacttttgggaaatgcagcattgaaagcttgcaggatctacagcttgatatatctgggagatgcatgcctgattacatattgccaactaccttagctaaggttcctaactgtatgccattgttgagaaaaatatctctgaagggaaattatcggctttctgataatggtttagtcacaatcatctcggctgcaccttctttatgttccataaatctgtaagattaatcatctagaggttttgtcaatgtctggaatacaatctgtgtgtgacaagtttgtgaaggggctcattcctgtgcatggttcaaatctgaaggagttagcatttgctggttgcttgctgcgtgactcagcactgtggcatcttcgtggttgtaggctactaaggaaactaaggcttcaaagaaacgcattcagtgatgaagctgtgtctcaatatttggaggaatctggaggaggcctgaccgagttaatgctaaacaatgttaagaaggttggagaccttactgctcttgcaatttctcgcaagtgttctgttctattgaatgccctggatctttccttctgccgtgaactgacagacgattctttggggctgattgtcgacagctgcccatcattgaggattcttaagctatttggttgtacccaggtcacggatttgttcctcaagggtcactcgaacacatcggtcgaaatcgtcggaatagaagggagtatactcgcgcagatggataaccgttagtttgtgtggagaacagagaccgacactacattctccagttgtctaagcttaggattcgaggcatcaaggtccacatcgtggctgcagcaacaagtggggaatattttgtcgaccagtctaccttgcttataccagtcagccatgtagaaagctttcttgaaatgctttgtttttctcggataccttttttttgaaaggtttctttggttaactgaagcggtggaaaatctgctgctgcatcatgcaagttaacgatagaatatttttaattgtttagatggtaaaggttagggcttgtttggttcctttagtgtgtgtttggtttagctgtgagctttgaaaaagctgctgtgagctgtctactgtgtgttgagctccaaaatgagcggcggatggttcgcgcgtgcgcagagcagattagggttccgagttttgtgctacggttgttagctagattcgcggaattagctcaggagattagtttgtaaagggtttagcccccctcctctataaatagagatgtatacgatcgatttgtaatcatcaatcgaatcaataacacttttatctcgcatttatttcct

SEQ ID NO: 3781 - DNA, 3106 bp, Zea Mays
aaaccaaacccctcgcgccatcacgcttccctccctcgtgcgtttgcaccgtcacgcttccctcccttgtgcgtttgcgccgtcacgacttctgcgatgccccgcccccgttcacgcgacaaggcggcatccccgccgtcgccggccggtgcccggcaacgcacccccgcgccgtccccgtccacctctctccacctcggtatcggccccgcgtcccccgacaacgacctcggcgtcggatccctcgacctcaagcaacccgccgctgcgcctccccgacacagcctgctcctcgcgggcgccgccctccgcctcggcctcggccccgcctcccccgatgacgaccgcggcgccagatcccccaacctcagcccacccgccgccgcgcctccccgacgcagcctgcgcctcgcgggtagtcgaaacactctctccgtgtcgggcaggggcgagaagggggcgaggagggcccatgctcgagtctccgcctcctcccttgctaccaccgtctcgcctagggccgggaactctagtagcgatgacagcgggtcgggggcggatacggctttggcgagcggcgagcgttatggcagtgcggtgccgttcacgacccggtctcgtatcgtgaagcggcgggcggaggcgagccctcaggcgggcggggaggtggggatcgggtcggctggtcgaggccaggtgcctgacgaaatgctgcaccgggacgtggggacgccgtcgaagcggtgcaggaccgtattggtcggaggagtggagacagtgtatatgtctgatacagagagtgattctgatgaggattgcatgatgctgggtccaagtgggaccgaactgaatcctattgctgtggatatgactgaaaatgggagtctggatgatcctgccaatgcaagcgacgtggagtctttgcagacgcataatctgctagggacgacaaatgttggggtggttgagcaatcagtatatccttcaggaagtgcttcaagttttgaagcaagaatctctgcagatatgtatgtctcgagccattacagttctagaaagggaagcaaagtgaacgggaagcttgttttggagaataacagttctcgtgctgatgctaatgtgggctctgcagttggtaccagtccccgcaaattcaatccatacagcaaaggaaagggaaagatggttgcagaagatactttatcatctctggtctccagtgaggacgagccagatttggatccagtgcattccaaagagactcaggttaatccaggatcagtttctgcttctatggtgtcatatcgcagacaaaaagcaaaagagagagctatcaggttggctcctgaatttgctttctttaaagcagataaagatgagcatagtgaagatgatgatgaagaactagagcctggtcctgactctcaggactggccaggctcattcgtaactgctgcaaggatgtatgaagaaagagaagctaagttgagagctcgagagttgaattcttcaaagctgaacaaatctgcaaatagggtcattgtttggtcgccttcaaaggatgagaagaatccagcacgagctcaagctgccccatcacttacaagcttatgcttaaatacacttgcgaaacattctgaatgtattggaacacttgaaggtattccagaggagctaaagaataggctgttcaagattctgtgtcattctaggaagatgaatacttatcttctcaatgaactattatgtgacagtcctacagaactgcatctcagtgagtgttcatggctgagtgaggatgactttgagaaaacttttgggaaatgcagcattgaaagcttgcaggatctacagcttgatatatctgggagatgcatgcctgattacatattgccaactaccttagctaaggttcctaactgtatgccattgttgagaaaaatatctctgaagggaaattatcggctttctgataatggtttagtcacaatcatctcggctgcaccttctttatgttccataaatctgtaagattaatcatctagaggttttgtcaatgtctggaatacaatctgtgtgtgacaagtttgtgaaggggctcattcctgtgcatggttcaaatctgaaggagttagcatttgctggttgcttggaacttacctcagcttccatcaagactgttggggaatattgtcaagaattaacttcattggatctccgcaacttgaataggctgcgtgactcagcactgtggcatcttcgtggttgtaggctactaaggaaactaaggcttcaaagaaacgcattcagtgatgaagctgtgtctcaatatttggaggaatctggaggaggcctgaccgagttaatgctaaacaatgttaagaagctgcccatcattgaggattcttaagctatttggttgtacccaggtcacggatttgttcctcaagggtcactcgaacacatcggtcgaaatcgtcggaatagaagggagtatactcgcgcagatggataaccgttagtttgtgtggagaacagagaccgacactacattctccagttgtctaagcttaggattcgaggcatcaaggtccacatcgtggctgcagcaacaagtggggaatattttgtcgaccagtctaccttgcttataccagtcagccatgtagaaagctttcttgaaatgctttgtttttctcggataccttttttttgaaaggtttctttggttaactgaagcggtggaaaatctgctgctgcatcatgcaagttaacgatagaatatttttaattgtttagatggtaaaggttagggcttgtttggttcctttagtgtgtgtttggtttagctgtgagctttgaaaaagctgctgtgagctgtctactgtgtgttgagctccaaaatgagcggcggatggttcgcgcgtgcgcagagcagattagggttccgagttttgtgctacggttgttagctagattcgcggaattagctcaggagattagtttgtaaagggtttagcccccctcctctataaatagagatgtatacgatcgatttgtaatcatcaatcgaatcaataacacttttatctcgcatttatttcct

SEQ ID NO: 3782 - DNA, 3336 bp, Zea Mays
aaaccaaacccctcgcgccatcacgcttccctccctcgtgcgtttgcaccgtcacgcttccctcccttgtgcgtttgcgccgtcacgacttctgcgatgccccgcccccgttcacgcgacaaggcggcatccccgccgtcgccggccggtgcccggcaacgcacccccgcgccgtccccgtccacctctctccacctcggtatcggccccgcgtcccccgacaacgacctcggcgtcggatccctcgacctcaagcaacccgccgctgcgcctccccgacacagcctgctcctcgcgggcgccgccctccgcctcggcctcggccccgcctcccccgatgacgaccgcggcgccagatcccccaacctcagcccacccgccgccgcgcctccccgacgcagcctgcgcctcgcgggtagtcgaaacactctctccgtgtcgggcaggggcgagaagggggcgaggagggcccatgctcgagtctccgcctcctcccttgctaccaccgtctcgcctagggccgggaactctagtagcgatgacagcgggtcgggggcggatacggctttggcgagcggcgagcgttatggcagtgcggtgccgttcacgacccggtctcgtatcgtgaagcggcgggcggaggcgagccctcaggcgggcggggaggtggggatcgggtcggctggtcgaggccaggtgcctgacgaaatgctgcaccgggacgtggggacgccgtcgaagcggtgcaggaccgtattggtcggaggagtggagacagtgtatatgtctgatacagagagtgattctgatgaggattgcatgatgctgggtccaagtgggaccgaactgaatcctattgctgtggatatgactgaaaatgggagtctggatgatcctgccaatgcaagcgacgtggagtctttgcagacgcataatctgctagggacgacaaatgttggggtggttgagcaatcagtatatccttcaggaagtgcttcaagttttgaagcaagaatctctgcagatatgtatgtctcgagccattacagttctagaaagggaagcaaagtgaacgggaagcttgttttggagaataacagttctcgtgctgatgctaatgtgggctctgcagttggtaccagtccccgcaaattcaatccatacagcaaaggaaagggaaagatggttgcagaagatactttatcatctctggtctccagtgaggacgagccagatttggatccagtgcattccaaagagactcaggttaatccaggatcagtttctgcttctatggtgtcatatcgcagacaaaaagcaaaagagagagctatcaggttggctcctgaatttgctttctttaaagcagataaagatgagcatagtgaagatgatgatgaagaactagagcctggtcctgactctcaggactggccaggctcattcgtaactgctgcaaggatgtatgaagaaagagaagctaagttgagagctcgagagttgaattcttcaaagctgaacaaatctgcaaatagggtcattgtttggtcgccttcaaaggatgagaagaatccagcacgagctcaagctgccccatcacttacaagcttatgcttaaatacacttgcgaaacattctgaatgtattggaacacttgaaggtattccagaggagctaaagaataggctgttcaagattctgtgtcattctaggaagatgaatacttatcttctcaatgaactattatgtgacagtcctacagaactgcatctcagtgagtgttcatggctgagtgaggatgactttgagaaaacttttgggaaatgcagcattgaaagcttgcaggatctacagcttgatatatctgggagatgcatgcctgattacatattgccaactaccttagctaaggttcctaactgtatgccattgttgagaaaaatatctctgaagggaaattatcggctttctgataatggtttagtcacaatcatctcggctgcaccttctttatgttccataaatctgtgtgagtgttctcttctcacttcatctggaatcaatattcttgcaaacaagttacattcagttcttagagaactgtatatagatgattgcacaaacgtggatgctatggcaattcttcctgctctacagaagattaatcatctagaggttttgtcaatgtctggaatacaatctgtgtgtgacaagtttgtgaaggggctcattcctgtgcatggttcaaatctgaaggagttagcatttgctggttgcttcttccatcaagactgttggggaatattgtcaagaattaacttcattggatctccgcaacttgaataggctgcgtgactcagcactgtggcatcttcgtggttgtaggctactaaggaaactaaggcttcaaagaaacgcattcagtgatgaagctgtgtctcaatatttggaggaatctggaggaggcctgaccgagttaatgctaaacaatgttaagaaggttggagaccttactgctcttgcaatttctcgcaagtgttctgttctattgaatgccctggatctttccttctgccgtgaactgacagacgattctttggggctgattgtcgacagctgcccatcattgaggattcttaagctatttggttgtacccaggtcacggatttgttcctcaagggtcactcgaacacatcggtcgaaatcgtcggaatagaagggagtatactcgcgcagatggataaccgttagtttgtgtggagaacagagaccgacactacattctccagttgtctaagcttaggattcgaggcatcaaggtccacatcgtggctgcagcaacaagtggggaatattttgtcgaccagtctaccttgcttataccagtcagccatgtagaaagctttcttgaaatgctttgtttttctcggataccttttttttgaaaggtttctttggttaactgaagcggtggaaaatctgctgctgcatcatgcaagttaacgatagaatatttttaattgtttagatggtaaaggttagggcttgtttggttcctttagtgtgtgtttggtttagctgtgagctttgaaaaagctgctgtgagctgtctactgtgtgttgagctccaaaatgagcggcggatggttcgcgcgtgcgcagagcagattagggttccgagttttgtgctacggttgttagctagattcgcggaattagctcaggagattagtttgtaaagggtttagcccccctcctctataaatagagatgtatacgatcgatttgtaatcatcaatcgaatcaataacacttttatctcgcatttatttcct

SEQ ID NO: 3783 - DNA, 3072 bp, Zea Mays
aaaccaaacccctcgcgccatcacgcttccctccctcgtgcgtttgcaccgtcacgcttccctcccttgtgcgtttgcgccgtcacgacttctgcgatgccccgcccccgttcacgcgacaaggcggcatccccgccgtcgccggccggtgcccggcaacgcacccccgcgccgtccccgtccacctctctccacctcggtatcggccccgcgtcccccgacaacgacctcggcgtcggatccctcgacctcaagcaacccgccgctgcgcctccccgacacagcctgctcctcgcgggcgccgccctccgcctcggcctcggccccgcctcccccgatgacgaccgcggcgccagatcccccaacctcagcccacccgccgccgcgcctccccgacgcagcctgcgcctcgcgggtagtcgaaacactctctccgtgtcgggcaggggcgagaagggggcgaggagggcccatgctcgagtctccgcctcctcccttgctaccaccgtctcgcctagggccgggaactctagtagcgatgacagcgggtcgggggcggatacggctttggcgagcggcgagcgttatggcagtgcggtgccgttcacgacccggtctcgtatcgtgaagcggcgggcggaggcgagccctcaggcgggcggggaggtggggatcgggtcggctggtcgaggccaggtgcctgacgaaatgctgcaccgggacgtggggacgccgtcgaagcggtgcaggaccgtattggtcggaggagtggagacagtgtatatgtctgatacagagagtgattctgatgaggattgcatgatgctgggtccaagtgggaccgaactgaatcctattgctgtggatatgactgaaaatgggagtctggatgatcctgccaatgcaagcgacgtggagtctttgcagacgcataatctgctagggacgacaaatgttggggtggttgagcaatcagtatatccttcaggaagtgcttcaagttttgaagcaagaatctctgcagatatgtatgtctcgagccattacagttctagaaagggaagcaaagtgaacgggaagcttgttttggagaataacagttctcgtgctgatgctaatgtgggctctgcagttggtaccagtccccgcaaattcaatccatacagcaaaggaaagggaaagatggttgcagaagatactttatcatctctggtctccagtgaggacgagccagatttggatccagtgcattccaaagagactcaggttaatccaggatcagtttctgcttctatggtgtcatatcgcagacaaaaagcaaaagagagagctatcaggttggctcctgaatttgctttctttaaagcagataaagatgagcatagtgaagatgatgatgaagaactagagcctggtcctgactctcaggactggccaggctcattcgtaactgctgcaaggatgtatgaagaaagagaagctaagttgagagctcgagagttgaattcttcaaagctgaacaaatctgcaaatagggtcattgtttggtcgccttcaaaggatgagaagaatccagcacgagctcaagctgccccatcacttacaagcttatgcttaaatacacttgcgaaacattctgaatgtattggaacacttgaaggtattccagaggagctaaagaataggctgttcaagattctgtgtcattctaggaagatgaatacttatcttctcaatgaactattatgtgacagtcctacagaactgcatctcagtgagtgttcatggctgagtgaggatgactttgagaaaacttttgggaaatgcagcattgaaagcttgcaggatctacagcttgatatatctgggagatgcatgcctgattacatattgccaactaccttagctaaggttcctaactgtatgccattgttgagaaaaatatctctgaagggaaattatcggctttctgataatggtttagtcacaatcatctcggctgcaccttctttatgttccataaatctgtatgattgcacaaacgtggatgctatggcaattcttcctgctctacagaagattaatcatctagaggttttgtcaatgtctggaatacaatctgtgtgtgacaagtttgtgaaggggctcattcctgtgcatggttcaaatctgaaggagttagcatttgctggttgcttgctgcgtgactcagcactgtggcatcttcgtggttgtaggctactaaggaaactaaggcttcaaagaaacgcattcagtgatgaagctgtgtctcaatatttggaggaatctggaggaggcctgaccgagttaatgctaaacaatgttaagaagctgcccatcattgaggattcttaagctatttggttgtacccaggtcacggatttgttcctcaagggtcactcgaacacatcggtcgaaatcgtcggaatagaagggagtatactcgcgcagatggataaccgttagtttgtgtggagaacagagaccgacactacattctccagttgtctaagcttaggattcgaggcatcaaggtccacatcgtggctgcagcaacaagtggggaatattttgtcgaccagtctaccttgcttataccagtcagccatgtagaaagctttcttgaaatgctttgtttttctcggataccttttttttgaaaggtttctttggttaactgaagcggtggaaaatctgctgctgcatcatgcaagttaacgatagaatatttttaattgtttagatggtaaaggttagggcttgtttggttcctttagtgtgtgtttggtttagctgtgagctttgaaaaagctgctgtgagctgtctactgtgtgttgagctccaaaatgagcggcggatggttcgcgcgtgcgcagagcagattagggttccgagttttgtgctacggttgttagctagattcgcggaattagctcaggagattagtttgtaaagggtttagcccccctcctctataaatagagatgtatacgatcgatttgtaatcatcaatcgaatcaataacacttttatctcgcatttatttcct

SEQ ID NO: 3784 - DNA, 3128 bp, Zea Mays
aaaccaaacccctcgcgccatcacgcttccctccctcgtgcgtttgcaccgtcacgcttccctcccttgtgcgtttgcgccgtcacgacttctgcgatgccccgcccccgttcacgcgacaaggcggcatccccgccgtcgccggccggtgcccggcaacgcacccccgcgccgtccccgtccacctctctccacctcggtatcggccccgcgtcccccgacaacgacctcggcgtcggatccctcgacctcaagcaacccgccgctgcgcctccccgacacagcctgctcctcgcgggcgccgccctccgcctcggcctcggccccgcctcccccgatgacgaccgcggcgccagatcccccaacctcagcccacccgccgccgcgcctccccgacgcagcctgcgcctcgcgggtagtcgaaacactctctccgtgtcgggcaggggcgagaagggggcgaggagggcccatgctcgagtctccgcctcctcccttgctaccaccgtctcgcctagggccgggaactctagtagcgatgacagcgggtcgggggcggatacggctttggcgagcggcgagcgttatggcagtgcggtgccgttcacgacccggtctcgtatcgtgaagcggcgggcggaggcgagccctcaggcgggcggggaggtggggatcgggtcggctggtcgaggccaggtgcctgacgaaatgctgcaccgggacgtggggacgccgtcgaagcggtgcaggaccgtattggtcggaggagtggagacagtgtatatgtctgatacagagagtgattctgatgaggattgcatgatgctgggtccaagtgggaccgaactgaatcctattgctgtggatatgactgaaaatgggagtctggatgatcctgccaatgcaagcgacgtggagtctttgcagacgcataatctgctagggacgacaaatgttggggtggttgagcaatcagtatatccttcaggaagtgcttcaagttttgaagcaagaatctctgcagatatgtatgtctcgagccattacagttctagaaagggaagcaaagtgaacgggaagcttgttttggagaataacagttctcgtgctgatgctaatgtgggctctgcagttggtaccagtccccgcaaattcaatccatacagcaaaggaaagggaaagatggttgcagaagatactttatcatctctggtctccagtgaggacgagccagatttggatccagtgcattccaaagagactcaggttaatccaggatcagtttctgcttctatggtgtcatatcgcagacaaaaagcaaaagagagagctatcaggttggctcctgaatttgctttctttaaagcagataaagatgagcatagtgaagatgatgatgaagaactagagcctggtcctgactctcaggactggccaggctcattcgtaactgctgcaaggatgtatgaagaaagagaagctaagttgagagctcgagagttgaattcttcaaagctgaacaaatctgcaaatagggtcattgtttggtcgccttcaaaggatgagaagaatccagcacgagctcaagctgccccatcacttacaagcttatgcttaaatacacttgcgaaacattctgaatgtattggaacacttgaagtcctacagaactgcatctcagtgagtgttcatggctgagtgaggatgactttgagaaaacttttgggaaatgcagcattgaaagcttgcaggatctacagcttgatatatctgggagatgcatgcctgattacatattgccaactaccttagctaaggttcctaactgtatgccattgttgagaaaaatatctctgaagggaaattatcggctttctgataatggtttagtcacaatcatctcggctgcaccttctttatgttccataaatctgtaagattaatcatctagaggttttgtcaatgtctggaatacaatctgtgtgtgacaagtttgtgaaggggctcattcctgtgcatggttcaaatctgaaggagttagcatttgctggttgcttggaacttacctcagcttccatcaagactgttggggaatattgtcaagaattaacttcattggatctccgcaacttgaataggctgcgtgactcagcactgtggcatcttcgtggttgtaggctactaaggaaactaaggcttcaaagaaacgcattcagtgatgaagctgtgtctcaatatttggaggaatctggaggaggcctgaccgagttaatgctaaacaatgttaagaaggttggagaccttactgctcttgcaatttctcgcaagtgttctgttctattgaatgccctggatctttccttctgccgtgaactgacagacgattctttggggctgattgtcgacagctgcccatcattgaggattcttaagctatttggttgtacccaggtcacggatttgttcctcaagggtcactcgaacacatcggtcgaaatcgtcggaatagaagggagtatactcgcgcagatggataaccgttagtttgtgtggagaacagagaccgacactacattctccagttgtctaagcttaggattcgaggcatcaaggtccacatcgtggctgcagcaacaagtggggaatattttgtcgaccagtctaccttgcttataccagtcagccatgtagaaagctttcttgaaatgctttgtttttctcggataccttttttttgaaaggtttctttggttaactgaagcggtggaaaatctgctgctgcatcatgcaagttaacgatagaatatttttaattgtttagatggtaaaggttagggcttgtttggttcctttagtgtgtgtttggtttagctgtgagctttgaaaaagctgctgtgagctgtctactgtgtgttgagctccaaaatgagcggcggatggttcgcgcgtgcgcagagcagattagggttccgagttttgtgctacggttgttagctagattcgcggaattagctcaggagattagtttgtaaagggtttagcccccctcctctataaatagagatgtatacgatcgatttgtaatcatcaatcgaatcaataacacttttatctcgcatttatttcct

SEQ ID NO: 3785 - DNA, 2874 bp, Zea Mays
aaaaatccaacttaggacttgttcggttctacccaatccatatggattgagggggattgagggggtttcaatccccagtaagtcaaaatcccctccaatccatatcaatcccctccaatccatatggattgaaaataaccgaacaagcccttaggggattctaaaatttaagtttatagtattattaatacggtaaaaacattctatccacactatgctgatgtagcatagtggagggctagctttcccctcctcccctggcctaatataaatacaaggtccatccttattagtcccttctctttctcatcagtccgctgttgtccgatccctcgtcagtcaccaaacaacagtgagtgccccaatactgcgcgagcctcttaatgttgaacgattcgcgcgtcgtgttcccagacgggataggggccttaatcgtcgagagcgatgaaaggtttctaagatcggctgccttgatgctctctctcctaaactaccgagtggccacgtgcgagaggccaacgtcggtagtcaagctcatcaccggaagactcaaagacgccgacgtcgtcttcatcgacgctctgagagccgcaacctgcggcttcgacttccgcagaatcgtggagtcccatctgtgcatcccagtcgtctacttcctctctcgggattatggggtcaccggcgacgtgtctgaggctctgcagcgcactgtttgggctgccacctacgtcgtcaggaagcccctcgacgctggagaactcagcaggctgtggaaggtcatcaagtggtccaagtttttgctgcggcgcgcatggccggaatggcctcgcggcagccgagtgcgtcccgccgtcgtcggagcacttctgcccggctcctctaccgttgatggccgatgggaagacgacgacgacgacggccgcgaacatttcagggcggtgagggcaggaagaggccggaggaggaagctgggtgatcgccaataccacggcggacgatcctccggccgcggtggcggcggcggcgttgcagttggaattggaataggacgacgccagccaactgagagactggagcaaatgaacttgacaggatggcagcaggagaacgatgacgacgacggcgtgtttcctatccaccaacagcctgcacaacagaaccgaccaggagtccagaccatggacgatgtccagaaccagcagcatggtcggtccctgttcatgcagcccggcccccagacgctcaatgtgccgcacaacaaccccatgatctcccccgacgctggctggccgagcagcagcaatgtcgcagccttcgctggcgccagcaacaccaccggcccaacactgctgcagggagtgtaccaagcaccggcggcacgaggagcaagagcagcatcgccggcaccgcatgcggtgtacgcaccaccagcgccaggactgcgccctccggtgtatcagcagcagcagcaacccatggcgcccctctacgacttcggcgacatggtcgcaccgcccgcggcagtaccactaccaataccaaccatggccgccaccagcggacaccagccgcagttcaccctcaaccatcaccaccagcagcagcaggaggaggaaatgtttgcgccgcggaggcaaggcggctggatggggagtcgtcgtcgtcgcgagaccggacccatcatgctttccttccagcagccacaggccgctgatcctttcacccctatggctggcagtggccctttcacgcctatggcggctgggcaggctggcagtggcacggcctttggagcttcatcacctacaggtgctacagatgcaggagcgtacggggccgctgccgtggcacaggcacagcttcagtccccgaacgctggtgctcaaccagctgacagcagctttgatgatgtgctccgagccatgatggagatggactactatgccaacaactgcagcgccgaagcactcatggccccggctacagacgagttagcaggtatgcaagcagcagcagcacttggcagcagcggcaactacaacgctggaccattcatggtgacggatgcgaatggcggcaatggtacaccattcatggcgctggcgctagcgccacaggatcccgccgcgccaactgggaaccaaaaccaagtccaggtggagttgggagcaccggacatctacggcggatcactgctggtggggtctcatcaaggcggcgggactagtgcaatgttcaatggggatggtgacatggcaccaatgtttccttctaacgagtacggtgcgactgcgaacgccatgttctctctggatgcccttctggatttcgacgacggcgtcccaacgtaccctgaaggccaccaggtcgctgcagctgatagcaccaccgccagcaacgctacaggaatcatgtcaaatggcggggaaagtggtggctcgggaccgagctggaacatgggagctgcagctgctgatgaaggtctggatatgttggaagagttcttaatggaggacaatgagtctggttttcttctcccgcaagacatgaacaatggcctccagtagctggtggtgcagccatgacgagaaacctgagagattttaagagttcgagagaggaagagaactataaattagctagattcaataatgtacaggcaaccctgtctaaagttctgtttgctgtagaactagatacttggtgcacccgtacttagaagtgtttggtaagatacagaaaaggggagtgcccctgtgatcattttccgtgtgtttggttgagtgcatgcgccgtgcaaagcactacaaatcagataagtctatctgtttggttgcttgaatgtgggtccgagacaggcttgcaaaacaaaac

SEQ ID NO: 3786 - DNA, 2786 bp, Zea Mays
catatcaatcccctccaatccatatggattgaaaataaccgaacaagcccttaggggattctaaaatttaagtttatagtattattaatacggtaaaaacattctatccacactatgctgatgtagcatagtggagggctagctttcccctcctcccctggcctaatataaatacaaggtccatccttattagtcccttctctttctcatcagtccgctgttgtccgatccctcgtcagtcaccaaacaacagtgagtgccccaatactgcgcgagcctcttaatgttgaacgattcgcgcgtcgtgttcccagacgggataggggccttaatcgtcgagagcgatgaaaggtttctaagatcggctgccttgatgctctctctcctaaactaccgagtggccacgtgcgagaggccaacgtcggtagtcaagctcatcaccggaagactcaaagacgccgacgtcgtcttcatcgacgctctgagagccgcaacctgcggcttcgacttccgcagaatcgtggagtcccatctgtgcatcccagtcgtctacttcctctctcgggattatggggtcaccggcgacgtgtctgaggctctgcagcgcactgtttgggctgccacctacgtcgtcaggaagcccctcgacgctggagaactcagcaggctgtggaaggtcatcaagtggtccaagtttttgctgcggcgcgcatggccggaatggcctcgcggcagccgagtgcgtcccgccgtcgtcggagcacttctgcccggctcctctaccgttgatggccgatgggaagacgacgacgacgacggccgcgaacatttcagggcggtgagggcaggaagaggccggaggaggaagctgggtgatcgccaataccacggcggacgatcctccggccgcggtggcggcggcggcgttgcaggtccatttggaattggaattggaataggacgacgccagccaactgagagactggagcaaatgaacttgacaggatggcagcaggagaacgatgacgacgacggcgtgtttcctatccaccaacagcctgcacaacagaaccgaccaggagtccagaccatggacgatgtccagaaccagcagcatggtcggtccctgttcatgcagcccggcccccagacgctcaatgtgccgcacaacaaccccatgatctcccccgacgctggctggccgagcagcagcaatgtcgcagccttcgctggcgccagcaacaccaccggcccaacactgctgcagggagtgtaccaagcaccggcggcacgaggagcaagagcagcatcgccggcaccgcatgcggtgtacgcaccaccagcgccaggactgcgccctccggtgtatcagcagcagcagcaacccatggcgcccctctacgacttcggcgacatggtcgcaccgcccgcggcagtaccactaccaataccaaccatggccgccaccagcggacaccagccgcagttcaccctcaaccatcaccaccagcagcagcaggaggaggaaatgtttgcgccgcggaggcaaggcggctggatggggagtcgtcgtcgtcgcgagaccggacccatcatgctttccttccagcagccacaggccgctgatcctttcacccctatggctggcagtggccctttcacgcctatggcggctgggcaggctggcagtggcacggcctttggagcttcatcacctacaggtgctacagatgcaggagcgtacggggccgctgccgtggcacaggcacagcttcagtccccgaacgctggtgctcaaccagctgacagcagctttgatgatgtgctccgagccatgatggagatggactactatgccaacaactgcagcgccgaagcactcatggccccggctacagacgagttagcaggtatgcaagcagcagcagcacttggcagcagcggcaactacaacgctggaccattcatggtgacggatgcgaatggcggcaatggtacaccattcatggcgctggcgctagcgccacaggatcccgccgcgccaactgggaaccaaaaccaagtccaggtggagttgggagcaccggacatctacggcggatcactgctggtggggtctcatcaaggcggcgggactagtgcaatgttcaatggggatggtgacatggcaccaatgtttccttctaacgagtacggtgcgactgcgaacgccatgttctctctggatgcccttctggatttcgacgacggcgtcccaacgtaccctgaaggccaccaggtcgctgcagctgatagcaccaccgccagcaacgctacaggaatcatgtcaaatggcggggaaagtggtggctcgggaccgagctggaacatgggagctgcagctgctgatgaaggtctggatatgttggaagagttcttaatggaggacaatgagtctggttttcttctcccgcaagacatgaacaatggcctccagtagctggtggtgcagccatgacgagaaacctgagagattttaagagttcgagagaggaagagaactataaattagctagattcaataatgtacaggcaaccctgtctaaagttctgtttgctgtagaactagatacttggtgcacccgtacttagaagtgtttggtaagatacagaaaaggggagtgcccctgtgatcattttccgtgtgtttggttgagtgcatgcgccgtgcaaagcactacaaatcagataagtctatctgtttggttgcttgaatgtgggtccgagacaggcttgcaaaacaaaac

SEQ ID NO: 3787 - DNA, 2389 bp, Zea Mays
atggagaagcttggacggccaacgtcggtagtcaagctcatcaccggaagactcaaagacgccgacgtcgtcttcatcgacgctctgagagccgcaacctgcggcttcgacttccgcagaatcgtggagtcccatctgtgcatcccagtcgtctacttcctctctcgggattatggggtcaccggcgacgtgtctgaggctctgcagcgcactgtttgggctgccacctacgtcgtcaggaagcccctcgacgctggagaactcagcaggctgtggaaggtcatcaagtggtccaagtttttgctgcggcgcgcatggccggaatggcctcgcggcagccgagtgcgtcccgccgtcgtcggagcacttctgcccggctcctctaccgttgatggccgatgggaagacgacgacgacgacggccgcgaacatttcagggcggtgagggcaggaagaggccggaggaggaagctgggtgatcgccaataccacggcggacgatcctccggccgcggtggcggcggcggcgttgcaggtccatttggaattggaattggaataggacgacgccagccaactgagagactggagcaaatgaacttgacaggatggcagcaggagaacgatgacgacgacggcgtgtttcctatccaccaacagcctgcacaacagaaccgaccaggagtccagaccatggacgatgtccagaaccagcagcatggtcggtccctgttcatgcagcccggcccccagacgctcaatgtgccgcacaacaaccccatgatctcccccgacgctggctggccgagcagcagcaatgtcgcagccttcgctggcgccagcaacaccaccggcccaacactgctgcagggagtgtaccaagcaccggcggcacgaggagcaagagcagcatcgccggcaccgcatgcggtgtacgcaccaccagcgccaggactgcgccctccggtgtatcagcagcagcagcaacccatggcgcccctctacgacttcggcgacatggtcgcaccgcccgcggcagtaccactaccaataccaaccatggccgccaccagcggacaccagccgcagttcaccctcaaccatcaccaccagcagcagcaggaggaggaaatgtttgcgccgcggaggcaaggcggctggatggggagtcgtcgtcgtcgcgagaccggacccatcatgctttccttccagcagccacaggccgctgatcctttcacccctatggctggcagtggccctttcacgcctatggcggctgggcaggctggcagtggcacggcctttggagcttcatcacctacaggtgctacagatgcaggagcgtacggggccgctgccgtggcacaggcacagcttcagtccccgaacgctggtgctcaaccagctgacagcagctttgatgatgtgctccgagccatgatggagatggactactatgccaacaactgcagcgccgaagcactcatggccccggctacagacgagttagcaggtatgcaagcagcagcagcacttggcagcagcggcaactacaacgctggaccattcatggtgacggatgcgaatggcggcaatggtacaccattcatggcgctggcgctagcgccacaggatcccgccgcgccaactgggaaccaaaaccaagtccaggtggagttgggagcaccggacatctacggcggatcactgctggtggggtctcatcaaggcggcgggactagtgcaatgttcaatggggatggtgacatggcaccaatgtttccttctaacgagtacggtgcgactgcgaacgccatgttctctctggatgcccttctggatttcgacgacggcgtcccaacgtaccctgaaggccaccaggtcgctgcagctgatagcaccaccgccagcaacgctacaggaatcatgtcaaatggcggggaaagtggtggctcgggaccgagctggaacatgggagctgcagctgctgatgaaggtctggatatgttggaagagttcttaatggaggacaatgagtctggttttcttctcccgcaagacatgaacaatggcctccagtagctggtggtgcagccatgacgagaaacctgagagattttaagagttcgagagaggaagagaactataaattagctagattcaataatgtacaggcaaccctgtctaaagttctgtttgctgtagaactagatacttggtgcacccgtacttagaagtgtttggtaagatacagaaaaggggagtgcccctgtgatcattttccgtgtgtttggttgagtgcatgcgccgtgcaaagcactacaaatcagataagtctatctgtttggttgcttgaatgtgggtccgagacaggcttgcaaaacaaaac

SEQ ID NO: 3788 - DNA, 690 bp, Zea Mays
ctcctgcagctgctgcctctctgctgaggacttgatggccattctggagtcaggaatatggagaatacaggtgtgccccagtgatagcagctgttggcttcctttgggccaattgcgtaaccttggcatttgggaatagagataagcgaagcagcagcatgaatgtatgctccatcaggtggctcttttctgcatgtgcatgggaggaatcatgtattttctggagtacgagccagacacaatggctccattcctcagagggctcatcaggcgcttcctggcaagcaagatcagcaatccaagccccctgcctcccaatcggaatgcctcctactcgtaccttcagacgctgaatgctctagagcaatcaagaacccaaccaggggtggataacggactgacgacatcggagaaatacaacctcgaatcaattcctagactttagagacctcatctgtggtagtagtaaattgggtcttgtagcttgggaagatcacgaaaactcgaacacccattacatgtgccatcctgtgatgggtttatactctgttatacgtgtttgtcttgagtgcaaaataaatggataagcagaggtggtttgtgcgggagtatggactgatacgaagcaatttgctcgtacttgttgaatatgggcctcaccctcccccaggaaagaccggtgcaaaatac

SEQ ID NO: 3789 - DNA, 2508 bp, Zea Mays
cgcgtgctctgctgtctcgctcagcagctctctccaactccttcgatcccttccctcctctcgccgccggccgattcacttcttccatcattcgattaagcaagcaaaggcaaggcgcatttccctcgggtgactcgatcggccgcacgatgtctgcgacgcagccgtggaggtcgcttttctgctgcgcggcggcgggatacgacgacgccgacgagccaccgccgtcgtcgcgggggcagaggaagggccggagcaggagggaccgggaccgggagcggctccagctgctgctgctgccgtcgtcctcgtcggcggcgtcgcgggtgtcgctgtcgagcctggggggctcgtcggggacgctgacgcccgaggacctgtccctgacgctgtcgggctccagcctgcacgccttcacctgcgccgagctcagggccgccaccgcgggcttctcccgcgccaactacctcggctccggcggcttcggccccgtctaccggggccgcgtcgccgcgggcctccgcccgggcctcgacgcgcagccggtggccgtcaagtacctcgacctcgactgcggcacgcagggccaccgcgagtggctggccgaggtcttcttccttgcccagctccgacacgacaacctcgtcacgctcatcggctactgctacgaggacgaccaccgcatgcttgtgtacgagtacatgagcaaccagagcctcgagaaacacctcttcagaagtctcgacggccccatgccatggatgacgaggatgaagatcgccgtcggcgcggccaagggcctcgccttcctccacggcgcggacacgccggtgatctaccgggacttcaaggcctccaacatcctgcttgaccaggtgaagacgactctctgcctattcttttcgttgctgtctagtgctagtttcgacggcagctattgcgtagctgtagaaaaggatactgacgacatacacctgccttgtgtctgcgtctgccttaacaaaatccagaaaattccttcgctacgaacggaattcataaaaaaaagctcagtacaaaataaactttccaagagatttgaccctgaatcgtccataggagttggatgtcaaagtcgtctgccacgcgtcccaaaactgttggctggtttcgaccgaagaccagccctgccccggcgaccggcgtgattggaactcggaagtttcttcgatatacccaattcctagcaatcccagctcatggagtctacgtaccaagctcaataatggatatatgtatctgccatcatttttaaaagagagagagagagagagaaaagaatctgcagctgcctcatcctcatccgtgctgcactgcactagttttcttggcatcaaagcactggtatactaacttaaacagcttgacgatgacagtgatagtctaattagtctgagagggggcgtcgccttagcacccaagtctgcaattgtcgcctacgaatgcgattggtcgactaactcaaaatctgccatctttcaggactacagcaccaagctgtcggactttgggctcgccaaggacgggcctcagggcgacgcgacccacgtcacaacgcgcgtcatggggaccaacgggtacgcggcgccagagtacatcatgacggggcacctcaccgccaagagcgacgtctacagcttcggggtagtgctgctggagctcctgacgggccgtcggtccgtcgatcggtctcggcggcccagggaacagagcctggtggactgggccagaccctacctcaagaagcccgacaagctctaccgggtcatggatccggccatggagtgccagtactcgtgccaaggggccggacgcgccgctatggtggcgtacaagtgcctgagccagaaccccaagtccaggcccaccatgagggaggtggtccaggccctggagcccgtcctggacatgaacgactaccttcagataggctcgtttgtgttcaccgtcgtggtggaagacagcaacgacgacgacagccaaggcaagatggtcgacgtgacaatagagacgacggtggaggagaagcgccagagccaccaggaccggcaccggcagaagttccccaactcggttgtcaatgccgacgtggtgctgcaccgggacggcgacctcgggaagcacattgccgcgctgcggcggcaccggaggacgtccagctacgtcaaggagagagggacgtagaagcgtagcatatagccttcgggtgaattggcaattggcatggcacgtactagtgtttaggagagaatcagcaaaagcaaaagattaatgtgtacatataattaagctagatcatagatggatgtggcacaacaaggcatacacaaccatgccgcatttggtttggtggcacaaaaaattgttcattttttgttcgtgttagtgataattggtgtaactgtccatggtgacatgattatgttcataaattgaaaacatatagatactacggagacagaagttttt

SEQ ID NO: 3790 - DNA, 1841 bp, Zea Mays
gtctcgctcagcagctctctccaactccttcgatcccttccctcctctcgccgccggccgattcacttcttccatcattcgattaagcaagcaaaggcaaggcgcatttccctcgggtgactcgatcggccgcacgatgtctgcgacgcagccgtggaggtcgcttttctgctgcgcggcggcgggatacgacgacgccgacgagccaccgccgtcgtcgcgggggcagaggaagggccggagcaggagggaccgggaccgggagcggctccagctgctgctgctgccgtcgtcctcgtcggcggcgtcgcgggtgtcgctgtcgagcctggggggctcgtcggggacgctgacgcccgaggacctgtccctgacgctgtcgggctccagcctgcacgccttcacctgcgccgagctcagggccgccaccgcgggcttctcccgcgccaactacctcggctccggcggcttcggccccgtctaccggggccgcgtcgccgcgggcctccgcccgggcctcgacgcgcagccggtggccgtcaagtacctcgacctcgactgcggcacgcagggccaccgcgagtggctggccgaggtcttcttccttgcccagctccgacacgacaacctcgtcacgctcatcggctactgctacgaggacgaccaccgcatgcttgtgtacgagtacatgagcaaccagagcctcgagaaacacctcttcagaagtctcgacggccccatgccatggatgacgaggatgaagatcgccgtcggcgcggccaagggcctcgccttcctccacggcgcggacacgccggtgatctaccgggacttcaaggcctccaacatcctgcttgaccagcaccaagctgtcggactttgggctcgccaaggacgggcctcagggcgacgcgacccacgtcacaacgcgcgtcatggggaccaacgggtacgcggcgccagagtacatcatgacggggcacctcaccgccaagagcgacgtctacagcttcggggtagtgctgctggagctcctgacgggccgtcggtccgtcgatcggtctcggcggcccagggaacagagcctggtggactgggccagaccctacctcaagaagcccgacaagctctaccgggtcatggatccggccatggagtgccagtactcgtgccaaggggccggacgcgccgctatggtggcgtacaagtgcctgagccagaaccccaagtccaggcccaccatgagggaggtggtccaggccctggagcccgtcctggacatgaacgactaccttcagataggctcgtttgtgttcaccgtcgtggtggaagacagcaacgacgacgacagccaaggcaagatggtcgacgtgacaatagagacgacggtggaggagaagcgccagagccaccaggaccggcaccggcagaagttccccaactcggttgtcaatgccgacgtggtgctgcaccgggacggcgacctcgggaagcacattgccgcgctgcggcggcaccggaggacgtccagctacgtcaaggagagagggacgtagaagcgtagcatatagccttcgggtgaattggcaattggcatggcacgtactagtgtttaggagagaatcagcaaaagcaaaagattaatgtgtacatataattaagctagatcatagatggatgtggcacaacaaggcatacacaaccatgccgcatttggtttggtggcacaaaaaattgttcattttttgttcgtgttagtgataattggtgtaactgtccatggtgacatgattatgttcataaattgaaaacatatagatactacggagacagaagttttt

SEQ ID NO: 3791 - DNA, 1937 bp, Zea Mays
gcacaggcatgaaaagcatgtgcgcaattttgatctgcgcaaggtttcgtttttcatgaattcgtaacagttcaattattattcaggaaatgctgtaacaaatgttagtacattttcgaactctgacatgtcagcatagcctcatagagtcataggcttcgccaaggctgcaaaatgtctcaaagccaccactagaacagacgtcggaccagtgatttcaagtcgtccgactaatcgcgattagtcgggctagtcggttctgttagcacgactagggaggccgacccgatctgctcgactaatcgtccggtcgtccgattagtcgtccactaatcgcgattagtcgcccaatttgggtggaagcgattagttgccctggactcctagtttaggtcaatagtaagtcttggcatttatgtagtaactagtaagtctgcaactttgcatcatatgaattagtgagttagtgactactgagtaataactgatgttcaattgttcatgttctgaaacctgcaatctgaattctgtcttccagtattcatatttgctatgtttggtaattggtattgcttcctatatgctatattgctatatataatttagttagtgactgatgtccatgttctgaaatctgaattgtccagttccagtattcatatttgttatgtacttatgtttggtattgccttctatatgctatattgctatatatatcaatattatatacataggtcctgcaaatatgtaagagcgttgtagggacgtccaggttgactaggacccgactagtcgacctagtcgtcgtcctaatcgcgattagtcgcctggtcgcccaggtgtatcgactagcaagtcgcccgacttgaaatcattgcgtcggacagcttactttttttccatactttttctttgacatatctgaggagccacttcgccagtattatatataacatacctgatgcttctaaattctattactacatggtatttgtatataaagtttagttgggtcacatcgaatgtttggatgccaattagaacaagtaattgttggctagattgtttggatgccaattacaagtaattattagttaactataaaactaattgcatagaccatggctaattggtgaactattaagcataattaatccataattaacacatgtttactcacatgagcaaatcatagtttaattagttcacgtctagtcctaattagcatccaaacatcatgtctgaccctattaaagtttaggcctaagaatccaaacacccccctaaagctaccaaactctagtaccaaaattcaaaaaaaaagaagttctaaaaaaactcggtcggggagggaaagaccgttctcccggtattatattaaaaagagactcaaacgaagggtggcgtgtaacccgagagagggcggggcacaccgagaggatttttttaacaatgtcaaaaattcaccctcgagtgggatcgaatctagaacctagagatgctactcggaagccttaaccattacgcaaaaaaaagttctacagaacggaaattcagcccttttaaacgaggtaaaaaatcagttctatagcaacaatgttctatattaaactagaaccttttaaagggtttttctttcatgataaatgctactgtattcaaaagtaatgttgttttacatgttggagcaggaacgtagcatcaaattgctagaccccctattgtattggtttgcggtgctacttcaattgacggactgcttgcttgttctcagtgattcatcgtatctccatcaaatcattgtcgtttcccacccagtgtaacagaatttgaaacgagcaattaaaaacttcagtattcctgcctgcccatgaatccaaaacagttttgtagggataaacgaagtacctgatccaccgcgagaagctgcaagatcc

SEQ ID NO: 3792 - DNA, 781 bp, Zea Mays
gtgagtctgttttcttcccaggggggaatgcaatgcgtggggtcaaggaatatcaagccacaaatgaagatattttatttattgttttttccctattttcttgtcgcgacaaatgaagtggtaactgctgttacaactgcttatttctgaatatcaagtgaaatgattctaaaatgaaataacagaaaataatggtgcagtgacgatgtttgagttccagttccagacgagagaaagcggaagagcgggagagggtttttattatttactcattgcaacatcgcgagacgggctgaatgcgctcgagtccctgtatctcttgctgcaaaaggcgagtagtccccgtcagtcagtcggtcagtcagggagggggctcacgacaggtgcagcagcgctgctccgtccatgtgccatgaatggatgcggcagtacgctccgcccattcattgccattgccgtgccagttgcaaatgggagaagcaaagatctggaacgctttttttttcttattgctagcagaagctgatactcatcctgcccacacagcttcggcaagatggaggagtgtgccaacacccgcaacaggcactgaaactaggaagaggtgtaaagcagtggtggtggtggtgtaaagtaacccatgaacatcgttgggcgttggttcatggcggcctttttcttagtgtatagtagtagtattttttcttggcgagaacaaacttcttttttttattgatgaaacaagacttgcttcaatcgagaaagggaaaagaaaaaatct

SEQ ID NO: 3793 - DNA, 1104 bp, Zea Mays
atacgactgggtcgctttgacttacgtaggacactcccgactctagcctcctgcggcttccgcatcctccgcttcgtgtcgtctgccctgctgcccaagcctccggaggttctagcggagccggctcactctcgcgacaccgccgcggcctccggctatatatggacggcgaggaggcgccccttggcgcgctcaacctggctgagtacgcccccgccggcgcccgcaccgtcgactgctacaggcgcatccgcaagatcggcgagggcacctacggtgaggtgtttgaagctgtggatattattactggggaaagagcagcacttaagaaaataaaactggatgatggcaaagaagggtttccacgccaaatcttgcgtgagattaaactattaaaaaagctggatcatgagaacatcatcagattgaaagagattgtagtatctcctggttctgcacatggaacaggcggatcagatgatcacatctataggggagatatctacatggtgtttgaatacatggaccatgatttgaagaaagtattgcaccatagtgccccatcccaagtcaaggtttatatggggcagctgctaaaaggattgcagtactgccatgccaacaatgtacttcatcgggatatcaaaggggctaatcttctaataactggtggtaagttgttaaaactcgcagattttggccttgcaaggctgttcactagagacggaactttaacaaatcatgtcatcactttatggtaccgaccccctgagttgcttcttggtgccacaagttatgctgaacctgtggatatttggtctgtcggttgcatatttgcagaatttttacttaagaaaccattatttcctggcagaactgagcaagagcagttatcaaaaatatttgaactgtgtggatctccaaacgaggaaagctggccaggtgtttccaagctaccattgtataagacaatgactatccgtcctgcgactcctaccaaacgaagcctgagagatattttgcagaactttgactgtcctgcagttgaattaattgaacggatgttgatccttaatccttcacagtgtctgtcttcgtttgcag

SEQ ID NO: 3794 - DNA, 1208 bp, Zea Mays
atacgactgggtcgctttgacttacgtaggacactcccgactctagcctcctgcggcttccgcatcctccgcttcgtgtcgtctgccctgctgcccaagcctccggaggttctagcggagccggctcactctcgcgacaccgccgcggcctccggctatatatggacggcgaggaggcgccccttggcgcgctcaacctggctgagtacgcccccgccggcgcccgcaccgtcgactgctacaggcgcatccgcaagatcggcgagggcacctacggtagatgttgagtggccgtgggatcgtacggccggcggcggaatgatgatccgtttggtccatggatgcacgattcatggcgtacttggagccaattgtcggcggagactttgttgaggtgtttgaagctgtggatattattactggggaaagagcagcacttaagaaaataaaactggatgatggcaaagaagggtttccacgccaaatcttgcgtgagattaaactattaaaaaagctggatcatgagaacatcatcagattgaaagagattgtagtatctcctggttctgcacatggaacaggcggatcagatgatcacatctataggggagatatctacatggtgtttgaatacatggaccatgatttgaagaaagtattgcaccatagtgccccatcccaagtcaaggtttatatggggcagctgctaaaaggattgcagtactgccatgccaacaatgtacttcatcgggatatcaaaggggctaatcttctaataactggtggtaagttgttaaaactcgcagattttggccttgcaaggctgttcactagagacggaactttaacaaatcatgtcatcactttatggtaccgaccccctgagttgcttcttggtgccacaagttatgctgaacctgtggatatttggtctgtcggttgcatatttgcagaatttttacttaagaaaccattatttcctggcagaactgagttatcaaaaatatttgaactgtgtggatctccaaacgaggaaagctggccaggtgtttccaagctaccattgtataagacaatgactatccgtcctgcgactcctaccaaacgaagcctgagagatattttgcagaactttgactgtcctgcagttgaattaattgaacggatgttgatccttaatccttcacagtgtctgtcttcgtttgcag

SEQ ID NO: 3795 - DNA, 1362 bp, Zea Mays
atacgactgggtcgctttgacttacgtaggacactcccgactctagcctcctgcggcttccgcatcctccgcttcgtgtcgtctgccctgctgcccaagcctccggaggttctagcggagccggctcactctcgcgacaccgccgcggcctccggctatatatggacggcgaggaggcgccccttggcgcgctcaacctggctgagtacgcccccgccggcgcccgcaccgtcgactgctacaggcgcatccgcaagatcggcgagggcacctacggtgaggtgtttgaagctgtggatattattactggggaaagagcagcacttaagaaaataaaactggatgatggcaaagaaggggttctgcacatggaacaggcggatcagatgatcacatctataggggagatatctacatggtgtttgaatacatggaccatgatttgaagaaagtattgcaccatagtgccccatcccaagtcaaggtttatatggggcagctgctaaaaggattgcagtactgccatgccaacaatgtacttcatcgggatatcaaaggggctaatcttctaataactggtggtaagttgttaaaactcgcagattttggccttgcaaggctgttcactagagacggaactttaacaaatcatgtcatcactttatggtaccgaccccctgagttgcttcttggtgccacaagttatgctgaacctgtggatatttggtctgtcggttgcatatttgcagaatttttacttaagaaaccattatttcctggcagaactgagttatcaaaaatatttgaactgtgtggatctccaaacgaggaaagctggccaggtgtttccaagctaccattgtataagacaatgactatccgtcctgcgactcctaccaaacgaagcctgagagatattttgcagaactttgactgtcctgcagttgaattaattgaacggatgttgatccttaatccttcacagaggatttctgcacaagatgctcttggtgcggcatacttcatcaactaaactcatatgggggtgtggggtgtgtgtgtgtgttgggggggggggggggggtatagattcgctgttcttttcgagtgcgactaagttttgtttaccttgtcaggatgggtctagggatctctaattggtgtaagtactacctgaagactgaaagtcttgtttctcctgctgacattggatttaggactagcaagcagtttaactttctctgttctagctttaaacataatatatatagatgcattgtacattattactcatggggaaaaatgtatttgattattaattaatagcaagtgattcttggtatattttcatatgatagcgtt

SEQ ID NO: 3796 - DNA, 1458 bp, Zea Mays
atacgactgggtcgctttgacttacgtaggacactcccgactctagcctcctgcggcttccgcatcctccgcttcgtgtcgtctgccctgctgcccaagcctccggaggttctagcggagccggctcactctcgcgacaccgccgcggcctccggctatatatggacggcgaggaggcgccccttggcgcgctcaacctggctgagtacgcccccgccggcgcccgcaccgtcgactgctacaggcgcatccgcaagatcggcgagggcacctacggtgaggtgtttgaagctgtggatattattactggggaaagagcagcacttaagaaaataaaactggatgatggcaaagaagggtttccacgccaaatcttgcgtgagattaaactattaaaaaagctggatcatgagaacatcatcagattgaaagagattgtagtatctcctggttctgcacatggaacaggcggatcagatgatcacatctataggggagatatctacatggtgtttgaatacatggaccatgatttgaagaaagtattgcaccatagtgccccatcccaagtcaaggtttatatggggcagctgctaaaaggattgcagtactgccatgccaacaatgtacttcatcgggatatcaaaggggctaatcttctaataactggtggtaagttgttaaaactcgcagattttggccttgcaaggctgttcactagagacggaactttaacaaatcatgtcatcactttatggtaccgaccccctgagttgcttcttggtgccacaagttatgctgaacctgtggatatttggtctgtcggttgcatatttgcagaatttttacttaagaaaccattatttcctggcagaactgagagcagttatcaaaaatatttgaactgtgtggatctccaaacgaggaaagctggccaggtgtttccaagctaccattgtataagacaatgactatccgtcctgcgactcctaccaaacgaagcctgagagatattttgcagaactttgactgtcctgcagttgaattaattgaacggatgttgatccttaatccttcacagaggatttctgcacaagatgctcttggtgcggcatacttcatcaactaaactcatatgggggtgtggggtgtgtgtgtgtgttgggggggggggggggggtatagattcgctgttcttttcgagtgcgactaagttttgtttaccttgtcaggatgggtctagggatctctaattggtgtaagtactacctgaagactgaaagtcttgtttctcctgctgacattggatttaggactagcaagcagtttaactttctctgttctagctttaaacataatatatatagatgcattgtacattattactcatggggaaaaatgtatttgattattaattaatagcaagtgattcttggtatattttcatatgatagcgtt

SEQ ID NO: 3797 - DNA, 1602 bp, Zea Mays
atacgactgggtcgctttgacttacgtaggacactcccgactctagcctcctgcggcttccgcatcctccgcttcgtgtcgtctgccctgctgcccaagcctccggaggttctagcggagccggctcactctcgcgacaccgccgcggcctccggctatatatggacggcgaggaggcgccccttggcgcgctcaacctggctgagtacgcccccgccggcgcccgcaccgtcgactgctacaggcgcatccgcaagatcggcgagggcacctacggtagatgttgagtggccgtgggatcgtacggccggcggcggaatgatgatccgtttggtccatggatgcacgattcatggcgtacttggagccaattgtcggcggagactttgttgaggtgtttgaagctgtggatattattactggggaaagagcagcacttaagaaaataaaactggatgatggcaaagaagggtttccacgccaaatcttgcgtgagattaaactattaaaaaagctggatcatgagaacatcatcagattgaaagagattgtagtatctcctggttctgcacatggaacaggcggatcagatgatcacatctataggggagatatctacatggtgtttgaatacatggaccatgatttgaagaaagtattgcaccatagtgccccatcccaagtcaaggtttatatggggcagctgctaaaaggattgcagtactgccatgccaacaatgtacttcatcgggatatcaaaggggctaatcttctaataactggtggtaagttgttaaaactcgcagattttggccttgcaaggctgttcactagagacggaactttaacaaatcatgtcatcactttatggtaccgaccccctgagttgcttcttggtgccacaagttatgctgaacctgtggatatttggtctgtcggttgcatatttgcagaatttttacttaagaaaccattatttcctggcagaactgagcaagagcagttatcaaaaatatttgaactgtgtggatctccaaacgaggaaagctggccaggtgtttccaagctaccattgtataagacaatgactatccgtcctgcgactcctaccaaacgaagcctgagagatattttgcagaagtaatccactgactatttcatacgcctagctttgactgtcctgcagttgaattaattgaacggatgttgatccttaatccttcacaggatttctgcacaagatgctcttggtgcggcatacttcatcaactaaactcatatgggggtgtggggtgtgtgtgtgtgttgggggggggggggggggtatagattcgctgttcttttcgagtgcgactaagttttgtttaccttgtcaggatgggtctagggatctctaattggtgtaagtactacctgaagactgaaagtcttgtttctcctgctgacattggatttaggactagcaagcagtttaactttctctgttctagctttaaacataatatatatagatgcattgtacattattactcatggggaaaaatgtatttgattattaattaatagcaagtgattcttggtatattttcatatgatagcgtt

SEQ ID NO: 3798 - DNA, 1371 bp, Zea Mays
atacgactgggtcgctttgacttacgtaggacactcccgactctagcctcctgcggcttccgcatcctccgcttcgtgtcgtctgccctgctgcccaagcctccggaggttctagcggagccggctcactctcgcgacaccgccgcggcctccggctatatatggacggcgaggaggcgccccttggcgcgctcaacctggctgagtacgcccccgccggcgcccgcaccgtcgactgctacaggcgcatccgcaagatcggcgagggcacctacggtgaggtgtttgaagctgtggatattattactggggaaagagcagcacttaagaaaataaaactggatgatggcaaagaaggggttctgcacatggaacaggcggatcagatgatcacatctataggggagatatctacatggtgtttgaatacatggaccatgatttgaagaaagtattgcaccatagtgccccatcccaagtcaaggtttatatggggcagctgctaaaaggattgcagtactgccatgccaacaatgtacttcatcgggatatcaaaggggctaatcttctaataactggtggtaagttgttaaaactcgcagattttggccttgcaaggctgttcactagagacggaactttaacaaatcatgtcatcactttatggtaccgaccccctgagttgcttcttggtgccacaagttatgctgaacctgtggatatttggtctgtcggttgcatatttgcagaatttttacttaagaaaccattatttcctggcagaactgagcaagagcagttatcaaaaatatttgaactgtgtggatctccaaacgaggaaagctggccaggtgtttccaagctaccattgtataagacaatgactatccgtcctgcgactcctaccaaacgaagcctgagagatattttgcagaactttgactgtcctgcagttgaattaattgaacggatgttgatccttaatccttcacagaggatttctgcacaagatgctcttggtgcggcatacttcatcaactaaactcatatgggggtgtggggtgtgtgtgtgtgttgggggggggggggggggtatagattcgctgttcttttcgagtgcgactaagttttgtttaccttgtcaggatgggtctagggatctctaattggtgtaagtactacctgaagactgaaagtcttgtttctcctgctgacattggatttaggactagcaagcagtttaactttctctgttctagctttaaacataatatatatagatgcattgtacattattactcatggggaaaaatgtatttgattattaattaatagcaagtgattcttggtatattttcatatgatagcgtt

SEQ ID NO: 3799 - DNA, 1451 bp, Zea Mays
atacgactgggtcgctttgacttacgtaggacactcccgactctagcctcctgcggcttccgcatcctccgcttcgtgtcgtctgccctgctgcccaagcctccggaggttctagcggagccggctcactctcgcgacaccgccgcggcctccggctatatatggacggcgaggaggcgccccttggcgcgctcaacctggctgagtacgcccccgccggcgcccgcaccgtcgactgctacaggcgcatccgcaagatcggcgagggcacctacggtgaggtgtttgaagctgtggatattattactggggaaagagcagcacttaagaaaataaaactggatgatggcaaagaagggtttccacgccaaatcttgcgtgagattaaactattaaaaaagctggatcatgagaacatcatcagattgaaagagattgtagtatctcctggttctgcacatggaacaggcggatcagatgatcacatctataggggagatatctacatggtgtttgaatacatggaccatgatttgaagaaagtattgcaccatagtgccccatcccaagtcaaggtttatatggggcagctgctaaaaggattgcagtactgccatgccaacaatgtacttcatcgggatatcaaaggggctaatcttctaataactggtggtaagttgttaaaactcgcagattttggccttgcaaggctgttcactagagacggaactttaacaaatcatgtcatcactttatggtaccgaccccctgagttgcttcttggtgccacaagttatgctgaacctgtggatatttggtctgtcggttgcatatttgcagaatttttacttaagaaaccattatttcctggcagaactgagttatcaaaaatatttgaactgtgtggatctccaaacgaggaaagctggccaggtgtttccaagctaccattgtataagacaatgactatccgtcctgcgactcctaccaaacgaagcctgagagatattttgcagaactttgactgtcctgcagttgaattaattgaacggatgttgatccttaatccttcacaggatttctgcacaagatgctcttggtgcggcatacttcatcaactaaactcatatgggggtgtggggtgtgtgtgtgtgttgggggggggggggggggtatagattcgctgttcttttcgagtgcgactaagttttgtttaccttgtcaggatgggtctagggatctctaattggtgtaagtactacctgaagactgaaagtcttgtttctcctgctgacattggatttaggactagcaagcagtttaactttctctgttctagctttaaacataatatatatagatgcattgtacattattactcatggggaaaaatgtatttgattattaattaatagcaagtgattcttggtatattttcatatgatagcgtt

SEQ ID NO: 3800 - DNA, 1575 bp, Zea Mays
atacgactgggtcgctttgacttacgtaggacactcccgactctagcctcctgcggcttccgcatcctccgcttcgtgtcgtctgccctgctgcccaagcctccggaggttctagcggagccggctcactctcgcgacaccgccgcggcctccggctatatatggacggcgaggaggcgccccttggcgcgctcaacctggctgagtacgcccccgccggcgcccgcaccgtcgactgctacaggcgcatccgcaagatcggcgagggcacctacggtagatgttgagtggccgtgggatcgtacggccggcggcggaatgatgatccgtttggtccatggatgcacgattcatggcgtacttggagccaattgtcggcggagactttgttgaggtgtttgaagctgtggatattattactggggaaagagcagcacttaagaaaataaaactggatgatggcaaagaagggtttccacgccaaatcttgcgtgagattaaactattaaaaaagctggatcatgagaacatcatcagattgaaagagattgtagtatctcctggttctgcacatggaacaggcggatcagatgatcacatctataggggagatatctacatggtgtttgaatacatggaccatgatttgaagaaagtattgcaccatagtgccccatcccaagtcaaggtttatatggggcagctgctaaaaggattgcagtactgccatgccaacaatgtacttcatcgggatatcaaaggggctaatcttctaataactggtggtaagttgttaaaactcgcagattttggccttgcaaggctgttcactagagacggaactttaacaaatcatgtcatcactttatggtaccgaccccctgagttgcttcttggtgccacaagttatgctgaacctgtggatatttggtctgtcggttgcatatttgcagaatttttacttaagaaaccattatttcctggcagaactgagcaagagcagttatcaaaaatatttgaactgtgtggatctccaaacgaggaaagctggccaggtgtttccaagctaccattgtataagacaatgactatccgtcctgcgactcctaccaaacgaagcctgagagatattttgcagaactttgactgtcctgcagttgaattaattgaacggatgttgatccttaatccttcacagaggatttctgcacaagatgctcttggtgcggcatacttcatcaactaaactcatatgggggtgtggggtgtgtgtgtgtgttgggggggggggggggggtatagattcgctgttcttttcgagtgcgactaagttttgtttaccttgtcaggatgggtctagggatctctaattggtgtaagtactacctgaagactgaaagtcttgtttctcctgctgacattggatttaggactagcaagcagtttaactttctctgttctagctttaaacataatatatatagatgcattgtacattattactcatggggaaaaatgtatttgattattaattaatagcaagtgattcttggtatattttcatatgatagcgtt

SEQ ID NO: 3801 - DNA, 1460 bp, Zea Mays
atacgactgggtcgctttgacttacgtaggacactcccgactctagcctcctgcggcttccgcatcctccgcttcgtgtcgtctgccctgctgcccaagcctccggaggttctagcggagccggctcactctcgcgacaccgccgcggcctccggctatatatggacggcgaggaggcgccccttggcgcgctcaacctggctgagtacgcccccgccggcgcccgcaccgtcgactgctacaggcgcatccgcaagatcggcgagggcacctacggtgaggtgtttgaagctgtggatattattactggggaaagagcagcacttaagaaaataaaactggatgatggcaaagaagggtttccacgccaaatcttgcgtgagattaaactattaaaaaagctggatcatgagaacatcatcagattgaaagagattgtagtatctcctggttctgcacatggaacaggcggatcagatgatcacatctataggggagatatctacatggtgtttgaatacatggaccatgatttgaagaaagtattgcaccatagtgccccatcccaagtcaaggtttatatggggcagctgctaaaaggattgcagtactgccatgccaacaatgtacttcatcgggatatcaaaggggctaatcttctaataactggtggtaagttgttaaaactcgcagattttggccttgcaaggctgttcactagagacggaactttaacaaatcatgtcatcactttatggtaccgaccccctgagttgcttcttggtgccacaagttatgctgaacctgtggatatttggtctgtcggttgcatatttgcagaatttttacttaagaaaccattatttcctggcagaactgagcaagagcagttatcaaaaatatttgaactgtgtggatctccaaacgaggaaagctggccaggtgtttccaagctaccattgtataagacaatgactatccgtcctgcgactcctaccaaacgaagcctgagagatattttgcagaactttgactgtcctgcagttgaattaattgaacggatgttgatccttaatccttcacaggatttctgcacaagatgctcttggtgcggcatacttcatcaactaaactcatatgggggtgtggggtgtgtgtgtgtgttgggggggggggggggggtatagattcgctgttcttttcgagtgcgactaagttttgtttaccttgtcaggatgggtctagggatctctaattggtgtaagtactacctgaagactgaaagtcttgtttctcctgctgacattggatttaggactagcaagcagtttaactttctctgttctagctttaaacataatatatatagatgcattgtacattattactcatggggaaaaatgtatttgattattaattaatagcaagtgattcttggtatattttcatatgatagcgtt

SEQ ID NO: 3802 - DNA, 1566 bp, Zea Mays
atacgactgggtcgctttgacttacgtaggacactcccgactctagcctcctgcggcttccgcatcctccgcttcgtgtcgtctgccctgctgcccaagcctccggaggttctagcggagccggctcactctcgcgacaccgccgcggcctccggctatatatggacggcgaggaggcgccccttggcgcgctcaacctggctgagtacgcccccgccggcgcccgcaccgtcgactgctacaggcgcatccgcaagatcggcgagggcacctacggtagatgttgagtggccgtgggatcgtacggccggcggcggaatgatgatccgtttggtccatggatgcacgattcatggcgtacttggagccaattgtcggcggagactttgttgaggtgtttgaagctgtggatattattactggggaaagagcagcacttaagaaaataaaactggatgatggcaaagaagggtttccacgccaaatcttgcgtgagattaaactattaaaaaagctggatcatgagaacatcatcagattgaaagagattgtagtatctcctggttctgcacatggaacaggcggatcagatgatcacatctataggggagatatctacatggtgtttgaatacatggaccatgatttgaagaaagtattgcaccatagtgccccatcccaagtcaaggtttatatggggcagctgctaaaaggattgcagtactgccatgccaacaatgtacttcatcgggatatcaaaggggctaatcttctaataactggtggtaagttgttaaaactcgcagattttggccttgcaaggctgttcactagagacggaactttaacaaatcatgtcatcactttatggtaccgaccccctgagttgcttcttggtgccacaagttatgctgaacctgtggatatttggtctgtcggttgcatatttgcagaatttttacttaagaaaccattatttcctggcagaactgagttatcaaaaatatttgaactgtgtggatctccaaacgaggaaagctggccaggtgtttccaagctaccattgtataagacaatgactatccgtcctgcgactcctaccaaacgaagcctgagagatattttgcagaactttgactgtcctgcagttgaattaattgaacggatgttgatccttaatccttcacagaggatttctgcacaagatgctcttggtgcggcatacttcatcaactaaactcatatgggggtgtggggtgtgtgtgtgtgttgggggggggggggggggtatagattcgctgttcttttcgagtgcgactaagttttgtttaccttgtcaggatgggtctagggatctctaattggtgtaagtactacctgaagactgaaagtcttgtttctcctgctgacattggatttaggactagcaagcagtttaactttctctgttctagctttaaacataatatatatagatgcattgtacattattactcatggggaaaaatgtatttgattattaattaatagcaagtgattcttggtatattttcatatgatagcgtt

SEQ ID NO: 3803 - DNA, 1327 bp, Zea Mays
atacgactgggtcgctttgacttacgtaggacactcccgactctagcctcctgcggcttccgcatcctccgcttcgtgtcgtctgccctgctgcccaagcctccggaggttctagcggagccggctcactctcgcgacaccgccgcggcctccggctatatatggacggcgaggaggcgccccttggcgcgctcaacctggctgagtacgcccccgccggcgcccgcaccgtcgactgctacaggcgcatccgcaagatcggcgagggcacctacggtgaggtgtttgaagctgtggatattattactggggaaagagcagcacttaagaaaataaaactggatgatggcaaagaagggtttccacgccaaatcttgcgtgagattaaactattaaaaaagctggatcatgagaacatcatcagattgaaagagattgtagtatctcctggttctgcacatggaacaggcggatcagatgatcacatctataggggagatatctacatggtgtttgaatacatggaccatgatttgaagaaagtattgcaccatagtgccccatcccaagtcaaggtttatatggggcagctgctaaaaggattgcagtactgccatgccaacaatgtacttcatcgggatatcaaaggggctaatcttctaataactggtggtaagttgttaaaactcgcagattttggccttgcaaggctgttcactagagacggaactttaacaaatcatgtcatcactttatggtaccgaccccctgagttgcttcttggtgccacaagttatgctgaacctgtggatatttggtctgtcggttgcatatttgcagaatttttacttaagaaaccattatttcctggcagaactgagttatcaaaaatatttgaactgtgtggatctccaaacgaggaaagctggccaggtgtttccaagctaccattgtataagacaatgactatccgtcctgcgactcctaccaaacgaagcctgagagatattttgcagaactttgactgtcctgcagttgaattaattgaacggatgttgatccttaatccttcacagaggatttctgcacaagatgctcttggatgggtctagggatctctaattggtgtaagtactacctgaagactgaaagtcttgtttctcctgctgacattggatttaggactagcaagcagtttaactttctctgttctagctttaaacataatatatatagatgcattgtacattattactcatggggaaaaatgtatttgattattaattaatagcaagtgattcttggtatattttcatatgatagcgtt

SEQ ID NO: 3804 - DNA, 1336 bp, Zea Mays
atacgactgggtcgctttgacttacgtaggacactcccgactctagcctcctgcggcttccgcatcctccgcttcgtgtcgtctgccctgctgcccaagcctccggaggttctagcggagccggctcactctcgcgacaccgccgcggcctccggctatatatggacggcgaggaggcgccccttggcgcgctcaacctggctgagtacgcccccgccggcgcccgcaccgtcgactgctacaggcgcatccgcaagatcggcgagggcacctacggtgaggtgtttgaagctgtggatattattactggggaaagagcagcacttaagaaaataaaactggatgatggcaaagaagggtttccacgccaaatcttgcgtgagattaaactattaaaaaagctggatcatgagaacatcatcagattgaaagagattgtagtatctcctggttctgcacatggaacaggcggatcagatgatcacatctataggggagatatctacatggtgtttgaatacatggaccatgatttgaagaaagtattgcaccatagtgccccatcccaagtcaaggtttatatggggcagctgctaaaaggattgcagtactgccatgccaacaatgtacttcatcgggatatcaaaggggctaatcttctaataactggtggtaagttgttaaaactcgcagattttggccttgcaaggctgttcactagagacggaactttaacaaatcatgtcatcactttatggtaccgaccccctgagttgcttcttggtgccacaagttatgctgaacctgtggatatttggtctgtcggttgcatatttgcagaatttttacttaagaaaccattatttcctggcagaactgagcaagagcagttatcaaaaatatttgaactgtgtggatctccaaacgaggaaagctggccaggtgtttccaagctaccattgtataagacaatgactatccgtcctgcgactcctaccaaacgaagcctgagagatattttgcagaactttgactgtcctgcagttgaattaattgaacggatgttgatccttaatccttcacagaggatttctgcacaagatgctcttggatgggtctagggatctctaattggtgtaagtactacctgaagactgaaagtcttgtttctcctgctgacattggatttaggactagcaagcagtttaactttctctgttctagctttaaacataatatatatagatgcattgtacattattactcatggggaaaaatgtatttgattattaattaatagcaagtgattcttggtatattttcatatgatagcgtt

SEQ ID NO: 3805 - DNA, 1369 bp, Zea Mays
atacgactgggtcgctttgacttacgtaggacactcccgactctagcctcctgcggcttccgcatcctccgcttcgtgtcgtctgccctgctgcccaagcctccggaggttctagcggagccggctcactctcgcgacaccgccgcggcctccggctatatatggacggcgaggaggcgccccttggcgcgctcaacctggctgagtacgcccccgccggcgcccgcaccgtcgactgctacaggcgcatccgcaagatcggcgagggcacctacggtgaggtgtttgaagctgtggatattattactggggaaagagcagcacttaagaaaataaaactggatgatggcaaagaaggggttctgcacatggaacaggcggatcagatgatcacatctataggggagatatctacatggtgtttgaatacatggaccatgatttgaagaaagtattgcaccatagtgccccatcccaagtcaaggtttatatggggcagctgctaaaaggattgcagtactgccatgccaacaatgtacttcatcgggatatcaaaggggctaatcttctaataactggtggtaagttgttaaaactcgcagattttggccttgcaaggctgttcactagagacggaactttaacaaatcatgtcatcactttatggtaccgaccccctgagttgcttcttggtgccacaagttatgctgaacctgtggatatttggtctgtcggttgcatatttgcagaatttttacttaagaaaccattatttcctggcagaactgagcaagagcagttatcaaaaatatttgaactgtgtggatctccaaacgaggaaagctggccaggtgtttccaagctaccattgtataagacaatgactatccgtcctgcgactcctaccaaacgaagcctgagagatattttgcagaactttgactgtcctgcagttgaattaattgaacggatgttgatccttaatccttcacaggatttctgcacaagatgctcttggtgcggcatacttcatcaactaaactcatatgggggtgtggggtgtgtgtgtgtgttgggggggggggggggggtatagattcgctgttcttttcgagtgcgactaagttttgtttaccttgtcaggatgggtctagggatctctaattggtgtaagtactacctgaagactgaaagtcttgtttctcctgctgacattggatttaggactagcaagcagtttaactttctctgttctagctttaaacataatatatatagatgcattgtacattattactcatggggaaaaatgtatttgattattaattaatagcaagtgattcttggtatattttcatatgatagcgtt

SEQ ID NO: 3806 - DNA, 309 bp, Zea Mays
gttctgaccgccaccatgaatcgtgcgagagagaaacccaccgccgttgacgatcacctatgaagacgctcggggtctaggattaagcctcagggcttcatggtgccgtgagggagtgggtgtttccccaatcgatgggatcatcgaccagacagtcgggaatcacacgtcaaagttctagaaagctgttgaggtgtggaccatcgtggactgggcgacaaccgtgtagaaatcaggtgaagagcaggtacctacgacgagtttgatgaaatctaggcgtcgtcttccagttaactatggcaacgtgga

SEQ ID NO: 3807 - DNA, 979 bp, Zea Mays
ctccactcaaatataattggggattcaaaatttgaatttgaagttgaaaatagaaaagaaagagatatgggaatgaacaaaagaaaaaaaaacaattttcctcagcttggcccgccttcctcttccctcggcccactcttctccaacactcgctcgacccagcctggcatccgcagtgccgcatccaccatccccttctctgcacacctataccctggtcagctcgtcagaaccttcttctccccgtgcggtctccgtaacaaccctgatcgagcgccgcgggccacaacaaaccatcgccacacatcttggggatcccacagttggatagccaactctggcttcccaaccgattccatgctaggtatataacccatggccgatgtgccccatggccatgcattcgggtaggagagcaactcgacgccgcggtcgtcgttcatcacctgccgccgcgaagaaacatttgctacatcggtgattggtggccagagagagaacgtggggcaccacaagagtgtaacacacccgtgcatggactcctcgtgtgtcgtggctttatggcatggccggaatttctcactacgatgtgtcaccgcagcgaagacacgtcgtgtcgtggccaggctgccttacgcctctatctcaggttgtccacactgtaatcagtgcttaggaggagatgttggcaacatggaggactttgaggagttttaggactacgacgagttctagttatcttagtggcaaacccccagttagctgcatgtgaaggccttatctactatgtttcgtattccgcactttgataatgttaaatgactatgttatagactctatggatgtcttagacatcttgatgtaataaagtacctttccgctatttactttgagcaatgtatgatgatgtccaattatgtaatcactgtgtacgtgagtttctgatcctggcacgtacatggttcgcattcagtttgcc

SEQ ID NO: 3808 - DNA, 2749 bp, Zea Mays
ctgaaatgcccgagaggacaatggacacgcacgcagagggagctgccggctgggacaccggacaccacaccattcacatatctcgcgacagcagaaaccacgtcgcgacgctgccacagcagcaggctatgatggtgctcatgagttccatcccagttctcaggccgcgaatgcggttccaaaatactccaagcaaacaggcagtttcgattgggcgaagcgcgtggaaaatccaccgcgccaggaaatcccagagcggcgtcggatcgtggcctcgtgcagcggcatccgcagcaggaataatgaatcgtcatgatctacgttgccgagcccgcagacaggaacgggggtgtaagccgatccgcgagaaaaatccaacctacaagacctacaaggccaagcgacatcccaatccgagcgtttcatcttgccctctgctctgtcccctcacaccttctcgccaggctcagtggtgacatcagctgaggtccggtagtttgcctctgcagccatgcctcaaatccagaacaccatgcggcaaaactgcacactcctagctgttctttgtggggagtttgctgagaagcggcagacaccagcttccctggcgccagacacaaagcggctgcggctgtcataccctttccctgagctcgcttcgtctgggagactggaggtgcacacgctaatcaatcccactttggagcaatttagagaggcacagcaggcggtgcatcctgtcttcttgtatcttcaggggcagcagcaagagaatgaggaggagattggcacgcttgtctggggtgatacagatttatctgacccgcagatgtttgtctcactcatcaccccaccatttccgaccatggtttatttagaggttcccactggggaaaagcttgcccagtcacttcattcaaaggggataccatatgtggtatattggaggaatctattttcatcttatacagcatctcattttcgtcatgcgttaatgtcagtcattcagagttcctgcagccatacatgggatgcatttcaacttgcacatgcctccttccgactatactgtgtaagaaataatcatgtacaaagtgttaagcttggcccctgcctacttggggatgctccaaaaacaaatgtcatccctgctggggatgaagtgaatgaggaacaaggttgttctgaaggttttccagatataagaatatatgatgaagatgtgagcatgaaatttcttctctgtggagtaccatgcaccctggatgcatgtttgttgggggcactagaagatggtttgaatgcgctcttgaatatcgagattcgtgcgagtaaacttcagaaccgagccagtgctcatccacctcttcaagctgaagatcttccacatggagttgttacaatgcgctgcgatatcacaacttgcagttctgcacatgtgtcgtttcttgtttcatgcagtgcccaaacttgttttgatgatcagcttctagggagccgtatcaagaatgaaattattgagaagaggcagttagttcgtgctctattgaataatgaggataacaagccatcttcatatgagcctttgccttccatgtgcgtggcttgcggagcttctacttttgaagtctggataaccatgccaaaatgggcagcacaggaagacttcttgaaagatgtcatgcagtttctacttcagaggggccacatccgacttgtacctcagggaggactggcagaatttcctgacgcagtgttaaattcaaagcgtcttgatttatataacttatacaaagaggtggtataccgaggtggcttttatgtaggcaatggcataaattggaaaggtcaaatcttttcaaagatgcacaaccatacagttacaaacaaaatgacggtatgcttgtttttgttccatttacttgccatcacactggaaaagtgggaaggttttaaattatctgtttttatgctattatatatttttataattcttatattaacatatatagatttgccttgctatttgtgagcaatagaaaaatctatttttttgcactacagctatttgaagcacacgatgccaattgtttcctccttagttattattatgaacatataatctggctgtggttaatttggcattaaactaaaactaatcatgcattctttttacatttagggtgttgggaacaccctaaaaaggcattatgagacgtacttgcttgaatatgaacttgcacatgacgatattgatggggaatgttgcttgatttgccacagtggtgctctgggtgactgggtgaactgtggattatgtggagaatgggcccaccttggctgcgatagacggaaagggctgtctactttcaaggactactcgaaggcggatgggatggaatacatatgtccccagtgtagccttgcgaaatacaaaccgccgttgcctgcaccatgaaatatgttgattaacttctgttactttcttaagggtgatggtttggatagaaattagtggctaaggatgtgtagtgttgacctgtactattgaatatgatcctgtacgatttgtacaatttttataaaatttctgatttccgaagggtgtctggtctgtttgtaagaccttagtttttaagaatctggtttatgaaaaaaaactagttaataatgtttagaaccacctcaatttttatagacttcttagtaagaaactgaaaatcccgttttataaactagagcataaact

SEQ ID NO: 3809 - DNA, 3337 bp, Zea Mays
ctgaaatgcccgagaggacaatggacacgcacgcagagggagctgccggctgggacaccggacaccacaccattcacatatctcgcgacagcagaaaccacgtcgcgacgctgccacagcagcaggctatgatggtgctcatgagttccatcccagttctcaggccgcgaatgcggttccaaaatactccaagcaaacaggcagtttcgattgggcgaagcgcgtggaaaatccaccgcgccaggaaatcccagagcggcgtcggatcgtggcctcgtgcagcggcatccgcagcaggaataatgaatcgtcatgatctacgttgccgagcccgcagacaggaacgggggtgtaagccgatccgcgagaaaaatccaacctacaagacctacaaggccaagcgacatcccaatccgagcgtttcatcttgccctctgctctgtcccctcacaccttctcgccaggctcagtggtgacatcagctgaggtccggtagtttgcctctgcagccatgcctcaaatccagaacaccatgcggcaaaactgcacactcctagctgttctttgtggggagtttgctgagaagcggcagacaccagcttccctggcgccagacacaaagcggctgcggctgtcataccctttccctgagctcgcttcgtctgggagactggaggtgcacacgctaatcaatcccactttggagcaatttagagaggcacagcaggcggtgcatcctgtcttcttgtatcttcaggggcagcagcaagagaatgaggaggagattggcacgcttgtctggggtgatacagatttatctgacccgcagatgtttgtctcactcatcaccccaccatttccgaccatggtttatttagaggttcccactggggaaaagcttgcccagtcacttcattcaaaggggataccatatgtggtatattggaggaatctattttcatcttatacagcatctcattttcgtcatgcgttaatgtcagtcattcagagttcctgcagccatacatgggatgcatttcaacttgcacatgcctccttccgactatactgtgtaagaaataatcatgtacaaagtgttaagcttggcccctgcctacttggggatgctccaaaaacaaatgtcatccctgctggggatgaagtgaatgaggaacaaggttgttctgaaggttttccagatataagaatatatgatgaagatgtgagcatgaaatttcttctctgtggagtaccatgcaccctggatgcatgtttgttgggggcactagaagatggtttgaatgcgctcttgaatatcgagattcgtgcgagtaaacttcagaaccgagccagtgctcatccacctcttcaagctgaagatcttccacatggagttgttacaatgcgctgcgatatcacaacttgcagttctgcacatgtgtcgtttcttgtttcatgcagtgcccaaacttgttttgatgatcagcttctagggagccgtatcaagaatgaaattattgagaagaggcagttagttcgtgctctattgaataatgaggataacaagccatcttcatatgagcctttgccttccatgtgcgtggcttgcggagcttctacttttgaagtctggataaccatgccaaaatgggcagcacaggttttgaaacatcttgcgccagaaatctcctacagaagcttggttgcacttggaattgcttgggtaaatggtacaccagtgtcctcatttgataggcaggatgcagaccggcttcttttcttttgctctaaccagtgcggagatcaagctattcaaaatggctcatatgctcatgtatccagctggtcagcaccccttaccaaggatagaaccactggaagtctcgagtcaaaacagatgtcatttggtgcaaaaggagttgtaggggataatacgatctccctatcatcattgaaaccaaggctaaagcctgcaacaatgagaccccttcctcactctcgcaagcaacaaatgcatccctttatggggtttcctcagtccatcattcacgatgctagtcaagttaagcctagcttgccagcccctcctgtgaagcacaacgcagtacctgttaccgcagtgacaccgagaaaatcatcatctgggtcaccatcatcctggtcacgtgttcagctaccaatcccattgaatcctctgccaataaagaaacatgagtgcaatcggttgcctatccacagttgctctgaagaagacttcttgaaagatgtcatgcagtttctacttcagaggggccacatccgacttgtacctcagggaggactggcagaatttcctgacgcagtgttaaattcaaagcgtcttgatttatataacttatacaaagaggtggtataccgaggtggcttttatgtaggcaatggcataaattggaaaggtcaaatcttttcaaagatgcacaaccatacagttacaaacaaaatgacggtatgcttgtttttgttccatttacttgccatcacactggaaaagtgggaaggttttaaattatctgtttttatgctattatatatttttataattcttatattaacatatatagatttgccttgctatttgtgagcaatagaaaaatctatttttttgcactacagctatttgaagcacacgatgccaattgtttcctccttagttattattatgaacatataatctggctgtggttaatttggcattaaactaaaactaatcatgcattctttttacatttagggtgttgggaacaccctaaaaaggcattatgagacgtacttgcttgaatatgaacttgcacatgacgatattgatggggaatgttgcttgatttgccacagtggtgctctgggtgactgggtgaactgtggattatgtggagaatgggcccaccttggctgcgatagacggaaagggctgtctactttcaaggactactcgaaggcggatgggatggaatacatatgtccccagtgtagccttgcgaaatacaaaccgccgttgcctgcaccatgaaatatgttgattaacttctgttactttcttaagggtgatggtttggatagaaattagtggctaaggatgtgtagtgttgacctgtactattgaatatgatcctgtacgatttgtacaatttttataaaatttctgatttccgaagggtgtctggtctgtttgtaagaccttagtttttaagaatctggtttatgaaaaaaaactagttaataatgtttagaaccacctcaatttttatagacttcttagtaagaaactgaaaatcccgttttataaactagagcataaact

SEQ ID NO: 3810 - DNA, 2951 bp, Zea Mays
ctgaaatgcccgagaggacaatggacacgcacgcagagggagctgccggctgggacaccggacaccacaccattcacatatctcgcgacagcagaaaccacgtcgcgacgctgccacagcagcaggctatgatggtgctcatgagttccatcccagttctcaggccgcgaatgcggttccaaaatactccaagcaaacaggcagtttcgattgggcgaagcgcgtggaaaatccaccgcgccaggaaatcccagagcggcgtcggatcgtggcctcgtgcagcggcatccgcagcaggaataatgaatcgtcatgatctacgttgccgagcccgcagacaggaacgggggtgtaagccgatccgcgagaaaaatccaacctacaagacctacaaggccaagcgacatcccaatccgagcgtttcatcttgccctctgctctgtcccctcacaccttctcgccaggctcagtggtgacatcagctgaggtccggtagtttgcctctgcagccatgcctcaaatccagaacaccatgcggcaaaactgcacactcctagctgttctttgtggggagtttgctgagaagcggcagacaccagcttccctggcgccagacacaaagcggctgcggctgtcataccctttccctgagctcgcttcgtctgggagactggaggtgcacacgctaatcaatcccactttggagcaatttagagaggcacagcaggcggtgcatcctgtcttcttgtatcttcaggggcagcagcaagagaatgaggaggagattggcacgcttgtctggggtgatacagatttatctgacccgcagatgtttgtctcactcatcaccccaccatttccgaccatggtttatttagaggttcccactggggaaaagcttgcccagtcacttcattcaaaggggataccatatgtggtatattggaggaatctattttcatcttatacagcatctcattttcgtcatgcgttaatgtcagtcattcagagttcctgcagccatacatgggatgcatttcaacttgcacatgcctccttccgactatactgtgtaagaaataatcatgtacaaagtgttaagcttggcccctgcctacttggggatgctccaaaaacaaatgtcatccctgctggggatgaagtgaatgaggaacaaggttgttctgaaggttttccagatataagaatatatgatgaagatgtgagcatgaaatttcttctctgtggagtaccatgcaccctggatgcatgtttgttgggggcactagaagatggtttgaatgcgctcttgaatatcgagattcgtgcgagtaaacttcagaaccgagccagtgctcatccacctcttcaagctgaagatcttccacatggagttgttacaatgcgctgcgatatcacaacttgcagttctgcacatgtgtcgtttcttgtttcatgcagtgcccaaacttgttttgatgatcagcttctagggagccgtatcaagaatgaaattattgagaagaggcagttagttcgtgctctattgaataatgaggataacaagccatcttcatatgagcctttgccttccatgtgcgtggcttgcggagcttctacttttgaagtctggataaccatgccaaaatgggcagcacaggttttgaaacatcttgcgccagaaatctcctacagaagcttggttgcacttggaattgcttgggtaaatggtacaccagtgtcctcatttgataggcaggatgcagaccggcttcttttcttttgctctaaccagtgcggagatcaagctattcaaaatggctcatatgctcatgtatccagctggtcagcaccccttaccaaggatagaaccactggaagtctcgagtcaaaacagatgtcatttggtgcaaaaggagttgtaggggataatacgatctccctatcatcattgaaaccaaggctaaagcctgcaacaatgagaccccttcctcactctcgcaagcaacaaatgcatccctttatggggtttcctcagtccatcattcacgatgctagtcaagttaagcctagcttgccagcccctcctgtgaagcacaacgcagtacctgttaccgcagtgacaccgagaaaatcatcatctgggtcaccatcatcctggtcacgtgttcagctaccaatcccattgaatcctctgccaataaagaaacatgagtgcaatcggttgcctatccacagttgctctgaagaagacttcttgaaagatgtcatgcagtttctacttcagaggggccacatccgacttgtacctcagggaggactggcagaatttcctgacgcagtgttaaattcaaagcgtcttgatttatataacttatacaaagaggtggtataccgaggtggcttttatgtaggcaatggcataaattggaaaggtcaaatcttttcaaagatgcacaaccatacagttacaaacaaaatgacgtggtgctctgggtgactgggtgaactgtggattatgtggagaatgggcccaccttggctgcgatagacggaaagggctgtctactttcaaggactactcgaaggcggatgggatggaatacatatgtccccagtgtagccttgcgaaatacaaaccgccgttgcctgcaccatgaaatatgttgattaacttctgttactttcttaagggtgatggtttggatagaaattagtggctaaggatgtgtagtgttgacctgtactattgaatatgatcctgtacgatttgtacaatttttataaaatttctgatttccgaagggtgtctggtctgtttgtaagaccttagtttttaagaatctggtttatgaaaaaaaactagttaataatgtttagaaccacctcaatttttatagacttcttagtaagaaactgaaaatcccgttttataaactagagcataaact

SEQ ID NO: 3811 - DNA, 3052 bp, Zea Mays
ctgaaatgcccgagaggacaatggacacgcacgcagagggagctgccggctgggacaccggacaccacaccattcacatatctcgcgacagcagaaaccacgtcgcgacgctgccacagcagcaggctatgatggtgctcatgagttccatcccagttctcaggccgcgaatgcggttccaaaatactccaagcaaacaggcagtttcgattgggcgaagcgcgtggaaaatccaccgcgccaggaaatcccagagcggcgtcggatcgtggcctcgtgcagcggcatccgcagcaggaataatgaatcgtcatgatctacgttgccgagcccgcagacaggaacgggggtgtaagccgatccgcgagaaaaatccaacctacaagacctacaaggccaagcgacatcccaatccgagcgtttcatcttgccctctgctctgtcccctcacaccttctcgccaggctcagtggtgacatcagctgaggtccggtagtttgcctctgcagccatgcctcaaatccagaacaccatgcggcaaaactgcacactcctagctgttctttgtggggagtttgctgagaagcggcagacaccagcttccctggcgccagacacaaagcggctgcggctgtcataccctttccctgagctcgcttcgtctgggagactggaggtgcacacgctaatcaatcccactttggagcaatttagagaggcacagcaggcggtgcatcctgtcttcttgtatcttcaggggcagcagcaagagaatgaggaggagattggcacgcttgtctggggtgatacagatttatctgacccgcagatgtttgtctcactcatcaccccaccatttccgaccatggtttatttagaggttcccactggggaaaagcttgcccagtcacttcattcaaaggggataccatatgtggtatattggaggaatctattttcatcttatacagcatctcattttcgtcatgcgttaatgtcagtcattcagagttcctgcagccatacatgggatgcatttcaacttgcacatgcctccttccgactatactgtgtaagaaataatcatgtacaaagtgttaagcttggcccctgcctacttggggatgctccaaaaacaaatgtcatccctgctggggatgaagtgaatgaggaacaaggttgttctgaaggttttccagatataagaatatatgatgaagatgtgagcatgaaatttcttctctgtggagtaccatgcaccctggatgcatgtttgttgggggcactagaagatggtttgaatgcgctcttgaatatcgagattcgtgcgagtaaacttcagaaccgagccagtgctcatccacctcttcaagctgaagatcttccacatggagttgttacaatgcgctgcgatatcacaacttgcagttctgcacatgtgtcgtttcttgtttcatgcagtgcccaaacttgttttgatgatcagcttctagggagccgtatcaagaatgaaattattgagaagaggcagttagttcgtgctctattgaataatgaggataacaagccatcttcatatgagcctttgccttccatgtgcgtggcttgcggagcttctacttttgaagtctggataaccatgccaaaatgggcagcacaggttttgaaacatcttgcgccagaaatctcctacagaagcttggttgcacttggaattgcttgggtaaatggtacaccagtgtcctcatttgataggcaggatgcagaccggcttcttttcttttgctctaaccagtgcggagatcaagctattcaaaatggctcatatgctcatgtatccagctggtcagcaccccttaccaaggatagaaccactggaagtctcgagtcaaaacagatgtcatttggtgcaaaaggagttgtaggggataatacgatctccctatcatcattgaaaccaaggctaaagcctgcaacaatgagaccccttcctcactctcgcaagcaacaaatgcatccctttatggggtttcctcagtccatcattcacgatgctagtcaagttaagcctagcttgccagcccctcctgtgaagcacaacgcagtacctgttaccgcagtgacaccgagaaaatcatcatctgggtcaccatcatcctggtcacgtgttcagctaccaatcccattgaatcctctgccaataaagaaacatgagtgcaatcggttgcctatccacagttgctctgaagaagacttcttgaaagatgtcatgcagtttctacttcagaggggccacatccgacttgtacctcagggaggactggcagaatttcctgacgcagtgttaaattcaaagcgtcttgatttatataacttatacaaagaggtggtataccgaggtggcttttatgtaggcaatggcataaattggaaaggtcaaatcttttcaaagatgcacaaccatacagttacaaacaaaatgacgggtgttgggaacaccctaaaaaggcattatgagacgtacttgcttgaatatgaacttgcacatgacgatattgatggggaatgttgcttgatttgccacagtggtgctctgggtgactgggtgaactgtggattatgtggagaatgggcccaccttggctgcgatagacggaaagggctgtctactttcaaggactactcgaaggcggatgggatggaatacatatgtccccagtgtagccttgcgaaatacaaaccgccgttgcctgcaccatgaaatatgttgattaacttctgttactttcttaagggtgatggtttggatagaaattagtggctaaggatgtgtagtgttgacctgtactattgaatatgatcctgtacgatttgtacaatttttataaaatttctgatttccgaagggtgtctggtctgtttgtaagaccttagtttttaagaatctggtttatgaaaaaaaactagttaataatgtttagaaccacctcaatttttatagacttcttagtaagaaactgaaaatcccgttttataaactagagcataaact

SEQ ID NO: 3812 - DNA, 1321 bp, Zea Mays
atgcccgagaggacaatggacacgcacgcagagggagctgccggctgggacaccggacaccacaccattcacatatctcgcgacagcagaaaccacgtcgcgacgctgccacagcagcaggctatgatggtgctcatgagttccatcccagttctcaggccgcgaatgcggttccaaaatactccaagcaaacaggcagtttcgattgggcgaagcgcgtggaaaatccaccgcgccaggaaatcccagagcggcgtcggatcgtggcctcgtgcagcggcatccgcagcaggaataatgaatcgtcatgatctacgttgccgagcccgcagacaggaacgggggtgtaagccgatccgcgagaaaaatccaacctacaagacctacaaggccaagcgacatcccaatccgagcgtttcatcttgccctctgctctgtcccctcacaccttctcgccaggctcagtggtgacatcagctgaggtccggtagtttgcctctgcagccatgcctcaaatccagaacaccatgcggcaaaactgcacactcctagctgttctttgtggggagtttgctgagaagcggcagacaccagcttccctggcgccagacacaaagcggctgcggctgtcataccctttccctgagctcgcttcgtctgggagactggaggtgcacacgctaatcaatcccactttggagcaatttagagaggcacagcaggcggtgcatcctgtcttcttgtatcttcaggggcagcagcaagagaatgaggaggagattggcacgcttgtctggggtgatacagatttatctgacccgcagatgtttgtctcactcatcaccccaccatttccgaccatggtttatttagaggttcccactggggaaaagcttgcccagtcacttcattcaaagtttagtgttcctggttatagttcctgcagccatacatgggatgcatttcaacttgcacatgcctccttccgactatactgtgtaagaaataatcatgtacaaagtgttaagcttggcccctgcctacttggggatgctccaaaaacaaatgtcatccctgctggggatgaagtgaatgaggaacaaggttgttctgaaggttttccagatataagaatatatgatgaagatgtgagcatgaaatttcttctctgtggagtaccatgcaccctggatgcatgtttgttgggggcactagaagatggtttgaatgcgctcttgaatatcgagattcgtgcgagtaaacttcagaaccgagccagacctatatttgggatatgatggagtaaagatggcaatggtat

SEQ ID NO: 3813 - DNA, 3007 bp, Zea Mays
atgcccgagaggacaatggacacgcacgcagagggagctgccggctgggacaccggacaccacaccattcacatatctcgcgacagcagaaaccacgtcgcgacgctgccacagcagcaggctatgatggtgctcatgagttccatcccagttctcaggccgcgaatgcggttccaaaatactccaagcaaacaggcagtttcgattgggcgaagcgcgtggaaaatccaccgcgccaggaaatcccagagcggcgtcggatcgtggcctcgtgcagcggcatccgcagcagacaggaacgggggtgtaagccgatccgcgagaaaaatccaacctacaagacctacaaggccaagcgacatcccaatccgagcgtttcatcttgccctctgctctgtcccctcacaccttctcgccaggctcagtggtgacatcagctgaggtccggtagtttgcctctgcagccatgcctcaaatccagaacaccatgcggcaaaactgcacactcctagctgttctttgtggggagtttgctgagaagcggcagacaccagcttccctggcgccagacacaaagcggctgcggctgtcataccctttccctgagctcgcttcgtctgggagactggaggtgcacacgctaatcaatcccactttggagcaatttagagaggcacagcaggcggtgcatcctgtcttcttgtatcttcaggggcagcagcaagagaatgaggaggagattggcacgcttgtctggggtgatacagatttatctgacccgcagatgtttgtctcactcatcaccccaccatttccgaccatggtttatttagaggttcccactggggaaaagcttgcccagtcacttcattcaaaggggataccatatgtggtatattggaggaatctattttcatcttatacagcatctcattttcgtcatgcgttaatgtcagtcattcagagttcctgcagccatacatgggatgcatttcaacttgcacatgcctccttccgactatactgtgtaagaaataatcatgtacaaagtgttaagcttggcccctgcctacttggggatgctccaaaaacaaatgtcatccctgctggggatgaagtgaatgaggaacaaggttgttctgaaggttttccagatataagaatatatgatgaagatgtgagcatgaaatttcttctctgtggagtaccatgcaccctggatgcatgtttgttgggggcactagaagatggtttgaatgcgctcttgaatatcgagattcgtgcgagtaaacttcagaaccgagccagtgctcatccacctcttcaagctgaagatcttccacatggagttgttacaatgcgctgcgatatcacaacttgcagttctgcacatgtgtcgtttcttgtttcatgcagtgcccaaacttgttttgatgatcagcttctagggagccgtatcaagaatgaaattattgagaagaggcagttagttcgtgctctattgaataatgaggataacaagccatcttcatatgagcctttgccttccatgtgcgtggcttgcggagcttctacttttgaagtctggataaccatgccaaaatgggcagcacaggttttgaaacatcttgcgccagaaatctcctacagaagcttggttgcacttggaattgcttgggtaaatggtacaccagtgtcctcatttgataggcaggatgcagaccggcttcttttcttttgctctaaccagtgcggagatcaagctattcaaaatggctcatatgctcatgtatccagctggtcagcaccccttaccaaggatagaaccactggaagtctcgagtcaaaacagatgtcatttggtgcaaaaggagttgtaggggataatacgatctccctatcatcattgaaaccaaggctaaagcctgcaacaatgagaccccttcctcactctcgcaagcaacaaatgcatccctttatggggtttcctcagtccatcattcacgatgctagtcaagttaagcctagcttgccagcccctcctgtgaagcacaacgcagtacctgttaccgcagtgacaccgagaaaatcatcatctgggtcaccatcatcctggtcacgtgttcagctaccaatcccattgaatcctctgccaataaagaaacatgagtgcaatcggttgcctatccacagttgctctgaagaagacttcttgaaagatgtcatgcagtttctacttcagaggggccacatccgacttgtacctcagggaggactggcagaatttcctgacgcagtgttaaattcaaagcgtcttgatttatataacttatacaaagaggtggtataccgaggtggcttttatgtaggcaatggcataaattggaaaggtcaaatcttttcaaagatgcacaaccatacagttacaaacaaaatgacgggtgttgggaacaccctaaaaaggcattatgagacgtacttgcttgaatatgaacttgcacatgacgatattgatggggaatgttgcttgatttgccacagtggtgctctgggtgactgggtgaactgtggattatgtggagaatgggcccaccttggctgcgatagacggaaagggctgtctactttcaaggactactcgaaggcggatgggatggaatacatatgtccccagtgtagccttgcgaaatacaaaccgccgttgcctgcaccatgaaatatgttgattaacttctgttactttcttaagggtgatggtttggatagaaattagtggctaaggatgtgtagtgttgacctgtactattgaatatgatcctgtacgatttgtacaatttttataaaatttctgatttccgaagggtgtctggtctgtttgtaagaccttagtttttaagaatctggtttatgaaaaaaaactagttaataatgtttagaaccacctcaatttttatagacttcttagtaagaaactgaaaatcccgttttataaactagagcataaact

SEQ ID NO: 3814 - DNA, 2859 bp, Zea Mays
atgcccgagaggacaatggacacgcacgcagagggagctgccggctgggacaccggacaccacaccattcacatatctcgcgacagcagaaaccacgtcgcgacgctgccacagcagcaggctatgatggtgctcatgagttccatcccagttctcaggccgcgaatgcggttccaaaatactccaagcaaacaggcagtttcgattgggcgaagcgcgtggaaaatccaccgcgccaggaaatcccagagcggcgtcggatcgtggcctcgtgcagcggcatccgcagcagccatgcctcaaatccagaacaccatgcggcaaaactgcacactcctagctgttctttgtggggagtttgctgagaagcggcagacaccagcttccctggcgccagacacaaagcggctgcggctgtcataccctttccctgagctcgcttcgtctgggagactggaggtgcacacgctaatcaatcccactttggagcaatttagagaggcacagcaggcggtgcatcctgtcttcttgtatcttcaggggcagcagcaagagaatgaggaggagattggcacgcttgtctggggtgatacagatttatctgacccgcagatgtttgtctcactcatcaccccaccatttccgaccatggtttatttagaggttcccactggggaaaagcttgcccagtcacttcattcaaaggggataccatatgtggtatattggaggaatctattttcatcttatacagcatctcattttcgtcatgcgttaatgtcagtcattcagagttcctgcagccatacatgggatgcatttcaacttgcacatgcctccttccgactatactgtgtaagaaataatcatgtacaaagtgttaagcttggcccctgcctacttggggatgctccaaaaacaaatgtcatccctgctggggatgaagtgaatgaggaacaaggttgttctgaaggttttccagatataagaatatatgatgaagatgtgagcatgaaatttcttctctgtggagtaccatgcaccctggatgcatgtttgttgggggcactagaagatggtttgaatgcgctcttgaatatcgagattcgtgcgagtaaacttcagaaccgagccagtgctcatccacctcttcaagctgaagatcttccacatggagttgttacaatgcgctgcgatatcacaacttgcagttctgcacatgtgtcgtttcttgtttcatgcagtgcccaaacttgttttgatgatcagcttctagggagccgtatcaagaatgaaattattgagaagaggcagttagttcgtgctctattgaataatgaggataacaagccatcttcatatgagcctttgccttccatgttttgaaacatcttgcgccagaaatctcctacagaagcttggttgcacttggaattgcttgggtaaatggtacaccagtgtcctcatttgataggcaggatgcagaccggcttcttttcttttgctctaaccagtgcggagatcaagctattcaaaatggctcatatgctcatgtatccagctggtcagcaccccttaccaaggatagaaccactggaagtctcgagtcaaaacagatgtcatttggtgcaaaaggagttgtaggggataatacgatctccctatcatcattgaaaccaaggctaaagcctgcaacaatgagaccccttcctcactctcgcaagcaacaaatgcatccctttatggggtttcctcagtccatcattcacgatgctagtcaagttaagcctagcttgccagcccctcctgtgaagcacaacgcagtacctgttaccgcagtgacaccgagaaaatcatcatctgggtcaccatcatcctggtcacgtgttcagctaccaatcccattgaatcctctgccaataaagaaacatgagtgcaatcggttgcctatccacagttgctctgaagaagacttcttgaaagatgtcatgcagtttctacttcagaggggccacatccgacttgtacctcagggaggactggcagaatttcctgacgcagtgttaaattcaaagcgtcttgatttatataacttatacaaagaggtggtataccgaggtggcttttatgtaggcaatggcataaattggaaaggtcaaatcttttcaaagatgcacaaccatacagttacaaacaaaatgacgggtgttgggaacaccctaaaaaggcattatgagacgtacttgcttgaatatgaacttgcacatgacgatattgatggggaatgttgcttgatttgccacaggtttgaagatttgttttcattctagtatatctgacacatctctttttcgtttacgtagattctaacatgttagtttatgtatttacagtggtgctctgggtgactgggtgaactgtggattatgtggagaatgggcccaccttggctgcgatagacggaaagggctgtctactttcaaggactactcgaaggcggatgggatggaatacatatgtccccagtgtagccttgcgaaatacaaaccgccgttgcctgcaccatgaaatatgttgattaacttctgttactttcttaagggtgatggtttggatagaaattagtggctaaggatgtgtagtgttgacctgtactattgaatatgatcctgtacgatttgtacaatttttataaaatttctgatttccgaagggtgtctggtctgtttgtaagaccttagtttttaagaatctggtttatgaaaaaaaactagttaataatgtttagaaccacctcaatttttatagacttcttagtaagaaactgaaaatcccgttttataaactagagcataaact

SEQ ID NO: 3815 - DNA, 3252 bp, Zea Mays
atgcccgagaggacaatggacacgcacgcagagggagctgccggctgggacaccggacaccacaccattcacatatctcgcgacagcagaaaccacgtcgcgacgctgccacagcagcaggctatgatggtgctcatgagttccatcccagttctcaggccgcgaatgcggttccaaaatactccaagcaaacaggcagtttcgattgggcgaagcgcgtggaaaatccaccgcgccaggaaatcccagagcggcgtcggatcgtggcctcgtgcagcggcatccgcagcaggctcagtggtgacatcagctgaggtccggtagtttgcctctgcagccatgcctcaaatccagaacaccatgcggcaaaactgcacactcctagctgttctttgtggggagtttgctgagaagcggcagacaccagcttccctggcgccagacacaaagcggctgcggctgtcataccctttccctgagctcgcttcgtctgggagactggaggtgcacacgctaatcaatcccactttggagcaatttagagaggcacagcaggcggtgcatcctgtcttcttgtatcttcaggggcagcagcaagagaatgaggaggagattggcacgcttgtctggggtgatacagatttatctgacccgcagatgtttgtctcactcatcaccccaccatttccgaccatggtttatttagaggttcccactggggaaaagcttgcccagtcacttcattcaaaggggataccatatgtggtatattggaggaatctattttcatcttatacagcatctcattttcgtcatgcgttaatgtcagtcattcagagttcctgcagccatacatgggatgcatttcaacttgcacatgcctccttccgactatactgtgtaagaaataatcatgtacaaagtgttaagcttggcccctgcctacttggggatgctccaaaaacaaatgtcatccctgctggggatgaagtgaatgaggaacaaggttgttctgaaggttttccagatataagaatatatgatgaagatgtgagcatgaaatttcttctctgtggagtaccatgcaccctggatgcatgtttgttgggggcactagaagatggtttgaatgcgctcttgaatatcgagattcgtgcgagtaaacttcagaaccgagccagtgctcatccacctcttcaagctgaagatcttccacatggagttgttacaatgcgctgcgatatcacaacttgcagttctgcacatgtgtcgtttcttgtttcatgcagtgcccaaacttgttttgatgatcagcttctagggagccgtatcaagaatgaaattattgagaagaggcagttagttcgtgctctattgaataatgaggataacaagccatcttcatatgagcctttgccttccatgtgcgtggcttgcggagcttctacttttgaagtctggataaccatgccaaaatgggcagcacaggttttgaaacatcttgcgccagaaatctcctacagaagcttggttgcacttggaattgcttgggtaaatggtacaccagtgtcctcatttgataggcaggatgcagaccggcttcttttcttttgctctaaccagtgcggagatcaagctattcaaaatggctcatatgctcatgtatccagctggtcagcaccccttaccaaggatagaaccactggaagtctcgagtcaaaacagatgtcatttggtgcaaaaggagttgtaggggataatacgatctccctatcatcattgaaaccaaggctaaagcctgcaacaatgagaccccttcctcactctcgcaagcaacaaatgcatccctttatggggtttcctcagtccatcattcacgatgctagtcaagttaagcctagcttgccagcccctcctgtgaagcacaacgcagtacctgttaccgcagtgacaccgagaaaatcatcatctgggtcaccatcatcctggtcacgtgttcagctaccaatcccattgaatcctctgccaataaagaaacatgagtgcaatcggttgcctatccacagttgctctgaagtacacttcgggaccatccttttgtttccttctgtgctgaagcatcttcctagtaaatatcccctcattttgtgctatcttttgcaggaagacttcttgaaagatgtcatgcagtttctacttcagaggggccacatccgacttgtacctcagggaggactggcagaatttcctgacgcagtgttaaattcaaagcgtcttgatttatataacttatacaaagaggtggtataccgaggtggcttttatgtaggcaatggcataaattggaaaggtcaaatcttttcaaagatgcacaaccatacagttacaaacaaaatgacggtatgcttgtttttgttccatttacttgccatcacactggaaaagtgggaaggttttaaattatctgtttttatgctattatatatttttataattcttatattaacatatatagatttgccttgctatttgtgagcaatagaaaaatctatttttttgcactacagctatttgaagcacacgatgccaattgtttcctccttagttattattatgaacatataatctggctgtggttaatttggcattaaactaaaactaatcatgcattctttttacatttagggtgttgggaacaccctaaaaaggcattatgagacgtacttgcttgaatatgaacttgcacatgacgatattgatggggaatgttgcttgatttgccacagtggtgctctgggtgactgggtgaactgtggattatgtggagaatgggcccaccttggctgcgatagacggaaagggctgtctactttcaaggactactcgaaggcggatgggatggaatacatatgtccccagtgtagccttgcgaaatacaaaccgccgttgcctgcaccatgaaatatgttgattaacttctgttactttcttaagggtgatggtttggatagaaattagtggctaaggatgtgtagtgttgacctgtactattgaatatgatcctgtacgatttgtacaatttttataaaatttctgatttccgaagggtgtctggtctgtttgtaagaccttagtttttaagaatctggtttatgaaaaaaaactagttaataatgtttagaaccacctcaatttttatagacttcttagtaagaaactgaaaatcccgttttataaactagagcataaact

SEQ ID NO: 3816 - DNA, 995 bp, Zea Mays
attttcttcgtcgcatccccgattccaaaaggctcagtggtgacatcagctgaggtccggtagtttgcctctgcagccatgcctcaaatccagaacaccatgcggcaaaactgcacactcctagctgttctttgtggggagtttgctgagaagcggcagacaccagcttccctggcgccagacacaaagcggctgcggctgtcataccctttccctgagctcgcttcgtctgggagactggaggtgcacacgctaatcaatcccactttggagcaatttagagaggcacagcaggcggtgcatcctgtcttcttgtatcttcaggggcagcagcaagagaatgaggaggagattggcacgcttgtctggggtgatacagatttatctgacccgcagatgtttgtctcactcatcaccccaccatttccgaccatggtttatttagaggttcccactggggaaaagcttgcccagtcacttcattcaaaggggataccatatgtggtatattggaggaatctattttcatcttatacagcatctcattttcgtcatgcgttaatgtcagtcattcagagttcctgcagccatacatgggatgcatttcaacttgcacatgcctccttccgactatactgtgtaagaaataatcatgtacaaagtgttaagcttggcccctgcctacttggggatgctccaaaaacaaatgtcatccctgctggggatgaagtgaatgaggaacaaggttgttctgaaggttttccagatataagaatatatgatgaagatgtgagcatgaaatttcttctctgtggagtaccatgcaccctggatgcatgtttgttgggggcactagaagatggtttgaatgcgctcttgaatatcgaggagctacgacaaggaagttagtaccagacatactgatttttacgcagcatagagttattacataattataaatcggaatattcatatatcaaaattattactaaaag

SEQ ID NO: 3817 - DNA, 2677 bp, Zea Mays
attttcttcgtcgcatccccgattccaaaagacaggaacgggggtgtaagccgatccgcgagaaaaatccaacctacaagacctacaaggccaagcgacatcccaatccgagcgtttcatcttgccctctgctctgtcccctcacaccttctcgccaggctcagtggtgacatcagctgaggtccggtagtttgcctctgcagccatgcctcaaatccagaacaccatgcggcaaaactgcacactcctagctgttctttgtggggagtttgctgagaagcggcagacaccagcttccctggcgccagacacaaagcggctgcggctgtcataccctttccctgagctcgcttcgtctgggagactggaggtgcacacgctaatcaatcccactttggagcaatttagagaggcacagcaggcggtgcatcctgtcttcttgtatcttcaggggcagcagcaagagaatgaggaggagattggcacgcttgtctggggtgatacagatttatctgacccgcagatgtttgtctcactcatcaccccaccatttccgaccatggtttatttagaggttcccactggggaaaagcttgcccagtcacttcattcaaagtttagtgttcctggttatagttcctgcagccatacatgggatgcatttcaacttgcacatgcctccttccgactatactgtgtaagaaataatcatgtacaaagtgttaagcttggcccctgcctacttggggatgctccaaaaacaaatgtcatccctgctggggatgaagtgaatgaggaacaaggttgttctgaaggttttccagatataagaatatatgatgaagatgtgagcatgaaatttcttctctgtggagtaccatgcaccctggatgcatgtttgttgggggcactagaagatggtttgaatgcgctcttgaatatcgagattcgtgcgagtaaacttcagaaccgagccagtgctcatccacctcttcaagctgaagatcttccacatggagttgttacaatgcgctgcgatatcacaacttgcagttctgcacatgtgtcgtttcttgtttcatgcagtgcccaaacttgttttgatgatcagcttctagggagccgtatcaagaatgaaattattgagaagaggcagttagttcgtgctctattgaataatgaggataacaagccatcttcatatgagcctttgccttccatgtgcgtggcttgcggagcttctacttttgaagtctggataaccatgccaaaatgggcagcacaggttttgaaacatcttgcgccagaaatctcctacagaagcttggttgcacttggaattgcttgggtaaatggtacaccagtgtcctcatttgataggcaggatgcagaccggcttcttttcttttgctctaaccagtgcggagatcaagctattcaaaatggctcatatgctcatgtatccagctggtcagcaccccttaccaaggatagaaccactggaagtctcgagtcaaaacagatgtcatttggtgcaaaaggagttgtaggggataatacgatctccctatcatcattgaaaccaaggctaaagcctgcaacaatgagaccccttcctcactctcgcaagcaacaaatgcatccctttatggggtttcctcagtccatcattcacgatgctagtcaagttaagcctagcttgccagcccctcctgtgaagcacaacgcagtacctgttaccgcagtgacaccgagaaaatcatcatctgggtcaccatcatcctggtcacgtgttcagctaccaatcccattgaatcctctgccaataaagaaacatgagtgcaatcggttgcctatccacagttgctctgaagaagacttcttgaaagatgtcatgcagtttctacttcagaggggccacatccgacttgtacctcagggaggactggcagaatttcctgacgcagtgttaaattcaaagcgtcttgatttatataacttatacaaagaggtggtataccgaggtggcttttatgtaggcaatggcataaattggaaaggtcaaatcttttcaaagatgcacaaccatacagttacaaacaaaatgacgggtgttgggaacaccctaaaaaggcattatgagacgtacttgcttgaatatgaacttgcacatgacgatattgatggggaatgttgcttgatttgccacagtggtgctctgggtgactgggtgaactgtggattatgtggagaatgggcccaccttggctgcgatagacggaaagggctgtctactttcaaggactactcgaaggcggatgggatggaatacatatgtccccagtgtagccttgcgaaatacaaaccgccgttgcctgcaccatgaaatatgttgattaacttctgttactttcttaagggtgatggtttggatagaaattagtggctaaggatgtgtagtgttgacctgtactattgaatatgatcctgtacgatttgtacaatttttataaaatttctgatttccgaagggtgtctggtctgtttgtaagaccttagtttttaagaatctggtttatgaaaaaaaactagttaataatgtttagaaccacctcaatttttatagacttcttagtaagaaactgaaaatcccgttttataaactagagcataaact

SEQ ID NO: 3818 - DNA, 1048 bp, Zea Mays
cttcgtcgcatccccgattccaaaagacaggaacgggggtgtaagccgatccgcgagaaaaatccaacctacaagacctacaaggccaagcgacatcccaatccgagcgtttcatcttgccctctgctctgtcccctcacaccttctcgccaggctcagtggtgacatcagctgaggtccggtagtttgcctctgcagccatgcctcaaatccagaacaccatgcggcaaaactgcacactcctagctgttctttgtggggagtttgctgagaagcggcagacaccagcttccctggcgccagacacaaagcggctgcggctgtcataccctttccctgagctcgcttcgtctgggagactggaggtgcacacgctaatcaatcccactttggagcaatttagagaggcacagcaggcggtgcatcctgtcttcttgtatcttcaggggcagcagcaagagaatgaggaggagattggcacgcttgtctggggtgatacagatttatctgacccgcagatgtttgtctcactcatcaccccaccatttccgaccatggtttatttagaggttcccactggggaaaagcttgcccagtcacttcattcaaagtttagtgttcctggttatagttcctgcagccatacatgggatgcatttcaacttgcacatgcctccttccgactatactgtgtaagaaataatcatgtacaaagtgttaagcttggcccctgcctacttggggatgctccaaaaacaaatgtcatccctgctggggatgaagtgaatgaggaacaaggttgttctgaaggttttccagatataagaatatatgatgaagatgtgagcatgaaatttcttctctgtggagtaccatgcaccctggatgcatgtttgttgggggcactagaagatggtttgaatgcgctcttgaatatcgaggagctacgacaaggaagttagtaccagacatactgatttttacgcagcatagagttattacataattataaatcggaatattcatatatcaaaattattactaaaag

SEQ ID NO: 3819 - DNA, 2729 bp, Zea Mays
gttattgttgtcgcggctagattagggttctgtcatcctccctctttgctcttcctactccccctaaatccaacctacctgcttccagtcgcgccgtcgccggcgtccttgcaccgccttaggcttcgatttgctcatctggctcagtggtgacatcagctgaggtccggtagtttgcctctgcagccatgcctcaaatccagaacaccatgcggcaaaactgcacactcctagctgttctttgtggggagtttgctgagaagcggcagacaccagcttccctggcgccagacacaaagcggctgcggctgtcataccctttccctgagctcgcttcgtctgggagactggaggtgcacacgctaatcaatcccactttggagcaatttagagaggcacagcaggcggtgcatcctgtcttcttgtatcttcaggggcagcagcaagagaatgaggaggagattggcacgcttgtctggggtgatacagatttatctgacccgcagatgtttgtctcactcatcaccccaccatttccgaccatggtttatttagaggttcccactggggaaaagcttgcccagtcacttcattcaaaggggataccatatgtggtatattggaggaatctattttcatcttatacagcatctcattttcgtcatgcgttaatgtcagtcattcagagttcctgcagccatacatgggatgcatttcaacttgcacatgcctccttccgactatactgtgtaagaaataatcatgtacaaagtgttaagcttggcccctgcctacttggggatgctccaaaaacaaatgtcatccctgctggggatgaagtgaatgaggaacaaggttgttctgaaggttttccagatataagaatatatgatgaagatgtgagcatgaaatttcttctctgtggagtaccatgcaccctggatgcatgtttgttgggggcactagaagatggtttgaatgcgctcttgaatatcgagattcgtgcgagtaaacttcagaaccgagccagtgctcatccacctcttcaagctgaagatcttccacatggagttgttacaatgcgctgcgatatcacaacttgcagttctgcacatgtgtcgtttcttgtttcatgcagtgcccaaacttgttttgatgatcagcttctagggagccgtatcaagaatgaaattattgagaagaggcagttagttcgtgctctattgaataatgaggataacaagccatcttcatatgagcctttgccttccatgtgcgtggcttgcggagcttctacttttgaagtctggataaccatgccaaaatgggcagcacaggttttgaaacatcttgcgccagaaatctcctacagaagcttggttgcacttggaattgcttgggtaaatggtacaccagtgtcctcatttgataggcaggatgcagaccggcttcttttcttttgctctaaccagtgcggagatcaagctattcaaaatggctcatatgctcatgtatccagctggtcagcaccccttaccaaggatagaaccactggaagtctcgagtcaaaacagatgtcatttggtgcaaaaggagttgtaggggataatacgatctccctatcatcattgaaaccaaggctaaagcctgcaacaatgagaccccttcctcactctcgcaagcaacaaatgcatccctttatggggtttcctcagtccatcattcacgatgctagtcaagttaagcctagcttgccagcccctcctgtgaagcacaacgcagtacctgttaccgcagtgacaccgagaaaatcatcatctgggtcaccatcatcctggtcacgtgttcagctaccaatcccattgaatcctctgccaataaagaaacatgagtgcaatcggttgcctatccacagttgctctgaagaagacttcttgaaagatgtcatgcagtttctacttcagaggggccacatccgacttgtacctcagggaggactggcagaatttcctgacgcagtgttaaattcaaagcgtcttgatttatataacttatacaaagaggtggtataccgaggtggcttttatgtaggcaatggcataaattggaaaggtcaaatcttttcaaagatgcacaaccatacagttacaaacaaaatgacgggtgttgggaacaccctaaaaaggcattatgagacgtacttgcttgaatatgaacttgcacatgacgatattgatggggaatgttgcttgatttgccacagtggtgctctgggtgactgggtgaactgtggattatgtggagaatgggcccaccttggctgcgatagacggaaagggctgtctactttcaaggactactcgaaggcggatgggatggaatacatatgtccccagtgtagccttgcgaaatacaaaccgccgttgcctgcaccatgaaatatgttgattaacttctgttactttcttaagggtgatggtttggatagaaattagtggctaaggatgtgtagtgttgacctgtactattgaatatgatcctgtacgatttgtacaatttttataaaatttctgatttccgaagggtgtctggtctgtttgtaagaccttagtttttaagaatctggtttatgaaaaaaaactagttaataatgtttagaaccacctcaatttttatagacttcttagtaagaaactgaaaatcccgttttataaactagagcataaact

SEQ ID NO: 3820 - DNA, 950 bp, Zea Mays
ttattgagaagaggcagttagttcgtgctctattgaataatgaggataacaagccatcttcatatgagcctttgccttccatgtgcgtggcttgcggagcttctacttttgaagtctggataaccatgccaaaatgggcagcacaggaagacttcttgaaagatgtcatgcagtttctacttcagaggggccacatccgacttgtacctcagggaggactggcagaatttcctgacgcagtgttaaattcaaagcgtcttgatttatataacttatacaaagaggtggtataccgaggtggcttttatgtaggcaatggcataaattggaaaggtcaaatcttttcaaagatgcacaaccatacagttacaaacaaaatgacgggtgttgggaacaccctaaaaaggcattatgagacgtacttgcttgaatatgaacttgcacatgacgatattgatggggaatgttgcttgatttgccacagtggtgctctgggtgactgggtgaactgtggattatgtggagaatgggcccaccttggctgcgatagacggaaagggctgtctactttcaaggactactcgaaggcggatgggatggaatacatatgtccccagtgtagccttgcgaaatacaaaccgccgttgcctgcaccatgaaatatgttgattaacttctgttactttcttaagggtgatggtttggatagaaattagtggctaaggatgtgtagtgttgacctgtactattgaatatgatcctgtacgatttgtacaatttttataaaatttctgatttccgaagggtgtctggtctgtttgtaagaccttagtttttaagaatctggtttatgaaaaaaaactagttaataatgtttagaaccacctcaatttttatagacttcttagtaagaaactgaaaatcccgttttataaactagagcataaact

SEQ ID NO: 3821 - DNA, 4939 bp, Zea Mays
cagggagctaacctagactgaagataccatgttagaataggaacccataccctaatcaggggttgggagtggtattaaatagagagagtaactgggccaaggcccattacacaggggtataacggtcattacacggggaatagcacaaaccctagacgggtagtctaacacttagaaaatagaaagacgcctgaagaaatagttgatgaacgtcaaaaggggacttttcagcccccaattcagtccagcacaaagaccaaggagcagcaacattatgtggatacgcaatgggcattgtggttttatgagtgtggaataccattcaatgcagcagcatcaagtcagtttcaagtggcaattgaagcaacagcgcagtttggttcaggttacaagcctcctccgccatatcagtttggggagccattgctcaaggatgtcgtacagcagacaagtaaaattaggaaggagcatgagaaggcatggaaacactatgcctgcacactcatgtcagatggatggtccgataggagggggcgacatctgattaacttccttgtgaacagcctagagggggcttatttcttggagtctgtcgacgcatcaagtgaggtacacgatgcatgtatgcttgctgatttgttggagcaaaaggttaatgagattggaacggacaaggttgtacaagttgtcaccgataatggagctaactacaaagcagcgggtaagcttctaatgaagaggattcctacagtgttttggagcccatgtgcagcacattgcttggatcttatgctagaagacataggagatttgaaggcatttaagaagccaattgcacgtgcaaggtgtgtcacaactttcatctatagacatggaagaattcttggtgcaatgagggagaagacaggtggggctgatcttgtgaaacctgcagcgactcgatttgccacaactttcctcactttgagaagtctgtacaagcatagggatgctttgaaatctctatttcttagtgaagcatggactaggaacagactagcacaaacaaaagctggtgaggaggtgcataacattgtgctatctaccaagttttgaaatgaggttgaagattgcctaagagcttcagccccatttcttattgttcttagggtagttgatggtgatgagaagcccgcaatgtcagaggttgcagcacttatgaatcatgcaaaagagaagatcaagcttagctttgcaatccaaaccaagaaaaccttgctcaagagtcaagaaaatcatagatattattgagaaacattgggtgaagcaaatggaccatcctttgtatgctagcatgttaagtattatgtttatttgttgtttacccattttttcagatccataccaaaaaaaaaagaaataggctgctcagctgctgcataagaggttgaatgatattgtctttgtttcctacaaccgaaagatgaagactaggtttcaaataaggcgtgagaagaaagggaaaagttttgaccctttggtcattgaagagtttaattgggacaatgagtgggctgactcatcacatgtacaccctcaaggtactcgtgggtgtgagtgtgtccagaatggtcttacatgggaagttattgatgaagctcttggtgcatcaagctcactctgaggccgcaatttttcaaggaatgctagcagagggtgtgcaagaaattcaaatctaagcttggttgaagagaatcaaatttaagcagtgaggaagaagatcgagatccacatgatgatgcttatgtgactgattgtgatgatgcttccattcccaatgatgctaatgatggtggtgaaaacatgcaagctgcaaacaaccatgatgagtttgaagatggatattgagatatttcagtttcaacagtgcctttattttgtgttgctttgttgtgcatgagtggttgtgtggaatctgtggactgcttatccttatggtggactgtttgcaatattgttaagtggctgtgtggatggcttatgccactagtatctaagtgtgtggactgctacaataatgaactaatgatgctattcatgctgtatttttttaaccagtcatgctcctatttctccatgtttctgcagcttggtgactgggagaataaaagagagcatatatcatcaagatgacaagatgtttgtgaaatgtttctgcaggactaggacaaggtacacttgatccatatttacatagcttctcaaatgtttcttacaatcatgattcattacaagatgtttgtatgttacaatctgctagagggatacattctacatggaagaagggaaattggaaggataagagctctaaaactgacatcaataaggtatgcttctgctgctcccttaaacgcctagtcgcctcaaagtgctggctcgccgcgcttcgccttacaggcttaataaccatgaatgggagtctcttcttaaaaagggtgttgactattaacaagtcaaaagctaccgcgaagtccaagacttcctcttcctcctgattcctactatcataccaaaacctccatgaaccacctcgaaaccttcagttgtcatacatacatgcccactgaggtctcctatgaaaagcttctcaccgataggtatagctctaaccatgccatctaagtcttcccagaaaagttgattagcacttgggcgtatgcactaattacattcaagaccaaatcaccgacgacaagcttaactaagataatcatatctccttgcctccctacatccaccacattgttcttgagattcttatcaatcaaaattcctactccatttatatttctaggtgtcccggtgtaccaaagattgaaaatgatattgtccatcttcgccttctaacccttccatttagtctcttagatgcataagaaatttacatgtcgcctaatcattgtcgcaactaactctcttaacttacctgtaagtgaccgtacattccaactacctaaacggatcctagttgggttcgaccgttcgactagcttccttacccttcgcacccttcggtgatgcaaagataggtactttgccattagggaaaaagataggagataagctaaaaggctgggaatcatgtttaatgaagttttccataagggaagaaggtaggagacaagctaaaaggttgagaatcatgtttaataaagttatgtgaaagatggggagtgatggggagcagaacaagataagtaagcaagccaatgattatgagagggctaaaggcaaatccttcacaaagcaaggagcaacaagagacagaaaaaaatcctagaaagttctgtattatttccttccttttttctcaagcaatgaactaatactggaattgtatgtttggaatgcaaattactgttctttggtgggtgcatatggtggcctgatatatgagctccaatgtttagcaaaaagaatcgtcagcctttgttgtgttgcacctggatgcaagcgtaattggagtgaattttctcatgtaagtactactgctaagtaaatggactttggtagcaatattccttgcatggtatgagacttttgcattgtattttgtgtaggtccataaaaaaatgagaaaccggttagagcaccaaatgttaaataagttggtatatgtcagctacaactggaagatgtgaacagatcttaaaaaaatagagagctgggtcccaaaggaaagaaatgcaatcactctttcttgaagaatttcattaggaaaatgaatgggttgatgaaaattgtgaaccagttcaagaacgtggtggcaatgctatgacttgggctcttgtggatgatgctattggtgtaactcaggatctagagggacgtaacttgcctagggctgctgttgctgcccctgtgaggcatacttatgctaggaacaggaagcgtccaaggaagacagtgactcaagatattgatgaagatgacgatgaagaccaagatcagcatggagaatctgattcagcaacagcaacggaggatgaagaagaatctattcatactgctgatggatctgcagttctgcaccaacaagatctagagatggacatggaggcttccgtttgaatgatgatttgcttaattagatggctagttgcctacttgtgttggactattgcatgtcaatgttggtgttgaacacttgaatttatctaagtagataatgtagtattgaactagtttggttatgtaaattgctggttgtgtggctgctacggtctgctagttgctaattattttctaatacagtagtgatgctattgagttgctccacttataattataagttagtcaagatcaagactacattagtgttgctaattatggtcttctttggtattacagcagcaagtcagcaaagaaatggagtttgggacaggaatatggagttttaggcagtggagaaaacagctctcacaagtcaccagctaaacactaatgtagtcttgatgcttgacttattgttgtgtatattatatactatatataggtatatatgtagtaggtatatgtcctgatatataggacaactatatggatgagtaggattgactaatcggcctggtcgacgactaatcgcgatgaatcacccggtcagtcccatggcgactaggttcgactatacgatgtgtaaacactggcaggtatgctgaataacagcagtcactaaagagtcatcaacatgtcacaaactgaaactggagtcccacttttatggcagttatgctgaataacagcggtcactaaagagtcatcaacgtgtcacaaactgaaattggaatgccaacttttattacgagtacagaaaggttggaccaggaagtgaactcacaatcatatcaggtagaggcattttaattttcgtaagcattatctcacaattgtttgctcgtcg

SEQ ID NO: 3822 - DNA, 1938 bp, Zea Mays
gctgagttgaaggattactcacattctctcgtgggtttgtgcagcagcagggtagaaagaggcctcgcgtcccccacccacctcttcctccaacctccaggagagggaacgacaggtccgtcatcgcgggccacacgaacgagtcctcgtcgtccagcacgaaggagtagagatagagatgattcagacaaaaaatcattattttcgacatagaaataacattagtagatttgtaatgtcaaacatttctagatgactacattctcgttagggtttaacaacaaatgcttagagaaagtagaaactgaagatatgctttaaagaccatgtcaatttccaaagcatcaaatgaaaaaagagtagaggtagtaatttcaaaagaatgactaataagggcataaattaaacaaaacacatatattaactttggataaccccacagagagctctgcatcatctccgaataaaagcgctcgagtttactcgttgtaaactctgcatcctttttcttttccctgtttctttgagtctggatttcttagtattcctgtctcccttcccactaaaccttacattcttcagtaaactatgtacactatatattgttgattgaattttggagatagattgtgtggatgtgtttgacatgattaattttatgtgccagtgcattttgtagcctccgtgtactataacagatatgttatagataatattgaacaacattgaaacatgaaaatattcactgttaaaaatggacctaagaagacaagtgcacttacttttgaattacatcttttttcttccatagcttttcactttcagcatctgcatttaagactccttggacaacaacagttgcacaatcaactggagtttcgacactgatctgaatacgttccaaataacggatcagggcttttgctcatgacctttttaactcaagtggattttaatttttctatcataagtaggtaccatataaatactaacagccaaaaaagacatgaagaaaatgtcattcgggaagaacaagtgggtaataatagctatttgagatcacaaaactctatttaggtttcatcataaattccagtccataaaggataaactgattgtagatgatgtattgtgtatgtgctgagataaaactgcagctcatgcacgaacaatgtgatcattataagtagccgaagaattgtcatttgtcaccaccaagatattcatgatttgctaattaaagacaaacctcaaaacatatacttaagcgattatttgcaacaattacagaccattctttcctccagacagacccattttctcaaccaaaacttggaagtagtaaggaaaaaaagaagttagcgaacataatgccatgtttccatagaactatcctgtcctgattagcattgggccaacacatgtgagaacagtagtttcagtttgtcagttgtattgttcctaggaggttgtttgcagcctgatgatcaactatatttgtaactggtgaatgagttactttcaactggctaattgataagtattcagatattgtaaaaatagtagaatgtgaataacatgtataagttttagcaatattcacctttagagctgcctttgtcggcattccagtggcaacatactgatgtgaagaatgtgccacattcacatcatggaacacaactgcgaccttggcaatcatctcaaggttaccgagtggccatggttagaaataccatcacttagaaaataaggattttctgttgttcttgtaacaatatagttgactaaacactaataaaattccattatctaaagtttctttttcattttacaatatactatcgcatcacctgttcgaaatgacagtgcagtcacagcaccacgaatctggtggttgaaagacatcaattcttcatccaggacaggagaagagac

SEQ ID NO: 3823 - DNA, 3045 bp, Zea Mays
gccagggggacctggagagatctgaattcccagcacactcctgcccgctcctccccgccgatggagatccccaccgctgtcatccaccgcctccagtccgctctccgtgaggccaccttcgccccttctgtagaagatgcacccgcccctcccttcccctccgtcgccgatgccgtcgcagccttcgactcgtgtgccgcctccgtgtcggcggagctccgatgcgtgcgctgcggggcctcgggagggctcctgcgcggtgtgcggtctgccctctgcacctactgcgggtgccccaggcgcggggaggaggctgaaggcggtggaagcggcggcgtcgccttccgtgacggcgtggcctaccagtggctgctcggctcgcttggactcgacggatccgagattgtagaattcgatactgacactacagcttcgaataaaagcaaggatgtaccaccaccaaacagtgggatgatcatatctgatctactggacttaaaaatcacatgcctccctgaaaataaggaaacatctccaagttccataacaaaggagcaatcatcttctgtggatacactaaatttatctgctgctaacttagattcatttttcattgaaagaaaagaagagatgacttctgcttctcttccacaaactcattttttggagcaggaaaataaaagaacagatagcaaaagccatgaatctagattggaagtgcatgctgcacctaaaagcttaattagttctcaaagaacaaatcagattgaagctactccagcatttgcaagttgggatgctgattttcagtctgctagttcagaaaatgctgccaaaaactccaagcaacctgatctatttaagagcacttctgtggccgagtcttttagtttcccagcttcagagattgccatcaaacctgtagtaagtactgaaagtaaaacaaatacgagaagtgccatcctagaacatcactcagaagttttggcttcagcaagtagcacattatttggtgatgacctttctgatcaaaaggttgtccaccatatctttgagagcagcaacgctcctgggttcactgaatcctctctccccatggattttgctaaaagtgatcagttacatggaagggacgatgatggattcaatgatgatgaagcttttgatgaatggcaagaatttacaacaagtggcaatcaaggcagcctatcaaatgcggaacatattgaggaacctttaaagagagatttgtctgagaatgatgtaatagatcccttgcgagtaggcagcaaggaatcacccaacaatgttattgaaaaatcctctaatgaatggcaaggttttgcttctgtgtctggtcaaggaagagattttgtgacatctgtggaacgatcaacaagtgaccacagactaaatttggtgggaccagttggagatgaagagacaatgagcagcatctcacaccaacattcttcagaaattaatcctgttgatgtatggcatgtgggcaatgtgaaggctcaaaatactgcagaaatggttaaggaaaaaaatgattcttttgacgattggcaagattctactaccaccggtcaagtccaggacacttcgttgaatcaaactggggacatgatggaggtctcaaaagccagtcacaaagaaacagacatggactcatggttcattggacattctagggagccagcaaatacgggtaccatgaatgcaaataacatgttggacgattggcaaggtttcactggttcagatcaagcacagcaaaattcatctagcactggtgcagaaatgataagtgtgccatttgagcagcatggtggaactgtttctgccccatcatgggcaaatggcagcagtaatgatgccgcaaaaacatcctcaacaagtatagaaagcgacccatttgatgtttggcaaaattttactaaatcaggtcacctgcaagaaaatatgtctagtcttgggagagaaccgagtagtctgtcgcctgaaccagctaaaggaaatgattccttggatttgtggattaccagcaacttcaaggaatctaaaagcaatgatgttgggagaactaatgcctcatctgatggatggcaggattttgccagttttgatcaagctcagagaattactaaagttcatgtggaaggacatgttgtaaaagatccttcaggggctgaaactttggacttatgggcctcaagtcatgttaatgaaaagaaccttgaacagataagtgaacataatgatctattcgatgactggcaggatttccaaaactccaatccacagcaaacaaccttacaagtttcttcagatgcttcattatttgatataaccttggcatcaaggcctgatgcttttggagagcaggaaattgggagtgttttgcaggtagcttcatccgaaaactcaaaggataaaaaggagggttctaatgaatcaaaagcatttccatctgatgaccacttgaaaagcacaagtggaatgcagcagatgggtgatgttgattcgctgtcttcattatggccagctaataaaccagagcctgcaaatacaaatgtggaacagttgcttgctcagatgcacgatctgtcctttatgctcaaggatgaactttctgtccctgataaacccatcgatcattcaaaaccctgaagtgacaacatcaaaaattgtgctctgttactatcagccaaggaagattgttgttgcaagtccaaccttttgggtgctggacgaattgcaacgaatatcccttgagtggaaaatgcaagtcaagtcacagaaaaccctgttgttccaacagtgccttttatcagagtattggtcagcagaggattgtatttgttttctctgttgcttcgttgcattgatcgtcagagactcagagtcgggttggttccttgactgtccctgagtgaggctgaaaaccacgttttatgtctgcctcttacatatgatgttggcttccagtaattctatagtactacatcattgacctccttgcctgagtaactcctcaac

SEQ ID NO: 3824 - DNA, 2885 bp, Zea Mays
ctcaatgggaccgcgaggacctcgctttgcctcgctggagctgacggtgtggcagagtacacacagagagacagaggggagattgtagaattcgatactgacactacagcttcgaataaaagcaaggatgtaccaccaccaaacagtgggatgatcatatctgatctactggacttaaaaatcacatgcctccctgaaaataaggaaacatctccaagttccataacaaaggagcaatcatcttctgtggatacactaaatttatctgctgctaacttagattcatttttcattgaaagaaaagaagagatgacttctgcttctcttccacaaactcattttttggagcaggaaaataaaagaacagatagcaaaagccatgaatctagattggaagtgcatgctgcacctaaaagcttaattagttctcaaagaacaaatcagattgaagctactccagcatttgcaagttgggatgctgattttcagtctgctagttcagaaaatgctgccaaaaactccaagcaacctgatctatttaagagcacttctgtggccgagtcttttagtttcccagcttcagagattgccatcaaacctgtagtaagtactgaaagtaaaacaaatacgagaagtgccatcctagaacatcactcagaagttttggcttcagcaagtagcacattatttggtgatgacctttctgatcaaaaggttgtccaccatatctttgagagcagcaacgctcctgggttcactgaatcctctctccccatggattttgctaaaagtgatcagttacatggaagggacgatgatggattcaatgatgatgaagcttttgatgaatggcaagaatttacaacaagtggcaatcaaggcagcctatcaaatgcggaacatattgaggaacctttaaagagagatttgtctgagaatgatgtaatagatcccttgcgagtaggcagcaaggaatcacccaacaatgttattgaaaaatcctctaatgaatggcaaggttttgcttctgtgtctggtcaaggaagagattttgtgacatctgtggaacgatcaacaagtgaccacagactaaatttggtgggaccagttggagatgaagagacaatgagcagcatctcacaccaacattcttcagaaattaatcctgttgatgtatggcatgtgggcaatgtgaaggctcaaaatactgcagaaatggttaaggaaaaaaatgattcttttgacgattggcaagattctactaccaccggtcaagtccaggacacttcgttgaatcaaactggggacatgatggaggtctcaaaagccagtcacaaagaaacagacatggactcatggttcattggacattctagggagccagcaaatacgggtaccatgaatgcaaataacatgttggacgattggcaaggtttcactggttcagatcaagcacagcaaaattcatctagcactggtgcagaaatgataagtgtgccatttgagcagcatggtggaactgtttctgccccatcatgggcaaatggcagcagtaatgatgccgcaaaaacatcctcaacaagtatagaaagcgacccatttgatgtttggcaaaattttactaaatcaggtcacctgcaagaaaatatgtctagtcttgggagagaaccgagtagtctgtcgcctgaaccagctaaaggaaatgattccttggatttgtggattaccagcaacttcaaggaatctaaaagcaatgatgttgggagaactaatgcctcatctgatggatggcaggattttgccagttttgatcaagctcagagaattactaaagttcatgtggaaggacatgttgtaaaagatccttcaggggctgaaactttggacttatgggcctcaagtcatgttaatgaaaagaaccttgaacagataagtgaacataatgatctattcgatgactggcaggatttccaaaactccaatccacagcaaacaaccttacaagtttcttcagatgcttcattatttgatataaccttggcatcaaggcctgatgcttttggagagcaggaaattgggagtgttttgcaggtagcttcatccgaaaactcaaaggataaaaaggagggttctaatgaatcaaaagcatttccatctgatgaccacttgaaaagcacaagtggaatgcagcagatgggtgatgttgattcgctgtcttcattatggccagctaataaaccagagcctgcaaatacaaatgtggaacagttgcttgctcagatgcacgatctgtcctttatgctcaaggatgaactttctgtccctgataaacccatcgatcattcaaaaccctgaagtgacaacatcaaaaattgtgctctgttactatcagccaaggaagattgttgttgcaagtccaaccttttgggtgctggacgaattgcaacgaatatcccttgagtggaaaatgcaagtcaagtcacagaaaaccctgttgttccaacagtgccttttatcagagtattggtcagcagaggattgtatttgttttctctgttgcttcgttgcattgatcgtcagagactcagagtcgggttggttccttgactgtccctgagtgaggctgaaaaccacgttttatgtctgcctcttacatgtatgtaccattttgcggtctgtattttgtagagtcgaactgagctcaccaatcaatgaattccatttcatcagattatttaagctatataatataagttcgtccttggtactaggctgccttgtttgtaacatcttattacaatgtcttgtttgcagcagatgatgttggcttccagtaattctatagtactacatcattgacctccttgcctgagtaactcctcaac

SEQ ID NO: 3825 - DNA, 1876 bp, Zea Mays
ttgcttacgcgctttacagcccataaacggaacatgacattttcacttgcttctattttttcatctcgtcaccctagtagaatcattgtcatcttcgttgccctgctagtcccgtagcttctctccctcctcgctcctcggctcctcgcttgtcgctcctcctcagccctcaccgcgttccccgagcacctcgtcatcatggtcaatggcctcgtcgggagcgcggacgattggaagttcgcggcagagcagtttgtgaggcggatgccggacaaggtgatcgtgcaccgaagtcagtgcaactctgccactcagacatttgatggtgttgatttaatgggtgaaaggttctatcagttgtagagcaaagacgaggtgtgaagaaaatctcgtttgtggcacattctcttggtggccttgttgccagatatgctataggaaggctctatgaacctaatagtagaaggaaatcttctgggggggagagcagagatgatgttgtgcacttgaatggtcacattgctggtttagaacctatgaatttcataacatttgcatcaccacatttgggttcaagtggaaacaaacagattcttccaccagctaccttttttatgtggccttcctttccttgagcgaagagcttcagaagctgcgcatttgattgttgggagaactggaaagcatttattccttacagacaatgatgatggtagacgcccacttctccttcgaatggttgatgactctgatgatttacagttcagatcggcgttgcgttctttcaaacggcgcgtagcatatgctaatgctaattttgaccatatggttggatggagaacatcatcaatccgacgtcagcatgagttgccaaaacatcgtcttcttgttcgtgatgaaaagtatccacatattgtttatgttgaaaaggaagttacagacaacaatgaaacgaaggcccatgctgatcattatgatccagaagaggagatgataagaggccttacgcaagttccgtgggaacgtgttgatgtgagcttccagaaaagcacccaaagattagttgcgcataacacaattcaggtgaaaagctattggctaaactcggatggagcagacgtgatcaaccacatgatggacaatttcatcgtctagtccatggaggcatgaagcctacgttgtgtcgatggaggttgcagtttcccatcccaggaaatgtggttgattctttaggcccgtttgctgcaggcgcagagcagagccccgccctcgatgcttatcatcctgcaccatcagcaaggctagttcgttcaactgtatcataatctgtcccctcctttgtatacttgtattccgcaactaagctagtaaatagatgttgctggaaatagaattcttctatctggttcaattggagttgaagttcgaactgaaacttgccatattcttgtgatccatcgacgtgcttattgggcacggtacggtacttcaatcaagctgtttttttaggaacttgaagtttttttttttgggaattgtatggataacaggatcgctcttcagagagctcctgtcgttcttaaagagaagctatattctatgttgaaagtaattcttgcgattttttttttgtttttgaaaatgtattcttgcgatttcaatagactctaggtataacgtgattgtggcgtgtggcgtggagcgaatgaggagcgttttttcagctcgtagtcttctaattcatttcaagcaatcattgataggataagtacagaatcatttctcagaaaataactacttgttagagcagcttctggattagtatagaagctgttctaagagctataccaaataaataggcacgaggcttctcgca

SEQ ID NO: 3826 - DNA, 1781 bp, Zea Mays
tattttttcatctcgtcaccctagtagaatcattgtcatcttcgttgccctgctagtcccgtagcttctctccctcctcgctcctcggctcctcgcttgtcgctcctcctcagccctcaccgcgttccccgagcacctcgtcatcatggtcaatggcctcgtcgggagcgcggacgattggaagttcgcggcagagcagtttgtgaggcggatgccggacaaggtgatcgtgcaccgaagtcagtgcaactctgccactcagacatttgatggtgttgatttaatgggtgaaaggttctatcagttgtagagcaaagacgaggtgtgaagaaaatctcgtttgtggcacattctcttggtggccttgttgccagatatgctataggaaggctctatgaacctaatagtagaaggaaatcttctgggggggagagcagagatgatgttgtgcacttgaatggtcacattgctggtttagaacctatgaatttcataacatttgcatcaccacatttgggttcaagtggaaacaaacagattcttccaccagctaccttttttatgtggccttcctttccttgagcgaagagcttcagaagctgcgcatttgattgttgggagaactggaaagcatttattccttacagacaatgatgatggtagacgcccacttctccttcgaatggttgatgactctgatgatttacagttcagatcggcgttgcgttctttcaaacggcgcgtagcatatgctaatgctaattttgaccatatggttggatggagaacatcatcaatccgacgtcagcatgagttgccaaaacatcgtcttcttgttcgtgatgaaaagtatccacatattgtttatgttgaaaaggaagttacagacaacaatgaaacgaaggcccatgctgatcattatgatccagaagaggagatgataagaggccttacgcaagttccgtgggaacgtgttgatgtgagcttccagaaaagcacccaaagattagttgcgcataacacaattcaggtgaaaagctattggctaaactcggatggagcagacgtgatcaaccacatgatggacaatttcatcgtctagtccatggaggcatgaagcctacgttgtgtcgatggaggttcagtctacgctgcgcagagcagagccccgccctcgatgcttatcatcctgcaccatcagcaaggctagttcgttcaactgtatcataatctgtcccctcctttgtatacttgtattccgcaactaagctagtaaatagatgttgctggaaatagaattcttctatctggttcaattggagttgaagttcgaactgaaacttgccatattcttgtgatccatcgacgtgcttattgggcacggtacggtacttcaatcaagctgtttttttaggaacttgaagtttttttttttgggaattgtatggataacaggatcgctcttcagagagctcctgtcgttcttaaagagaagctatattctatgttgaaagtaattcttgcgattttttttttgtttttgaaaatgtattcttgcgatttcaatagactctaggtataacgtgattgtggcgtgtggcgtggagcgaatgaggagcgttttttcagctcgtagtcttctaattcatttcaagcaatcattgataggataagtacagaatcatttctcagaaaataactacttgttagagcagcttctggattagtatagaagctgttctaagagctataccaaataaataggcacgaggcttctcgca

SEQ ID NO: 3827 - DNA, 1836 bp, Zea Mays
tattttttcatctcgtcaccctagtagaatcattgtcatcttcgttgccctgctagtcccgtagcttctctccctcctcgctcctcggctcctcgcttgtcgctcctcctcagccctcaccgcgttccccgagcacctcgtcatcatggtcaatggcctcgtcgggagcgcggacgattggaagttcgcggcagagcagtttgtgaggcggatgccggacaaggtgatcgtgcaccgaagtcagtgcaactctgccactcagacatttgatggtgttgatttaatgggtgaaaggttagcaaatgaggttctatcagttgtagagcaaagacgaggtgtgaagaaaatctcgtttgtggcacattctcttggtggccttgttgccagatatgctataggaaggctctatgaacctaatagtagaaggaaatcttctgggggggagagcagagatgatgttgtgcacttgaatggtcacattgctggtttagaacctatgaatttcataacatttgcatcaccacatttgggttcaagtggaaacaaacagattcttccaccagctaccttttttatgtggccttcctttccttgagcgaagagcttcagaagctgcgcatttgattgttgggagaactggaaagcatttattccttacagacaatgatgatggtagacgcccacttctccttcgaatggttgatgactctgatgatttacagttcagatcggcgttgcgttctttcaaacggcgcgtagcatatgctaatgctaattttgaccatatggttggatggagaacatcatcaatccgacgtcagcatgagttgccaaaacatcgtcttcttgttcgtgatgaaaagtatccacatattgtttatgttgaaaaggaagttacagacaacaatgaaacgaaggcccatgctgatcattatgatccagaagaggagatgataagaggccttacgcaagttccgtgggaacgtgttgatgtgagcttccagaaaagcacccaaagattagttgcgcataacacaattcaggtgaaaagctattggctaaactcggatggagcagacgtgatcaaccacatgatggacaatttcatcgtctagtccatggaggcatgaagcctacgttgtgtcgatggaggttgcagtttcccatcccaggaaatgtggttgattctttaggcccgtttgctgcaggcgcagagcagagccccgccctcgatgcttatcatcctgcaccatcagcaaggctagttcgttcaactgtatcataatctgtcccctcctttgtatacttgtattccgcaactaagctagtaaatagatgttgctggaaatagaattcttctatctggttcaattggagttgaagttcgaactgaaacttgccatattcttgtgatccatcgacgtgcttattgggcacggtacggtacttcaatcaagctgtttttttaggaacttgaagtttttttttttgggaattgtatggataacaggatcgctcttcagagagctcctgtcgttcttaaagagaagctatattctatgttgaaagtaattcttgcgattttttttttgtttttgaaaatgtattcttgcgatttcaatagactctaggtataacgtgattgtggcgtgtggcgtggagcgaatgaggagcgttttttcagctcgtagtcttctaattcatttcaagcaatcattgataggataagtacagaatcatttctcagaaaataactacttgttagagcagcttctggattagtatagaagctgttctaagagctataccaaataaataggcacgaggcttctcgca

SEQ ID NO: 3828 - DNA, 1020 bp, Zea Mays
gcagattaaaggcagctgccatcatccgctgcttgcacagtactttactgagaggatagcagccgcaaccacagctgctggaagtcagtgcaactctgccactcagacatttgatggtgttgatttaatgggtgaaaggttagcaaatgaggttctatcagttgtagagcaaagacgaggtgtgaagaaaatctcgtttgtggcacattctcttggtggccttgttgccagatatgctataggaaggctctatgaacctaatagtagaaggaaatcttctgggggggagagcagagatgatgttgtgcacttgaatggtcacattgctggtttagaacctatgaatttcataacatttgcatcaccacatttgggttcaagtggaaacaaacagctaccttttttatgtggccttcctttccttgagcgaagagcttcagaagctgcgcatttgattgttgggagaactggaaagcatttattccttacagacaatgatgatggtagacgcccacttctccttcgaatggttgatgactctgatgatttacagttcagatcggcgttgcgttctttcaaacggcgcgtagcatatgctaatgctaattttgaccgtatcctttaacagcttcatccttgtctgtgtactaattattaatgctgagttacacttcttacctctgacgtgtttccagttaactaagcaaacagatatggttggatggagaacatcatcaatccgacgtcagcatgagttgccaaaacatcgtcttcttgttcgtgatgaaaagtatccacatattgtttatgttgaaaaggaagttacagacaacaatgaaacgaaggcccatgctgatcattatgatccagaagaggagatgataagaggccttacgcaagttccgtgggaacgtgttgatgtgagcttccagaaaagcacccaaagattagttgcgcataacacaattcagattcagagtgttgcacctgtcccgagggccaccacattgaagacctcga

SEQ ID NO: 3829 - DNA, 1837 bp, Zea Mays
aaggcagctgccatcatccgctgcttgcacagtactttactgagaggatagcagccgcaaccacagctgctggaagtcagtgcaactctgccactcagacatttgatggtgttgatttaatgggtgaaaggttagcaaatgagttgtagagcaaagacgaggtgtgaagaaaatctcgtttgtggcacattctcttggtggccttgttgccagatatgctataggaaggctctatgaacctaatagtagaaggaaatcttctgggggggagagcagagatgatgttgtgcacttgaatggtcacattgctggtttagaacctatgaatttcataacatttgcatcaccacatttgggttcaagtggaaacaaacagctaccttttttatgtggccttcctttccttgagcgaagagcttcagaagctgcgcatttgattgttgggagaactggaaagcatttattccttacagacaatgatgatggtagacgcccacttctccttcgaatggttgatgactctgatgatttacagttcagatcggcgttgcgttctttcaaacggcgcgtagcatatgctaatgctaattttgaccgtatcctttaacagcttcatccttgtctgtgtactaattattaatgctgagttacacttcttacctctgacgtgtttccagttaactaagcaaacagatatggttggatggagaacatcatcaatccgacgtcagcatgagttgccaaaacatcgtcttcttgttcgtgatgaaaagtatccacatattgtttatgttgaaaaggaagttacagacaacaatgaaacgaaggcccatgctgatcattatgatccagaagaggagatgataagaggccttacgcaagttccgtgggaacgtgttgatgtgagcttccagaaaagcacccaaagattagttgcgcataacacaattcaggtgaaaagctattggctaaactcggatggagcagacgtgatcaaccacatgatggacaatttcatcgtctagtccatggaggcatgaagcctacgttgtgtcgatggaggttcagtctacgctgtgggtttgacgaatgtccgtcgaaatttgttgatcagtgaccattcaattttgcctcggccaatttttccttctaggttgcagtttcccatcccaggaaatgtggttgattctttaggcccgtttgctgcaggcgcagagcagagccccgccctcgatgcttatcatcctgcaccatcagcaaggctagttcgttcaactgtatcataatctgtcccctcctttgtatacttgtattccgcaactaagctagtaaatagatgttgctggaaatagaattcttctatctggttcaattggagttgaagttcgaactgaaacttgccatattcttgtgatccatcgacgtgcttattgggcacggtacggtacttcaatcaagctgtttttttaggaacttgaagtttttttttttgggaattgtatggataacaggatcgctcttcagagagctcctgtcgttcttaaagagaagctatattctatgttgaaagtaattcttgcgattttttttttgtttttgaaaatgtattcttgcgatttcaatagactctaggtataacgtgattgtggcgtgtggcgtggagcgaatgaggagcgttttttcagctcgtagtcttctaattcatttcaagcaatcattgataggataagtacagaatcatttctcagaaaataactacttgttagagcagcttctggattagtatagaagctgttctaagagctataccaaataaataggcacgaggcttctcgca

SEQ ID NO: 3830 - DNA, 1612 bp, Zea Mays
ctgcttgcacagtactttactgagaggatagcagccgcaaccacagctgctggaagtcagtgcaactctgccactcagacatttgatggtgttgatttaatgggtgaaaggttagcaaatgaggttctatcagttgtagagcaaagacgaggtgtgaagaaaatctcgtttgtggcacattctcttggtggccttgttgccagatatgctataggaaggctctatgaacctaatagtagaaggaaatcttctgggggggagagcagagatgatgttgtgcacttgaatggtcacattgctggtttagaacctatgaatttcataacatttgcatcaccacatttgggttcaagtggaaacaaacagctaccttttttatgtggccttcctttccttgagcgaagagcttcagaagctgcgcatttgattgttgggagaactggaaagcatttattccttacagacaatgatgatggtagacgcccacttctccttcgaatggttgatgactctgatgatttacagttcagatcggcgttgcgttctttcaaacggcgcgtagcatatgctaatgctaattttgaccatatggttggatggagaacatcatcaatccgacgtcagcatgagttgccaaaacatcgtcttcttgttcgtgatgaaaagtatccacatattgtttatgttgaaaaggaagttacagacaacaatgaaacgaaggcccatgctgatcattatgatccagaagaggagatgataagaggccttacgcaagttccgtgggaacgtgttgatgtgagcttccagaaaagcacccaaagattagttgcgcataacacaattcaggtgaaaagctattggctaaactcggatggagcagacgtgatcaaccacatgatggacaatttcatcgtctagtccatggaggcatgaagcctacgttgtgtcgatggaggttcagtctacgctgtgggtttgacgaatgcgcagagcagagccccgccctcgatgcttatcatcctgcaccatcagcaaggctagttcgttcaactgtatcataatctgtcccctcctttgtatacttgtattccgcaactaagctagtaaatagatgttgctggaaatagaattcttctatctggttcaattggagttgaagttcgaactgaaacttgccatattcttgtgatccatcgacgtgcttattgggcacggtacggtacttcaatcaagctgtttttttaggaacttgaagtttttttttttgggaattgtatggataacaggatcgctcttcagagagctcctgtcgttcttaaagagaagctatattctatgttgaaagtaattcttgcgattttttttttgtttttgaaaatgtattcttgcgatttcaatagactctaggtataacgtgattgtggcgtgtggcgtggagcgaatgaggagcgttttttcagctcgtagtcttctaattcatttcaagcaatcattgataggataagtacagaatcatttctcagaaaataactacttgttagagcagcttctggattagtatagaagctgttctaagagctataccaaataaataggcacgaggcttctcgca

SEQ ID NO: 3831 - DNA, 2375 bp, Zea Mays
caaaaatctcgcaccttcccggaccgccatggcggcatccgaggcttcgagcccgtcggcccctatcaaaatctccgatacctgtttcagaaaaagaaacccaaaaggccaaaaccccgtgcccggacctgtcatcgttctctcccccagcctattgcctcgtttccatggcggccaccgcctccaacccgttcccgttcccctcccgtcgctcgccggaagatagcctcttctacgccgtctacccgatactactccccagccaccttcccgcgcccgcactccacgcctcgctccagtccctccacctctccctcctctcgcacctcgcccccttcctatcctcccatctcttccaccgggatcccttcacgctcaccctcccggcggacccggccgccccctgcgcgctttgcgcctcgccgcccgtgccccacctccacggcgcgctccgtttcggcgactccctccccgacgaatggatcgccgtttccctcctcttcgcgctcacccgcgccttccccgacatcgcggcccgcgcctgggactccgacggggagttcctcctcatcgaggccgccttcgcgctcccacggtggctcgacccggaatccgcccccaatcgcgtcttcatcttccgcggggagctccacatcctgccgccctccctcttccccgagacgccgtccctggaagccgcccttgccgccatctacgacgattccatcgacacccgcgctgccgacgccatccaggcagccatacagcgccgtatcgctgggctgcccgagaaggcggcggagaacctacacacagcacgcgttatcgtcccggcgcccgtggcaaaggtgctcaaggaggagccatgcctgatcgcgcgtgccatcgagggtttctacgaccgggacattgacaccatgaaacatgcggcgaggatggaaaaattcctcaaagggcctggtggggaagggattgagatagtgagaaccacagtacgcatgacgcgggcaatgtacgcacagcttgtgcagcagaactttcaggctcccagggggtacccgatgcctaggagggaggaggggccagagaaatggatggaggcagagctggggatgaagattgcctgtgggttcgagatgatgtatcaggagaggaaacggcagggcgaggaaggtaaatgtagcacgtgggatgtttacaggaagagtttggaggcaactgggtgcttggacgggctgtatcctgggtcaattgagtataagagggtcattgaagatgcaatgcaatattacaagagctctaatttgtattcccgaacaagggagatactgagtgaaccagtgcggcgaattgatgaaatcctatcaatgctgtactcaactgatgaatttaaaggcactgatcttcctcctagtgataatgactcttggttgtatggtggggatgatgagttaaatgcggaactctgtgaaaggcagaaagaactggaagagcatgaagctgcgaagaagcaaagaagtcaaaagcaaagtgtccctagcagttcaaaatcccagacagacaagtttaagcttggagagattacagagtccatgcaagaattcattcgcaaaatgtccagctttgagggagccgagattcctgcagacaggagagatactgaatcagtggacctagatgtcaaccagttcttcaaggccataaaatcagttttaggtggaggttcacaagagcaagctgacagtgatgatggatttgatagaaaatcctcattgtcggacatggactttgatgattctgatgaagacgacgattttgctgaagaattaggtgacaaggatgcagatgattcttttatggaatcatattcagatgctttaaataaagagctaagcagtaccactcttgagaaaagctttgctcatgcaccacgaccggaaactaacaatgagatgatgcagctactggtgcagagatgactccagttgatgtagatctgaaccttgtcgagagtattctgaactcgtactcctcgcaacaaggtcttcccggtccggcttccagtctgctaggactcatgggcataaaggtccctccagatgtcaaaaagatgtgatttttgtattctagtgtacacgtgacatcttgtgaagctgggatatataggaaaaacttatcttccgttccatacctgggcggtatttgttgtgatagtacagggttgttttcttgcttttaagcaattacatttaggtcggaatattttggggtccatatgttaggtttggttggcaattaaatttaggcaggaatattttggcctacctatgttatagggttagagcaactcaacaataactaaaaagccttctccc

SEQ ID NO: 3832 - DNA, 868 bp, Zea Mays
cttgtacctgctctacaatgttagtgggtaacaaattatgtcagttaatctttgtcaactaaccaatcaggaggtacaagagaggaagttggtgtcccggaggccgtaacagctccgcagaataaaattcagaaatcctactgccagtacgcgctgctgctggattgcaatcccggtttcccttccctcgacttggacaacgaccggctgccgctgctggcagaggctggccgcgcatccgtcagctccttcacgacggcagtcatggagggcctttggctcacctccctggccgcgcaccggagcgccaccgacaggaccttacgcacctcctccatctccaccgtgccgaagacttcctccatgagggccgggtcacagacggcctcgattttgtcggtgccgtccagcacggacgacacccagccgactatgtccgcgctgtcggggaacaaaggatccaccgccgtcctcctggtcaacagctccagtagcaccacaccgtagctgtacacgtcagactccatgctgctcttggtggaaaacgccaattctgcaagacagcgcatgcaatggcggcagtcatcatgaagatatgctaacccatgggcggtgccaagagctatgtcatacctcacacaccagtccaaagctggtgctggctgaattacatgcagaatatcatggaggctgcccttttccataaaatcatacaaaatcgcaagcttctttatagcataaacatcccctgacctcagtgttgccttgtaaacagttccgtgagcacctaaggatgcaacacagtacaagtacaagaactcctcccacaaataatgaaccgagaactatgagaacaattttcaattgg

SEQ ID NO: 3833 - DNA, 747 bp, Zea Mays
gctccgcagaataaaattcagaaatcctactgccagtacgcgctgctgctggattgcaatcccggtttcccttccctcgacttggacaacgaccggctgccgctgctggcagaggctggccgcgcatccgtcagctccttcacgacggcagtcatggagggcctttggctcacctccctggccgcgcaccggagcgccaccgacaggaccttacgcacctcctccatctccaccgtgccgaagacttcctccatgagggccgggtcacagacggcctcgattttgtcggtgccgtccagcacggacgacacccagccgactatgtccgcgctgtcggggaacaaaggatccaccgccgtcctcctggtcaacagctccagtagcaccacaccgtagctgtacacgtcagactccatgctgctcttggtggaaaacgccaattctgcaagacagcgcatgcaatggcggcagtcatcatgaagatatgctaacccatgggcggtgccaagagctatgtcatacctcacacaccagtccaaagctggtgctggctgaattacatgcagaatatcatggaggctgcccttttccataaaatcatacaaaatcgcaagcttctttatagcataaacatcccctgacctcagtgttgccttgtaaacagttccaaggatgcaacacagtacaagtacaagaactcctcccacaaataatgaaccgagaactatgagaacaattttcaattgg

SEQ ID NO: 3834 - DNA, 1529 bp, Zea Mays
ttttcttccctcgtccccgcgtgtgcctttatccctacagcaacgacttggggcgaccaacgccacaactccacaaggtccgcatacccctttcccccgcgccctttatccctgcagcaacgacttggggtgacgagcaccacaagtattcgtgctgctttggtctttgcgtcctggagcattaatttcccttctgatttgggtagaggatgatgcttctcgccaagctcggggcgccgagcgttccagggaagcgtcgagttgaagaagatgctataagttgcagaatagaaacataccatggtgatctatacaactaatttttatctcacatcctatgaatttaaggttgtgtcatggacagaaggaaactgctgttggtccctgcgattagtatggccattgcctcctttcagtacacttttgtcaagggaatagcaaaagctgaatttgctgatatgcctgcacttcgcggtaaagattatggaaagacaaaaatgcggtatccagattacactgaaacggaatcaggcctccagtacaaggacttgcgggttggtgatggcccttctccaaaaaaaggggagactgttgttgttgattgggatggctatacaattgggtactatggtcgtatctttgaagctcgaaacaagaccaaaggaggttcatttgagggtggtgacaaagacttcttcaagttcaaagttggatcaggacaggtcataccagcttttgaggaggctatatcaggcatggccccaggaggtgttaggaggatcattgtaccaccggatcttggatacccagataatgactacaacaagttgggtccaaaaccaacgacattctcgggacaaagagctcttgattttgttctacgtaatcaaggcttaatagataaaactctcctgtttgacatcgagcttctcaagataattccaaatcagtagtgtgagattctaatgattacctttgaagaaaaaagctcatgttattcaggtccgtcgaagatcagcagtaaatgtatgcaattgaatatgaaaatatttttttaggcatacgcacatacaacatgatgtgaacacatctacctacatctccattaactacgcctcttttaaaagatgccattgtgtgcatctgcggtttctacagaagctctattagatacgtctgtgatcatacctcgactgctgagcaaatagagaatgaccaaatggcgaattgttgaaatgaaggcattctagttggaaatgttgtaaataccccaaatattgcctgtctgtcgtaatagttcatttgggacgtctggggggtgcatggtttcttttggtgattggtcgccccagacaaatcagaactctctactttaccagaaggtaccatccaaacaggatttcaatccagttttagtgaatgttcaatatgttttagtaaataatgtaaaaacggctttttattgctccaaatatgtaattcaggtttctaattttaaatcccatttaagaaatattttgcgaaaacac

SEQ ID NO: 3835 - DNA, 1460 bp, Zea Mays
ttttcttccctcgtccccgcgtgtgcctttatccctacagcaacgacttggggcgaccaacgccacaactccacaagtattcgtgctgctttggtctttgcgtcctggagcattaatttcccttctgatttgggtagaggatgatgcttctcgccaagctcggggcgccgagcgttccagggaagcgtcgagttgaagaagatgctataagttgcagaatagaaacataccatggtgatctatacaactaatttttatctcacatcctatgaatttaaggttgtgtcatggacagaaggaaactgctgttggtccctgcgattagtatggccattgcctcctttcagtacacttttgtcaagggaatagcaaaagctgaatttgctgatatgcctgcacttcgcggtaaagattatggaaagacaaaaatgcggtatccagattacactgaaacggaatcaggcctccagtacaaggacttgcgggttggtgatggcccttctccaaaaaaaggggagactgttgttgttgattgggatggctatacaattgggtactatggtcgtatctttgaagctcgaaacaagaccaaaggaggttcatttgagggtggtgacaaagacttcttcaagttcaaagttggatcaggacaggtcataccagcttttgaggaggctatatcaggcatggccccaggaggtgttaggaggatcattgtaccaccggatcttggatacccagataatgactacaacaagttgggtccaaaaccaacgacattctcgggacaaagagctcttgattttgttctacgtaatcaaggcttaatagataaaactctcctgtttgacatcgagcttctcaagataattccaaatcagtagtgtgagattctaatgattacctttgaagaaaaaagctcatgttattcaggtccgtcgaagatcagcagtaaatgtatgcaattgaatatgaaaatatttttttaggcatacgcacatacaacatgatgtgaacacatctacctacatctccattaactacgcctcttttaaaagatgccattgtgtgcatctgcggtttctacagaagctctattagatacgtctgtgatcatacctcgactgctgagcaaatagagaatgaccaaatggcgaattgttgaaatgaaggcattctagttggaaatgttgtaaataccccaaatattgcctgtctgtcgtaatagttcatttgggacgtctggggggtgcatggtttcttttggtgattggtcgccccagacaaatcagaactctctactttaccagaaggtaccatccaaacaggatttcaatccagttttagtgaatgttcaatatgttttagtaaataatgtaaaaacggctttttattgctccaaatatgtaattcaggtttctaattttaaatcccatttaagaaatattttgcgaaaacac

SEQ ID NO: 3836 - DNA, 1415 bp, Zea Mays
ttttcttccctcgtccccgcgtgtgcctttatccctacagcaacgacttggggcgaccaacgccacaactccacaagtattcgtgctgctttggtctttgcgtcctggagcattaatttcccttctgatttgggtagaggatgatgcttctcgccaagctcggggcgccgagcgttccagggaagcgtcgagttgaagaagatgctataagttgcagaatagaaacataccatggttgtgtcatggacagaaggaaactgctgttggtccctgcgattagtatggccattgcctcctttcagtacacttttgtcaagggaatagcaaaagctgaatttgctgatatgcctgcacttcgcggtaaagattatggaaagacaaaaatgcggtatccagattacactgaaacggaatcaggcctccagtacaaggacttgcgggttggtgatggcccttctccaaaaaaaggggagactgttgttgttgattgggatggctatacaattgggtactatggtcgtatctttgaagctcgaaacaagaccaaaggaggttcatttgagggtggtgacaaagacttcttcaagttcaaagttggatcaggacaggtcataccagcttttgaggaggctatatcaggcatggccccaggaggtgttaggaggatcattgtaccaccggatcttggatacccagataatgactacaacaagttgggtccaaaaccaacgacattctcgggacaaagagctcttgattttgttctacgtaatcaaggcttaatagataaaactctcctgtttgacatcgagcttctcaagataattccaaatcagtagtgtgagattctaatgattacctttgaagaaaaaagctcatgttattcaggtccgtcgaagatcagcagtaaatgtatgcaattgaatatgaaaatatttttttaggcatacgcacatacaacatgatgtgaacacatctacctacatctccattaactacgcctcttttaaaagatgccattgtgtgcatctgcggtttctacagaagctctattagatacgtctgtgatcatacctcgactgctgagcaaatagagaatgaccaaatggcgaattgttgaaatgaaggcattctagttggaaatgttgtaaataccccaaatattgcctgtctgtcgtaatagttcatttgggacgtctggggggtgcatggtttcttttggtgattggtcgccccagacaaatcagaactctctactttaccagaaggtaccatccaaacaggatttcaatccagttttagtgaatgttcaatatgttttagtaaataatgtaaaaacggctttttattgctccaaatatgtaattcaggtttctaattttaaatcccatttaagaaatattttgcgaaaacac

SEQ ID NO: 3837 - DNA, 1484 bp, Zea Mays
ttttcttccctcgtccccgcgtgtgcctttatccctacagcaacgacttggggcgaccaacgccacaactccacaaggtccgcatacccctttcccccgcgccctttatccctgcagcaacgacttggggtgacgagcaccacaagtattcgtgctgctttggtctttgcgtcctggagcattaatttcccttctgatttgggtagaggatgatgcttctcgccaagctcggggcgccgagcgttccagggaagcgtcgagttgaagaagatgctataagttgcagaatagaaacataccatggttgtgtcatggacagaaggaaactgctgttggtccctgcgattagtatggccattgcctcctttcagtacacttttgtcaagggaatagcaaaagctgaatttgctgatatgcctgcacttcgcggtaaagattatggaaagacaaaaatgcggtatccagattacactgaaacggaatcaggcctccagtacaaggacttgcgggttggtgatggcccttctccaaaaaaaggggagactgttgttgttgattgggatggctatacaattgggtactatggtcgtatctttgaagctcgaaacaagaccaaaggaggttcatttgagggtggtgacaaagacttcttcaagttcaaagttggatcaggacaggtcataccagcttttgaggaggctatatcaggcatggccccaggaggtgttaggaggatcattgtaccaccggatcttggatacccagataatgactacaacaagttgggtccaaaaccaacgacattctcgggacaaagagctcttgattttgttctacgtaatcaaggcttaatagataaaactctcctgtttgacatcgagcttctcaagataattccaaatcagtagtgtgagattctaatgattacctttgaagaaaaaagctcatgttattcaggtccgtcgaagatcagcagtaaatgtatgcaattgaatatgaaaatatttttttaggcatacgcacatacaacatgatgtgaacacatctacctacatctccattaactacgcctcttttaaaagatgccattgtgtgcatctgcggtttctacagaagctctattagatacgtctgtgatcatacctcgactgctgagcaaatagagaatgaccaaatggcgaattgttgaaatgaaggcattctagttggaaatgttgtaaataccccaaatattgcctgtctgtcgtaatagttcatttgggacgtctggggggtgcatggtttcttttggtgattggtcgccccagacaaatcagaactctctactttaccagaaggtaccatccaaacaggatttcaatccagttttagtgaatgttcaatatgttttagtaaataatgtaaaaacggctttttattgctccaaatatgtaattcaggtttctaattttaaatcccatttaagaaatattttgcgaaaacac

SEQ ID NO: 3838 - DNA, 1480 bp, Zea Mays
ttttcttccctcgtccccgcgtgtgcctttatccctacagcaacgacttggggcgaccaacgccacaactccacaaggtccgcatacccctttcccccgcgccctttatccctgcagcaacgacttggggtgacgagcaccacaagtattcgtgctgctttggtctttgcgtcctggagcattaatttcccttctgatttgggtagaggatgatgcttctcgccaagctcggggcgccgagcgttccagggaagcgtcgagttgaagaagatgctataagttgcagaatagaaacataccatggttgtgtcatggacagaaggaaactgctgttggtccctgcgattagtatggccattgcctcctttcagtacacttttgtcaagggaatagcaaaagctgaatttgctgatatgcctgcacttcgcggtaaagattatggaaagacaaaaatgcggtatccagattacactgaaacggaatcaggcctccagtacaaggacttgcgggttggtgatggcccttctccaaaaaaaggggagactgttgttgttgattgggatggctatacaattgggtactatggtcgtatctttgaagctcgaaacaagaccaaaggaggttcatttgagggtggtgacaaagacttcttcaagttcaaagttggatcaggacaggtcataccagcttttgaggaggctatatcaggcatggccccaggaggtgttaggaggatcattgtaccaccggatcttggatacccagataatgactacaacaagttgggtccaaaaccaacgacattctcgggacaaagagctcttgattttgttctacgtaatcaaggcttaatagataaaactctcctgtttgacatcgagcttctcaagataattccaaatcagtagagattctaatgattacctttgaagaaaaaagctcatgttattcaggtccgtcgaagatcagcagtaaatgtatgcaattgaatatgaaaatatttttttaggcatacgcacatacaacatgatgtgaacacatctacctacatctccattaactacgcctcttttaaaagatgccattgtgtgcatctgcggtttctacagaagctctattagatacgtctgtgatcatacctcgactgctgagcaaatagagaatgaccaaatggcgaattgttgaaatgaaggcattctagttggaaatgttgtaaataccccaaatattgcctgtctgtcgtaatagttcatttgggacgtctggggggtgcatggtttcttttggtgattggtcgccccagacaaatcagaactctctactttaccagaaggtaccatccaaacaggatttcaatccagttttagtgaatgttcaatatgttttagtaaataatgtaaaaacggctttttattgctccaaatatgtaattcaggtttctaattttaaatcccatttaagaaatattttgcgaaaacac

SEQ ID NO: 3839 - DNA, 1469 bp, Zea Mays
ttttcttccctcgtccccgcgtgtgcctttatccctacagcaacgacttggggcgaccaacgccacaactccacaaggtccgcatacccctttcccccgcgccctttatccctgcagcaacgacttggggtgacgagcaccacaagaggatgatgcttctcgccaagctcggggcgccgagcgttccagggaagcgtcgagttgaagaagatgctataagttgcagaatagaaacataccatggtgatctatacaactaatttttatctcacatcctatgaatttaaggttgtgtcatggacagaaggaaactgctgttggtccctgcgattagtatggccattgcctcctttcagtacacttttgtcaagggaatagcaaaagctgaatttgctgatatgcctgcacttcgcggtaaagattatggaaagacaaaaatgcggtatccagattacactgaaacggaatcaggcctccagtacaaggacttgcgggttggtgatggcccttctccaaaaaaaggggagactgttgttgttgattgggatggctatacaattgggtactatggtcgtatctttgaagctcgaaacaagaccaaaggaggttcatttgagggtggtgacaaagacttcttcaagttcaaagttggatcaggacaggtcataccagcttttgaggaggctatatcaggcatggccccaggaggtgttaggaggatcattgtaccaccggatcttggatacccagataatgactacaacaagttgggtccaaaaccaacgacattctcgggacaaagagctcttgattttgttctacgtaatcaaggcttaatagataaaactctcctgtttgacatcgagcttctcaagataattccaaatcagtagtgtgagattctaatgattacctttgaagaaaaaagctcatgttattcaggtccgtcgaagatcagcagtaaatgtatgcaattgaatatgaaaatatttttttaggcatacgcacatacaacatgatgtgaacacatctacctacatctccattaactacgcctcttttaaaagatgccattgtgtgcatctgcggtttctacagaagctctattagatacgtctgtgatcatacctcgactgctgagcaaatagagaatgaccaaatggcgaattgttgaaatgaaggcattctagttggaaatgttgtaaataccccaaatattgcctgtctgtcgtaatagttcatttgggacgtctggggggtgcatggtttcttttggtgattggtcgccccagacaaatcagaactctctactttaccagaaggtaccatccaaacaggatttcaatccagttttagtgaatgttcaatatgttttagtaaataatgtaaaaacggctttttattgctccaaatatgtaattcaggtttctaattttaaatcccatttaagaaatattttgcgaaaacac

SEQ ID NO: 3840 - DNA, 1424 bp, Zea Mays
ttttcttccctcgtccccgcgtgtgcctttatccctacagcaacgacttggggcgaccaacgccacaactccacaaggtccgcatacccctttcccccgcgccctttatccctgcagcaacgacttggggtgacgagcaccacaagaggatgatgcttctcgccaagctcggggcgccgagcgttccagggaagcgtcgagttgaagaagatgctataagttgcagaatagaaacataccatggttgtgtcatggacagaaggaaactgctgttggtccctgcgattagtatggccattgcctcctttcagtacacttttgtcaagggaatagcaaaagctgaatttgctgatatgcctgcacttcgcggtaaagattatggaaagacaaaaatgcggtatccagattacactgaaacggaatcaggcctccagtacaaggacttgcgggttggtgatggcccttctccaaaaaaaggggagactgttgttgttgattgggatggctatacaattgggtactatggtcgtatctttgaagctcgaaacaagaccaaaggaggttcatttgagggtggtgacaaagacttcttcaagttcaaagttggatcaggacaggtcataccagcttttgaggaggctatatcaggcatggccccaggaggtgttaggaggatcattgtaccaccggatcttggatacccagataatgactacaacaagttgggtccaaaaccaacgacattctcgggacaaagagctcttgattttgttctacgtaatcaaggcttaatagataaaactctcctgtttgacatcgagcttctcaagataattccaaatcagtagtgtgagattctaatgattacctttgaagaaaaaagctcatgttattcaggtccgtcgaagatcagcagtaaatgtatgcaattgaatatgaaaatatttttttaggcatacgcacatacaacatgatgtgaacacatctacctacatctccattaactacgcctcttttaaaagatgccattgtgtgcatctgcggtttctacagaagctctattagatacgtctgtgatcatacctcgactgctgagcaaatagagaatgaccaaatggcgaattgttgaaatgaaggcattctagttggaaatgttgtaaataccccaaatattgcctgtctgtcgtaatagttcatttgggacgtctggggggtgcatggtttcttttggtgattggtcgccccagacaaatcagaactctctactttaccagaaggtaccatccaaacaggatttcaatccagttttagtgaatgttcaatatgttttagtaaataatgtaaaaacggctttttattgctccaaatatgtaattcaggtttctaattttaaatcccatttaagaaatattttgcgaaaacac

SEQ ID NO: 3841 - DNA, 955 bp, Zea Mays
gttacaaccattacatatgaatgttgattgggatggctatacaattgggtactatggtcgtatctttgaagctcgaaacaagaccaaaggaggttcatttgagggtggtgacaaagacttcttcaagttcaaagttggatcaggacaggtcataccagcttttgaggaggctatatcaggcatggccccaggaggtgttaggaggatcattgtaccaccggatcttggatacccagataatgactacaacaagttgggtccaaaaccaacgacattctcgggacaaagagctcttgattttgttctacgtaatcaaggcttaatagataaaactctcctgtttgacatcgagcttctcaagataattccaaatcagtagtgtgagattctaatgattacctttgaagaaaaaagctcatgttattcaggtccgtcgaagatcagcagtaaatgtatgcaattgaatatgaaaatatttttttaggcatacgcacatacaacatgatgtgaacacatctacctacatctccattaactacgcctcttttaaaagatgccattgtgtgcatctgcggtttctacagaagctctattagatacgtctgtgatcatacctcgactgctgagcaaatagagaatgaccaaatggcgaattgttgaaatgaaggcattctagttggaaatgttgtaaataccccaaatattgcctgtctgtcgtaatagttcatttgggacgtctggggggtgcatggtttcttttggtgattggtcgccccagacaaatcagaactctctactttaccagaaggtaccatccaaacaggatttcaatccagttttagtgaatgttcaatatgttttagtaaataatgtaaaaacggctttttattgctccaaatatgtaattcaggtttctaattttaaatcccatttaagaaatattttgcgaaaacac

SEQ ID NO: 3842 - DNA, 1117 bp, Zea Mays
cttaatatgagactcgtgggctctttcaaagcaaggcgaggcaggttcatatccaaacaagaagccacgatggaatctggatttcccctctatctgatggaatctggatttggtgccagtctgttttcctgtgattttgggataccagccccattccccttcatggagggtatgcgttgctgttggtcggcacactggaatggaacagatatagacagaaccttcaggtaagttcctcgacattacttatataattactaagggattcattttaacactataaatggatagtagaccttgatatctgtcaagtgctaaatgattttatgtcaataaagtaccatcagtttattaaatcacttatgaaaaacatgcatatataacaattcattagtaggtaaaattatttcattagtagccgaccatttcatatattgttgaaagcccgtgtgttagctcgtatcgtgtgtttattaggagttcgctattatcatttcttacagctaaagagcttcactgttaggacaggtttggtcgccaacgaaagcactactccacctcttttacactttccaactattctagtcaataccatgctaattaaagttcagcaaaataaaggaaataatattgcataattgctttgcgaccggacctatataatatcttgtgtagtcctatgatcctatcctcttcaatttacacttctgctttgaatggtcttcaggttcataagcaaggagttgcgcttgaccgatctatggatctctctagatgcactgactaaggtgaattgaaagcggaactagacatgatgtttgaattcgagggtgaattagtatctgcaaaccaaaactggcagattgtttataccgacaacgagggtgatatgatgcttgtgggagatgacccgtgggagaatttgatgtggttgtgtatgatgtactttatattttggcatactatgcacaaaaacaaatgccttctatgaccatcgtgatttatacattttcaaacaaaattttatgatacttcttattgtgttttacgctttcactaaaaagcaagtgtcacattcgccgttacaaaacagatcgataatttacgtaaattttgt

SEQ ID NO: 3843 - DNA, 1399 bp, Zea Mays
ccatctttggtccagtaaattcacctttctaccccgatcaattcacaccatgtcgaccacaaccctaaccctatccctttcgacggttccacttgcaccctacccacaaccccatccatcgtaacccgccgccgccgcgatacacgcaaatcctgccggcgcatccaaccccgcccgacgtggacgccagagaggtgcacgacttccgcaactcgtggcactcagtgcggtggtcgtccaagctcgtcctctggctcgtcctcaacgccttcagcttcctcgtgccgtcgccgctcgcccagatctacgatgcaatggcgaggcaggttcatatccaaacaagaagccacgatggaatctggatttcccctctatctgatggaatctggatttggtgccagtctgttttcctgtgattttgggataccagccccattccccttcatggagggtatgcgttgctgttggtcggcacactggaatggaacagatatagacagaaccttcaggtaagttcctcgacattacttatataattactaagggattcattttaacactataaatggatagtagaccttgatatctgtcaagtgctaaatgattttatgtcaataaagtaccatcagtttattaaatcacttatgaaaaacatgcatatataacaattcattagtaggtaaaattatttcattagtagccgaccatttcatatattgttgaaagcccgtgtgttagctcgtatcgtgtgtttattaggagttcgctattatcatttcttacagctaaagagcttcactgttaggacaggtttggtcgccaacgaaagcactactccacctcttttacactttccaactattctagtcaataccatgctaattaaagttcagcaaaataaaggaaataatattgcataattgctttgcgaccggacctatataatatcttgtgtagtcctatgatcctatcctcttcaatttacacttctgctttgaatggtcttcaggttcataagcaaggagttgcgcttgaccgatctatggatctctctagatgcactgactaaggtgaattgaaagcggaactagacatgatgtttgaattcgagggtgaattagtatctgcaaaccaaaactggcagattgtttataccgacaacgagggtgatatgatgcttgtgggagatgacccgtgggagaatttgatgtggttgtgtatgatgtactttatattttggcatactatgcacaaaaacaaatgccttctatgaccatcgtgatttatacattttcaaacaaaattttatgatacttcttattgtgttttacgctttcactaaaaagcaagtgtcacattcgccgttacaaaacagatcgataatttacgtaaattttgt

SEQ ID NO: 3844 - DNA, 3044 bp, Zea Mays
gaggaaaagcaaagccaaaggcactccactccactccaccctatgcactgccgcccctgcccgtcccagctctcgctcgtctttctcctcctcctctcgctcgcacccatcatttcggcactccccttcccggagccagctcttccgatggcgtgcagcggcctccgcctctcgctccccgccgccgtcctcgccctcctcctcctcccctccgcgctcgcttccgagcccctcaaccccgaagtgcaggcgttgatcgccatcaggcaggggctggtcgacccgcacggcgtgctcaggagctgggaccaggactcggtcgacccctgcagctgggccatgatcacctgctccccgcagaacctcgtcatcggcctgggagtgccgagccagggcttgtcggggactctgtccgggaggatcgccaacctcacccacctcgagcaagtgctgctgcagaacaacaacatcacggggcggctgccgccggagctgggcgcgctgccgaggctgcagacgctggacctctccaacaaccgcttctccggccgcgtgcccaacacgctgggccgcatcaccaccctccgatacctgaggctgaacaacaacagcttgtccgggccgttccccgcgtcgctggccaagatcccgcagctctccttcctggacctgtccttcaacaacctcactggccccgtcccgctcttcccgacacggaccttcaacgtcgtgggcaacccgatgatatgtgggagcaacgccggcgcaggggagtgcgccgccgcgctgccgccggtcaccgtacccttcccgctggaatccactccgggcggcagcagtgagcactcttccttcctgcctctatgtctatcattcatatctacggccagtcaggcaggccagctcgcgcgcctagcagctagtcgcgctcaatgcttttcggccctttctcggagtgcgtggcgtggcgtgcatgcatgcgtcgctgctgccgctgcttttgtgcccttgcctcgccggggtagcggtcgaggggacacggtgctgtcggcatgggggcgccgtcgctctcgcttgcggccgggaatacctgtagtaggctgtatgcctgtatgtagcgctggtggcgcggtctggcctgaaccgtgcatctgctgctgctcgcgcctggggatcagcgtttggcttttgtgtgtgtgtgcgcgcgcagggacagggacaggggcggcggcagcgggcaggtcaaaggctgctggcgcgcggctgccgatcggcgtagggacaagcctgggcgcctcctcccttgtgctcttcgccgtgtcctgcttcctctggcggcgaaagcgccggcacacgggggggcggccctcctccgttctcggcatcatccacgagcggggcggctgcgacctggaggacggcggcggcggtggcgtggtggcggcggcggcgcggctggggaacgtgcgccagttcgggctgcgggagctgcaggcggccacggacgggttcagcgccaagaacatcctgggcaagggcgggttcgggaacgtgtaccgcggccgcctcgccgacggcaccacggtggccgtgaagcggctcaaggaccccagcgcgtcgggcgaggcccagttccgcacggaggtggagatgatcagcctcgccgtgcaccgccacctgctgcgcctggtcggcttctgcgccgcctcgggcgagcgcctcctcgtctacccctacatgcccaacggcagcgtcgcgtcgcggctgcgagggaagccggcgctggactgggcgacgcggaagcggatcgcggtgggcgccgcgcgcgggctgctgtacctgcacgagcagtgcgaccccaagatcatccaccgcgacgtcaaggccgccaacgtgctgctggacgagcaccacgaggccgtcgtgggcgacctgggcctggccaagctgctggaccacggcgactcgcacgtcaccacggcggtgcgcggcaccgtgggccacatcgcgcccgagtacctctccacggggcagtcgtcggagaagacggacgtcttcggcttcgggatcctgctgctggagctcgtcacgggccagcgcgcgctccagctcggcaaggcctccggcgccctgcacagccagaagggcgtcatgctggactgggacctgggcccacactacgacaggatcgaggtggccgagatggtgcaggtggcgctcctctgcacgcagttccagccgtcgcaccggcccaagatgtccgaggtggtccggatgctggagggagacggcctggccgagaaatgggaggccacgaaccggccgggcgtggccgcgggggcgccgtgccacgacgcgctcggctacgaccaccgcaacgactccaacggctccgtcttcttcaacgacttccacgacaacgacagcagcctcagcagcgacgaagcgcggtcgatcgacatggtggaggagatggagctgtccggaccaaggtagcaagcaagcagcccttgccgctgggcgggaagagccactcccttgatatgatagcatcaaattcaaaattcagatgttccgagagcttcaaaaaaaattacaggtagagagagagaggtgtcgagttaagagttgttgcgagtcagtttggaattaaaggtattcctaggtgctttagggtctagagttcagaccacagttgtgtagtttctggtggagccgtccttttccctttgaaaaaaagatgtaaagaaaaaggatggcttctcttttgcttcttttcacaggtttctttttcttttgctgctgctgctgctctccctgctgatccagtgacacaagcacatgcagcactgcagtcctttggtattccggtccactgatctagggtaaccttttgcagcgcaaggatgtatgtagggaatgtgttgcaagtagcgaggcatgcagtcattttgactgcttttgtgacctgtaaaggtcaccagctgctcaacttccctttggtgattctaaaatactgatgaaacaaggatgcctggctgcag

SEQ ID NO: 3845 - DNA, 2672 bp, Zea Mays
gaggaaaagcaaagccaaaggcactccactccactccaccctatgcactgccgcccctgcccgtcccagctctcgctcgtctttctcctcctcctctcgctcgcacccatcatttcggcactccccttcccggagccagctcttccgatggcgtgcagcggcctccgcctctcgctccccgccgccgtcctcgccctcctcctcctcccctccgcgctcgcttccgagcccctcaaccccgaagtgcaggcgttgatcgccatcaggcaggggctggtcgacccgcacggcgtgctcaggagctgggaccaggactcggtcgacccctgcagctgggccatgatcacctgctccccgcagaacctcgtcatcggcctgggagtgccgagccagggcttgtcggggactctgtccgggaggatcgccaacctcacccacctcgagcaagtgctgctgcagaacaacaacatcacggggcggctgccgccggagctgggcgcgctgccgaggctgcagacgctggacctctccaacaaccgcttctccggccgcgtgcccaacacgctgggccgcatcaccaccctccgatacctgaggctgaacaacaacagcttgtccgggccgttccccgcgtcgctggccaagatcccgcagctctccttcctggacctgtccttcaacaacctcactggccccgtcccgctcttcccgacacggaccttcaacgtcgtgggcaacccgatgatatgtgggagcaacgccggcgcaggggagtgcgccgccgcgctgccgccggtcaccgtacccttcccgctggaatccactccgggcggcagcaggacagggacaggggcggcggcagcgggcaggtcaaaggctgctggcgcgcggctgccgatcggcgtagggacaagcctgggcgcctcctcccttgtgctcttcgccgtgtcctgcttcctctggcggcgaaagcgccggcacacgggggggcggccctcctccgttctcggcatcatccacgagcggggcggctgcgacctggaggacggcggcggcggtggcgtggtggcggcggcggcgcggctggggaacgtgcgccagttcgggctgcgggagctgcaggcggccacggacgggttcagcgccaagaacatcctgggcaagggcgggttcgggaacgtgtaccgcggccgcctcgccgacggcaccacggtggccgtgaagcggctcaaggaccccagcgcgtcgggcgaggcccagttccgcacggaggtggagatgatcagcctcgccgtgcaccgccacctgctgcgcctggtcggcttctgcgccgcctcgggcgagcgcctcctcgtctacccctacatgcccaacggcagcgtcgcgtcgcggctgcgagggaagccggcgctggactgggcgacgcggaagcggatcgcggtgggcgccgcgcgcgggctgctgtacctgcacgagcagtgcgaccccaagatcatccaccgcgacgtcaaggccgccaacgtgctgctggacgagcaccacgaggccgtcgtgggcgacctgggcctggccaagctgctggaccacggcgactcgcacgtcaccacggcggtgcgcggcaccgtgggccacatcgcgcccgagtacctctccacggggcagtcgtcggagaagacggacgtcttcggcttcgggatcctgctgctggagctcgtcacgggccagcgcgcgctccagctcggcaaggcctccggcgccctgcacagccagaagggcgtcatgctggactgggacctgggcccacactacgacaggatcgaggtggccgagatggtgcaggtggcgctcctctgcacgcagttccagccgtcgcaccggcccaagatgtccgaggtggtccggatgctggagggagacggcctggccgagaaatgggaggccacgaaccggccgggcgtggccgcgggggcgccgtgccacgacgcgctcggctacgaccaccgcaacgactccaacggctccgtcttcttcaacgacttccacgacaacgacagcagcctcagcagcgacgaagcgcggtcgatcgacatggtggaggagatggagctgtccggaccaaggtagcaagcaagcagcccttgccgctgggcgggaagagccactcccttgatatgatagcatcaaattcaaaattcagatgttccgagagcttcaaaaaaaattacaggtagagagagagaggtgtcgagttaagagttgttgcgagtcagtttggaattaaaggtattcctaggtgctttagggtctagagttcagaccacagttgtgtagtttctggtggagccgtccttttccctttgaaaaaaagatgtaaagaaaaaggatggcttctcttttgcttcttttcacaggtttctttttcttttgctgctgctgctgctctccctgctgatccagtgacacaagcacatgcagcactgcagtcctttggtattccggtccactgatctagggtaaccttttgcagcgcaaggatgtatgtagggaatgtgttgcaagtagcgaggcatgcagtcattttgactgcttttgtgacctgtaaaggtcaccagctgctcaacttccctttggtgattctaaaatactgatgaaacaaggatgcctggctgcag

SEQ ID NO: 3846 - DNA, 1236 bp, Zea Mays
gtttttactcgcggcgtcgtcgatggtgacgttcctcaagtgcggcggcgtggtgctgggcacgggcatccaccacgtgaccatggacggcatgggcgcgttccacttcatccagacctggaccggcgtggcgcggggcctcgacacggccgaggcgtgcggcccgctgccgttccacgaccggacgctcctccgcgcgcgctctccgccggccccggccttcgaccacccggtctactcgccggctctgctcaacggcgtgccccggcccttcgtcacccgcgtctacgccgtctccccgaagcttctcgctggcatcaagtcccgctgcgcgccgggcgtgtccacctactgcgccgtcaccgcgcacctctggcgttgcatgtgcgtcgcgcgcgggctcgccccgggctcggacacgcggctccgcgtgccggccaacgtccgccaccgcctgcgcccgccgctcccgcggagctacttcggcaacgccatcgtgcgcgacctcgtgaccacccgggtggaggacgtcctggaacgcccgctcgggttcgtggcgcaggcgatcaaggacgcggtggaccgcgtcaatgacgcctacgtgcgctccgtggtcgactacctggaggtggagtcggagaagggcagccaggcggcgcgcgggcagctcatgccggagtccgacctgtgggtggtcagctggctcgggatgcccatgtacgacgccgacttcgggtggggcacgccgcggttcgtcgcgccggcgcagatgttcggcagcggcacggcctacgtcacgcagcgcgccaacagggacgacggcctcgccgtgctcttcgggctggagcccgagtatctgcagtgcttcgaaaaggtgttctatggagagtgagtcgtgagattactagtgtcatccgcgtttcgtcgtgagcaccgagtgcgattactgtagcttggaacctgatgctgtggatgtgggctttgcaaattactccggtttctgtgttttttttcctagtattctcatgtggtttttaggtgctcagtcgagacttgagagagaacatagctgcgttgactttagcatggtttaatttcaactctatgggtctctatctattgtcacattagctatccaccgtactatcgattctattgtcggccgttgtcaaccatatctatagcatggtcgtacaaaaaatatgaaaataaaaaacaacatcatcataaataaaa

SEQ ID NO: 3847 - DNA, 1385 bp, Zea Mays
ccggaggccggagcagatgcatttgctcgcgtctgcgttttgtgctgcaacctgcaaccatgtcacagctgctagctgttcggttcctccgttgcaggcctgcgtgtgccatgtggagcagagagttgggttctttctacctagcactataagagaaaccgctcggtcacggaggtacaggcaacgcacgtatgtctagaacttaacttctcgaatatttgtcgaccactagtttattttttttaactaaaacgcgataaataaaaaaaacaaagaaatactagtttctatcaagtaagcagcttaatcaaatctacgaaacagaggaaggaacgccgcagaaacttcctaggaattttcttcatcaactcgcagcaaatttatttttcttcaggcttggtgggggagggggtgacctctgcggtaggtcatctccaaggtcctacctagatcgatcatcatttaccacacaagaagtaaccatgcatgcatctctcttaccacatcattacatgtagaataagaatattggcgagtcatgcaagcatctattacgaaacatgtagaatatttacactactactccaccatccggtattttcaaacaaagaacatgcatgggcaagaaaaggtgctccgacgaggtgaatccgcggaagcagccgtacaagttctccaaccagaagctccgggacctggggctgcagttccggccggtcagccagtcgctttacgacacggtgaagaacctccaggagaagggacacctgccggtgctcggagagcggacgacgacggaggccgccgacaaggatgcccccacggccgagatgcagcagggagggatcgccatccgtgcctgagagggcgatgccacacatgaacacaaagcaatgttcatactgctgccctgcacctgctgtgtaaacaggcctgtgtttgttctggctgatagtgatgtaccctaagacttgtaacgtcatgttcgttcttgtgaactatagcgagtgaataaaattggttaatgttggatgttcaaaattttgcagataagagagtcatcaattcaggttctgaaaagcaatcccgaaactaccaccctacctatcccctacaggctacagtagactgtacaagaccctttgttaccaaaccaaaaaaaaacatcggacaaactcaagactattcatgtttggtaacctacttgtgtagaaaagtgagctctattattggctgatgcaatatgccaacccttacatgcagcaggaaagcaaagaaagaacagtaaaacaaatgagttggtaaacagagaggactgcacaaaacaaggaatccggagaataacgatatctcaattttcaagaccaaatttggattaaaaaaaa

SEQ ID NO: 3848 - DNA, 743 bp, Zea Mays
aacaactaacgatgatctagctagcaggatcggtactgatgtggtgaactggtgattgataaaagccacacactgcatccggcctaaccatgcatgctggagcgctacgagccaaccttgtccttagattggaccagtgagcacctgtcgccccatgagcacacgggtagaaatgtaaccgattggatccactaaattcctttttccccccttccaaacaggaaatgtagacgatgattgatatctgaatctgccagagctactccacacgtcagctatgccgtggcccaaacagcgacttctcgttgcgaaacgtgaatttgcctggagaagtttcctgcccgccgatgccttttctcggcgagagcggcggagcggacgacgccgagaggctggagggctgggaactgaaagaggccagacaccacggaccaccaggccaccaccggagagatacggtatccatccacagcgccccccgccgcccgcctgcacggctgcaccacacgttttgagagacggaggaggccaggtcccaagtggtccatccagaccactggctgccggggcagattgtctcctttcccccgtcggctctactatcagcgcggggcgatcggtcctgattcgtgacaggcctgtctcgagacacatctctgcaataataatggcagatctttcgtcagctggtcctccatgattttgaatctgagagacaatccgcagcgaaaacaagcttaccg

SEQ ID NO: 3849 - DNA, 3117 bp, Zea Mays
ctcgcagcagctgcgcggcgcggcggatcctgtccacaagttcatgacccgcccccccacccccagtggcggtggcggcagacccgccgggcagctggaccgagccgatcggtccggtcccatctcagcggcccgcggcgcctgcccaccctctcagccaaaagccccctgcacccagtccatccaaacctgtgtccgcagctctcgccagccagtcgccgccacgagaggggatgtcgacggcgagcggcgtatccgctggctccgtgctccagctgccctcctttcgggtgccggccaagagatttctgcctcggagaacagccgctggtgctccggctggtaacttttttgtgaagagagatattatatataatagaagctaccaccaattcttaccattgaagcatataggaggcttgcaagcagcagtacttccagttactccaccactattagatggtgaggggaaaaagaaacaaatggctgaagagtatgggttcacacaaattggagatgaactaccagatgatattactcttaaagatgtcatggatactttacctaaagaggtatttgaaatcaatgatgtgaaggcttggacatcagttttgatatcagttacttcttatgcgctgggtttatatttcattgctaagtctccatggtatcttcttcccttggcttgggcttggacaggcacagcagtgactgggttttttgtgataggtcatgattgtgctcacaaatcattttcaaggaataagttggttgaagatgttgttggaaccttggctttcatgccattgatatatccttatgaaccgtggagatttaagcatgaccgacatcatgccaagacaaacatgttgatagaagatactgcatggcaacctgtttggcaaaaggaaattgaatcatcaccttttctaaggaaggcaattatttttggctatggccctatcaggccatggatgtctattgctcactggttgatttggcactttgatctaaaaaaattcagaccaaatgaagttccaagggttaagataagcttagcatgtgtgtttgcattcatggcgattggatggcccttgatcattctcaaatcaggactagctggatggtttaagttctggttcatgccatggatggtttatcatttttggatgagcacttttacaatggtacatcacacagctcctcatataccattcaagtcatctgaagaatggaatgctgcacaagctcaattaaacggcacagttcattgtaactatcctcaatggatagagatcctttgccatgacataaatgtgcatgtcccacaccatatttctccaagaattccaagctataaccttcgtgctgcttatgattccatcaaacagaactggggcaagtatgtcaatgaagccaactggaattggcgattgatgaagacgatactgacgagatgccatgtgtacgacaaggagagatactatgttccgttcgatgagctcgcgcctcaggagtcccaaccaatcaaattccttaggaagttcatgccagattacgcatgatgccatcatcacagctgttgactagttgagattattcagtattgtcggcacaggtggacagtcacattttcagtgattacgcatgtcccaaaattttgactggaatactccatgttacactattattcgtgcagtaggaaagcacgtagcgtaccaaaatatttatacttcaggaaatagacaaagacattggtgatgaaaacggacagaatcgtgtggaaaacatctcttctcttgtcatttctatattttttttccggaaacagaaacacgttcaaaattcccggaattgaaaacagggttgggatatgtggttgttcggaaacaaactaatttactaataaaatacgacttgcacaggcctgctgggccgccgcaacctaagaatggacaccgtcaaatgagcccaccccttaataaaccctagcccgcctccgccgccctataatccgacgccggacgccccatgatttcgctttcttcttcccgtcgagacccaaccataccagcggcgccgcaggctgacgaggaggcggagtagagtggccggactacctcgacacctccactgcaaccatgggtatctcacgtgattcgatgcacaagcgccgtgccaccggtggaaagcagaaggcgtggcgcaagaagcgaaagtatgagcttggccgtcagcctgctaacaccaaactgtctagcaataagacagtgaggagggtccgtgtccgtggaggcaacgtgaagtggagggctctccgattggatacaggtaactactcgtggggaagtgaggctcttacccgcaagacccgcatcctggatgtggtctataatgcatcaaacaatgagcttgtgaggactcagactcttgtgaagagcgccattgtacaagttgatgctgctccattcaagcagtggtacctcactcactatggagtggacatcggtaggaagaagaaggtgcctgttgctaagaaggatgcgactgagggacaagagggtgaggctatagctgaggaaacaaagaagagtaaccatgtgcagaggaagattgagaagcgacagcaggaccgtgcactcgacactcatattgaagagcaatttggcagtgggagattgttggcctgcatttctgcccgtcctgggcagtgtggccgagctgatggctacatccttgagggtaaagagctcgagttctacatgaagaagctccagaggaagaagggcaagggtgttgcatcttagagcattcttttagctagaactgcaaaatatcttctacttgggggttttgttgttagtctttatgcatatcatttgcggacctgatgaacacttcataagtgaatcaactctcgattccaagaattgataattttcacatgcggtggttgtaattgtgatatttaggtttgctatttattgaaacttcttgtctaaagcagttttagtttaccttgaagatgattgttagaaacgagatcctatccaatctatattgctgtttggttttcactttatagctgctaacatttgattgcatagtaagaactgg

SEQ ID NO: 3850 - DNA, 3088 bp, Zea Mays
ggatcctgtccacaagttcatgacccgcccccccacccccagtggcggtggcggcagacccgccgggcagctggaccgagccgatcggtccggtcccatctcagcggcccgcggcgcctgcccaccctctcagccaaaagccccctgcacccagtccatccaaacctgtgtccgcagctctcgccagccagtcgccgccacgagaggggatgtcgacggcgagcggcgtatccgctggctccgtgctccagctgccctcctttcgggtgccggccaagagatttctgcctcggagaacagccgctggtgctccggctggtaacttttttgtgaagagagatattatatataatagaagctaccaccaattcttaccattgaagcatataggaggcttgcaagcagcagtacttccagttactccaccactattagatggtgaggggaaaaagaaacaaatggctgaagagtatgggttcacacaaattggagatgaactaccagatgatattactcttaaagatgtcatggatactttacctaaagaggtatttgaaatcaatgatgtgaaggcttggacatcagttttgatatcagttacttcttatgcgctgggtttatatttcattgctaagtctccatggtatcttcttcccttggcttgggcttggacaggcacagcagtgactgggttttttgtgataggtcatgattgtgctcacaaatcattttcaaggaataagttggttgaagatgttgttggaaccttggctttcatgccattgatatatccttatgaaccgtggagatttaagcatgaccgacatcatgccaagacaaacatgttgatagaagatactgcatggcaacctgtttggcaaaaggaaattgaatcatcaccttttctaaggaaggcaattatttttggctatggccctatcaggccatggatgtctattgctcactggttgatttggcactttgatctaaaaaaattcagaccaaatgaagttccaagggttaagataagcttagcatgtgtgtttgcattcatggcgattggatggcccttgatcattctcaaatcaggactagctggatggtttaagttctggttcatgccatggatggtttatcatttttggatgagcacttttacaatggtacatcacacagctcctcatataccattcaagtcatctgaagaatggaatgctgcacaagctcaattaaacggcacagttcattgtaactatcctcaatgagatcctttgccatgacataaatgtgcatgtcccacaccatatttctccaagaattccaagctataaccttcgtgctgcttatgattccatcaaacagaactggggcaagtatgtcaatgaagccaactggaattggcgattgatgaagacgatactgacgagatgccatgtgtacgacaaggagagatactatgttccgttcgatgagctcgcgcctcaggagtcccaaccaatcaaattccttaggaagttcatgccagattacgcatgatgccatcatcacagctgttgactagttgagattattcagtattgtcggcacaggtggacagtcacattttcagtgattacgcatgtcccaaaattttgactggaatactccatgttacactattattcgtgcagtaggaaagcacgtagcgtaccaaaatatttatacttcaggaaatagacaaagacattggtgatgaaaacggacagaatcgtgtggaaaacatctcttctcttgtcatttctatattttttttccggaaacagaaacacgttcaaaattcccggaattgaaaacagggttgggatatgtggttgttcggaaacaaactaatttactaataaaatacgacttgcacaggcctgctgggccgccgcaacctaagaatggacaccgtcaaatgagcccaccccttaataaaccctagcccgcctccgccgccctataatccgacgccggacgccccatgatttcgctttcttcttcccgtcgagacccaaccataccagcggcgccgcaggctgacgaggaggcggagtagagtggccggactacctcgacacctccactgcaaccatgggtatctcacgtgattcgatgcacaagcgccgtgccaccggtggaaagcagaaggcgtggcgcaagaagcgaaagtatgagcttggccgtcagcctgctaacaccaaactgtctagcaataagacagtgaggagggtccgtgtccgtggaggcaacgtgaagtggagggctctccgattggatacaggtaactactcgtggggaagtgaggctcttacccgcaagacccgcatcctggatgtggtctataatgcatcaaacaatgagcttgtgaggactcagactcttgtgaagagcgccattgtacaagttgatgctgctccattcaagcagtggtacctcactcactatggagtggacatcggtaggaagaagaaggtgcctgttgctaagaaggatgcgactgagggacaagagggtgaggctatagctgaggaaacaaagaagagtaaccatgtgcagaggaagattgagaagcgacagcaggaccgtgcactcgacactcatattgaagagcaatttggcagtgggagattgttggcctgcatttctgcccgtcctgggcagtgtggccgagctgatggctacatccttgagggtaaagagctcgagttctacatgaagaagctccagaggaagaagggcaagggtgttgcatcttagagcattcttttagctagaactgcaaaatatcttctacttgggggttttgttgttagtctttatgcatatcatttgcggacctgatgaacacttcataagtgaatcaactctcgattccaagaattgataattttcacatgcggtggttgtaattgtgatatttaggtttgctatttattgaaacttcttgtctaaagcagttttagtttaccttgaagatgattgttagaaacgagatcctatccaatctatattgctgtttggttttcactttatagctgctaacatttgattgcatagtaagaactgg

SEQ ID NO: 3851 - DNA, 3009 bp, Zea Mays
ggatcctgtccacaagttcatgacccgcccccccacccccagtggcggtggcggcagacccgccgggcagctggaccgagccgatcggtccggtcccatctcagcggcccgcggcgcctgcccaccctctcagccaaaagccccctgcacccagtccatccaaacctgtgtccgcagctctcgccagccagtcgccgccacgagaggggatgtcgacggcgagcggcgtatccgctggctccgtgctccagctgccctcctttcgggtgccggccaagagatttctgcctcggagaacagccgctggtgctccggctggtaacttttttgtgaagagagatattatatataatagaagctaccaccaattcttaccattgaagcatataggaggcttgcaagcagcagtacttccagttactccaccactattagatggtgaggggaaaaagaaacaaatggctgaagagtatgggttcacacaaattggagatgaactaccagatgatattactcttaaagatgtcatggatactttacctaaagaggtatttgaaatcaatgatgtgaaggcttggacatcagttttgatatcagttacttcttatgcgctgggtttatatttcattgctaagtctccatggtatcttcttcccttggcttgggcttggacaggcacagcagtgactgggttttttgtgataggtcatgattgtgctcacaaatcattttcaaggaataagttggttgaagatgttgttggaaccttggctttcatgccattgatatatccttatgaaccgtggagatttaagcatgaccgacatcatgccaagacaaacatgttgatagaagatactgcatggcaacctgtttggcaaaaggaaattgaatcatcaccttttctaaggaaggcaattatttttggctatggccctatcaggccatggatgtctattgctcactggttgatttggcactttgatctaaaaaaattcagaccaaatgaagttccaagggttaagataagcttagcatgtgtgtttgcattcatggcgattggatggcccttgatcattctcaaatcaggactagctggatggtttaagttctggttcatgccatggatggtttatcatttttggatgagcacttttacaatggtacatcacacagctcctcatataccattcaagtcatctgaagaatggaatgctgcacaagctcaattaaacggcacagttcattgtaactatcctcaatggatagagatcctttgccatgacataaatgtgcatgtcccacaccatatttctccaagaattccaagctataaccttcgtgctgcttatgattccatcaaacagaactggggcaagtatgtcaatgaagccaactggaattggcgattgatgaagacgatactgacgagatgccatgtgtacgacaaggagagatactatgttccgttcgatgagctcgcgcctcaggagtcccaaccaatcaaattccttaggaagttcatgccagattacgcatgatgccatcatcacagctgttgactagttgagattattcagtattgtcggcacaggtggacagtcacattttcagtgattacgcatgtcccaaaattttgactggaatactccatgttacactattattcgtgcagtaggaaagcacgtagcgtaccaaaatatttatacttcaggaaatagacaaagacattggtgatgaaaacggacagaatcgtgtggaaaacatctcttctcttgtcatttctatattttttttccggaaacagaaacacgttcaaaattcccggaattgaaaacagggttgggatatgtggttgttcggaaacaaactaatttactaataaaatacgacttgcacaggcctgctgggccgccgcaacctaagaatggacaccgtcaaatgagcccaccccttaataaaccctagcccgcctccgccgccctataatccgacgccggacgccccatgatttcgctttcttcttcccgtcgagacccaaccataccagcggcgccgcaggctgacgaggaggcggagtagagtggccggactacctcgacacctccactgcaaccatgggtatctcacgtgattcgatgcacaagcgccgtgccaccggtggaaagcagaaggcgtggcgcaagaagcgaaagtatgagcttggccgtcagcctgctaacaccaaactgtctagcaataagacagtgaggagggtccgtgtccgtggaggcaacgtgaagtggagggctctccgattggatacagagcgccattgtacaagttgatgctgctccattcaagcagtggtacctcactcactatggagtggacatcggtaggaagaagaaggtgcctgttgctaagaaggatgcgactgagggacaagagggtgaggctatagctgaggaaacaaagaagagtaaccatgtgcagaggaagattgagaagcgacagcaggaccgtgcactcgacactcatattgaagagcaatttggcagtgggagattgttggcctgcatttctgcccgtcctgggcagtgtggccgagctgatggtggcatttccttttattggccagctacatccttgagggtaaagagctcgagttctacatgaagaagctccagaggaagaagggcaagggtgttgcatcttagagcattcttttagctagaactgcaaaatatcttctacttgggggttttgttgttagtctttatgcatatcatttgcggacctgatgaacacttcataagtgaatcaactctcgattccaagaattgataattttcacatgcggtggttgtaattgtgatatttaggtttgctatttattgaaacttcttgtctaaagcagttttagtttaccttgaagatgattgttagaaacgagatcctatccaatctatattgctgtttggttttcactttatagctgctaacatttgattgcatagtaagaactgg

SEQ ID NO: 3852 - DNA, 3042 bp, Zea Mays
ggatcctgtccacaagttcatgacccgcccccccacccccagtggcggtggcggcagacccgccgggcagctggaccgagccgatcggtccggtcccatctcagcggcccgcggcgcctgcccaccctctcagccaaaagccccctgcacccagtccatccaaacctgtgtccgcagctctcgccagccagtcgccgccacgagaggggatgtcgacggcgagcggcgtatccgctggctccgtgctccagctgccctcctttcgggtgccggccaagagatttctgcctcggagaacagccgctggtgctccggctggtaacttttttgtgaagagagatattatatataatagaagctaccaccaattcttaccattgaagcatataggaggcttgcaagcagcagtacttccagttactccaccactattagatggtgaggggaaaaagaaacaaatggctgaagagtatgggttcacacaaattggagatgaactaccagatgatattactcttaaagatgtcatggatactttacctaaagaggtatttgaaatcaatgatgtgaaggcttggacatcagttttgatatcagttacttcttatgcgctgggtttatatttcattgctaagtctccatggtatcttcttcccttggcttgggcttggacaggcacagcagtgactgggttggttgaagatgttgttggaaccttggctttcatgccattgatatatccttatgaaccgtggagatttaagcatgaccgacatcatgccaagacaaacatgttgatagaagatactgcatggcaacctgtttggcaaaaggaaattgaatcatcaccttttctaaggaaggcaattatttttggctatggccctatcaggccatggatgtctattgctcactggttgatttggcactttgatctaaaaaaattcagaccaaatgaagttccaagggttaagataagcttagcatgtgtgtttgcattcatggcgattggatggcccttgatcattctcaaatcaggactagctggatggtttaagttctggttcatgccatggatggtttatcatttttggatgagcacttttacaatggtacatcacacagctcctcatataccattcaagtcatctgaagaatggaatgctgcacaagctcaattaaacggcacagttcattgtaactatcctcaatggatagagatcctttgccatgacataaatgtgcatgtcccacaccatatttctccaagaattccaagctataaccttcgtgctgcttatgattccatcaaacagaactggggcaagtatgtcaatgaagccaactggaattggcgattgatgaagacgatactgacgagatgccatgtgtacgacaaggagagatactatgttccgttcgatgagctcgcgcctcaggagtcccaaccaatcaaattccttaggaagttcatgccagattacgcatgatgccatcatcacagctgttgactagttgagattattcagtattgtcggcacaggtggacagtcacattttcagtgattacgcatgtcccaaaattttgactggaatactccatgttacactattattcgtgcagtaggaaagcacgtagcgtaccaaaatatttatacttcaggaaatagacaaagacattggtgatgaaaacggacagaatcgtgtggaaaacatctcttctcttgtcatttctatattttttttccggaaacagaaacacgttcaaaattcccggaattgaaaacagggttgggatatgtggttgttcggaaacaaactaatttactaataaaatacgacttgcacaggcctgctgggccgccgcaacctaagaatggacaccgtcaaatgagcccaccccttaataaaccctagcccgcctccgccgccctataatccgacgccggacgccccatgatttcgctttcttcttcccgtcgagacccaaccataccagcggcgccgcaggctgacgaggaggcggagtagagtggccggactacctcgacacctccactgcaaccatgggtatctcacgtgattcgatgcacaagcgccgtgccaccggtggaaagcagaaggcgtggcgcaagaagcgaaagtatgagcttggccgtcagcctgctaacaccaaactgtctagcaataagacagtgaggagggtccgtgtccgtggaggcaacgtgaagtggagggctctccgattggatacaggtaactactcgtggggaagtgaggctcttacccgcaagacccgcatcctggatgtggtctataatgcatcaaacaatgagcttgtgaggactcagactcttgtgaagagcgccattgtacaagttgatgctgctccattcaagcagtggtacctcactcactatggagtggacatcggtaggaagaagaaggtgcctgttgctaagaaggatgcgactgagggacaagagggtgaggctatagctgaggaaacaaagaagagtaaccatgtgcagaggaagattgagaagcgacagcaggaccgtgcactcgacactcatattgaagagcaatttggcagtgggagattgttggcctgcatttctgcccgtcctgggcagtgtggccgagctgatggctacatccttgagggtaaagagctcgagttctacatgaagaagctccagaggaagaagggcaagggtgttgcatcttagagcattcttttagctagaactgcaaaatatcttctacttgggggttttgttgttagtctttatgcatatcatttgcggacctgatgaacacttcataagtgaatcaactctcgattccaagaattgataattttcacatgcggtggttgtaattgtgatatttaggtttgctatttattgaaacttcttgtctaaagcagttttagtttaccttgaagatgattgttagaaacgagatcctatccaatctatattgctgtttggttttcactttatagctgctaacatttgattgcatagtaagaactgg

SEQ ID NO: 3853 - DNA, 3049 bp, Zea Mays
ggatcctgtccacaagttcatgacccgcccccccacccccagtggcggtggcggcagacccgccgggcagctggaccgagccgatcggtccggtcccatctcagcggcccgcggcgcctgcccaccctctcagccaaaagccccctgcacccagtccatccaaacctgtgtccgcagctctcgccagccagtcgccgccacgagaggggatgtcgacggcgagcggcgtatccgctggctccgtgctccagctgccctcctttcgggtgccggccaagagatttctgcctcggagaacagccgctggtgctccggctggtaacttttttgtgaagagagatattatatataatagaagctaccaccaattcttaccattgaagcatataggaggcttgcaagcagcagtacttccagttactccaccactattagatggtgaggggaaaaagaaacaaatggctgaagagtatgggttcacacaaattggagatgaactaccagatgatattactcttaaagatgtcatggatactttacctaaagaggtatttgaaatcaatgatgtgaaggcttggacatcagttttgatatcagttacttcttatgcgctgggtttatatttcattgctaagtctccatggtatcttcttcccttggcttgggcttggacaggcacagcagtgactggggaataagttggttgaagatgttgttggaaccttggctttcatgccattgatatatccttatgaaccgtggagatttaagcatgaccgacatcatgccaagacaaacatgttgatagaagatactgcatggcaacctgtttggcaaaaggaaattgaatcatcaccttttctaaggaaggcaattatttttggctatggccctatcaggccatggatgtctattgctcactggttgatttggcactttgatctaaaaaaattcagaccaaatgaagttccaagggttaagataagcttagcatgtgtgtttgcattcatggcgattggatggcccttgatcattctcaaatcaggactagctggatggtttaagttctggttcatgccatggatggtttatcatttttggatgagcacttttacaatggtacatcacacagctcctcatataccattcaagtcatctgaagaatggaatgctgcacaagctcaattaaacggcacagttcattgtaactatcctcaatggatagagatcctttgccatgacataaatgtgcatgtcccacaccatatttctccaagaattccaagctataaccttcgtgctgcttatgattccatcaaacagaactggggcaagtatgtcaatgaagccaactggaattggcgattgatgaagacgatactgacgagatgccatgtgtacgacaaggagagatactatgttccgttcgatgagctcgcgcctcaggagtcccaaccaatcaaattccttaggaagttcatgccagattacgcatgatgccatcatcacagctgttgactagttgagattattcagtattgtcggcacaggtggacagtcacattttcagtgattacgcatgtcccaaaattttgactggaatactccatgttacactattattcgtgcagtaggaaagcacgtagcgtaccaaaatatttatacttcaggaaatagacaaagacattggtgatgaaaacggacagaatcgtgtggaaaacatctcttctcttgtcatttctatattttttttccggaaacagaaacacgttcaaaattcccggaattgaaaacagggttgggatatgtggttgttcggaaacaaactaatttactaataaaatacgacttgcacaggcctgctgggccgccgcaacctaagaatggacaccgtcaaatgagcccaccccttaataaaccctagcccgcctccgccgccctataatccgacgccggacgccccatgatttcgctttcttcttcccgtcgagacccaaccataccagcggcgccgcaggctgacgaggaggcggagtagagtggccggactacctcgacacctccactgcaaccatgggtatctcacgtgattcgatgcacaagcgccgtgccaccggtggaaagcagaaggcgtggcgcaagaagcgaaagtatgagcttggccgtcagcctgctaacaccaaactgtctagcaataagacagtgaggagggtccgtgtccgtggaggcaacgtgaagtggagggctctccgattggatacaggtaactactcgtggggaagtgaggctcttacccgcaagacccgcatcctggatgtggtctataatgcatcaaacaatgagcttgtgaggactcagactcttgtgaagagcgccattgtacaagttgatgctgctccattcaagcagtggtacctcactcactatggagtggacatcggtaggaagaagaaggtgcctgttgctaagaaggatgcgactgagggacaagagggtgaggctatagctgaggaaacaaagaagagtaaccatgtgcagaggaagattgagaagcgacagcaggaccgtgcactcgacactcatattgaagagcaatttggcagtgggagattgttggcctgcatttctgcccgtcctgggcagtgtggccgagctgatggctacatccttgagggtaaagagctcgagttctacatgaagaagctccagaggaagaagggcaagggtgttgcatcttagagcattcttttagctagaactgcaaaatatcttctacttgggggttttgttgttagtctttatgcatatcatttgcggacctgatgaacacttcataagtgaatcaactctcgattccaagaattgataattttcacatgcggtggttgtaattgtgatatttaggtttgctatttattgaaacttcttgtctaaagcagttttagtttaccttgaagatgattgttagaaacgagatcctatccaatctatattgctgtttggttttcactttatagctgctaacatttgattgcatagtaagaactgg

SEQ ID NO: 3854 - DNA, 3016 bp, Zea Mays
ggatcctgtccacaagttcatgacccgcccccccacccccagtggcggtggcggcagacccgccgggcagctggaccgagccgatcggtccggtcccatctcagcggcccgcggcgcctgcccaccctctcagccaaaagccccctgcacccagtccatccaaacctgtgtccgcagctctcgccagccagtcgccgccacgagaggggatgtcgacggcgagcggcgtatccgctggctccgtgctccagctgccctcctttcgggtgccggccaagagatttctgcctcggagaacagccgctggtgctccggctggaggcttgcaagcagcagtacttccagttactccaccactattagatggtgaggggaaaaagaaacaaatggctgaagagtatgggttcacacaaattggagatgaactaccagatgatattactcttaaagatgtcatggatactttacctaaagaggtatttgaaatcaatgatgtgaaggcttggacatcagttttgatatcagttacttcttatgcgctgggtttatatttcattgctaagtctccatggtatcttcttcccttggcttgggcttggacaggcacagcagtgactgggttttttgtgataggtcatgattgtgctcacaaatcattttcaaggaataagttggttgaagatgttgttggaaccttggctttcatgccattgatatatccttatgaaccgtggagatttaagcatgaccgacatcatgccaagacaaacatgttgatagaagatactgcatggcaacctgtttggcaaaaggaaattgaatcatcaccttttctaaggaaggcaattatttttggctatggccctatcaggccatggatgtctattgctcactggttgatttggcactttgatctaaaaaaattcagaccaaatgaagttccaagggttaagataagcttagcatgtgtgtttgcattcatggcgattggatggcccttgatcattctcaaatcaggactagctggatggtttaagttctggttcatgccatggatggtttatcatttttggatgagcacttttacaatggtacatcacacagctcctcatataccattcaagtcatctgaagaatggaatgctgcacaagctcaattaaacggcacagttcattgtaactatcctcaatgagatcctttgccatgacataaatgtgcatgtcccacaccatatttctccaagaattccaagctataaccttcgtgctgcttatgattccatcaaacagaactggggcaagtatgtcaatgaagccaactggaattggcgattgatgaagacgatactgacgagatgccatgtgtacgacaaggagagatactatgttccgttcgatgagctcgcgcctcaggagtcccaaccaatcaaattccttaggaagttcatgccagattacgcatgatgccatcatcacagctgttgactagttgagattattcagtattgtcggcacaggtggacagtcacattttcagtgattacgcatgtcccaaaattttgactggaatactccatgttacactattattcgtgcagtaggaaagcacgtagcgtaccaaaatatttatacttcaggaaatagacaaagacattggtgatgaaaacggacagaatcgtgtggaaaacatctcttctcttgtcatttctatattttttttccggaaacagaaacacgttcaaaattcccggaattgaaaacagggttgggatatgtggttgttcggaaacaaactaatttactaataaaatacgacttgcacaggcctgctgggccgccgcaacctaagaatggacaccgtcaaatgagcccaccccttaataaaccctagcccgcctccgccgccctataatccgacgccggacgccccatgatttcgctttcttcttcccgtcgagacccaaccataccagcggcgccgcaggctgacgaggaggcggagtagagtggccggactacctcgacacctccactgcaaccatgggtatctcacgtgattcgatgcacaagcgccgtgccaccggtggaaagcagaaggcgtggcgcaagaagcgaaagtatgagcttggccgtcagcctgctaacaccaaactgtctagcaataagacagtgaggagggtccgtgtccgtggaggcaacgtgaagtggagggctctccgattggatacaggtaactactcgtggggaagtgaggctcttacccgcaagacccgcatcctggatgtggtctataatgcatcaaacaatgagcttgtgaggactcagactcttgtgaagagcgccattgtacaagttgatgctgctccattcaagcagtggtacctcactcactatggagtggacatcggtaggaagaagaaggtgcctgttgctaagaaggatgcgactgagggacaagagggtgaggctatagctgaggaaacaaagaagagtaaccatgtgcagaggaagattgagaagcgacagcaggaccgtgcactcgacactcatattgaagagcaatttggcagtgggagattgttggcctgcatttctgcccgtcctgggcagtgtggccgagctgatggctacatccttgagggtaaagagctcgagttctacatgaagaagctccagaggaagaagggcaagggtgttgcatcttagagcattcttttagctagaactgcaaaatatcttctacttgggggttttgttgttagtctttatgcatatcatttgcggacctgatgaacacttcataagtgaatcaactctcgattccaagaattgataattttcacatgcggtggttgtaattgtgatatttaggtttgctatttattgaaacttcttgtctaaagcagttttagtttaccttgaagatgattgttagaaacgagatcctatccaatctatattgctgtttggttttcactttatagctgctaacatttgattgcatagtaagaactgg

SEQ ID NO: 3855 - DNA, 2140 bp, Zea Mays
taccaaaaattaagatgatatttggtaggatgtgccaaaaaacgtgtagaccatcaactctgttttatttaacaaaattattcaattgtgtgttgtccagtccttgtttagagttagtcagaggacaatatttcattgaagtttcagcaacaaatatggaatgctttttttttggatattttgggataaaggattcatgttggcttaagtgtcaatcttctactagcaaatcaatttctagtgaaattaccgtgggaacatgttggcctcttcaattgaattttcaaatgagtaatggatttctattacaggatagagatcctttgccatgacataaatgtgcatgtcccacaccatatttctccaagaattccaagctataaccttcgtgctgcttatgattccatcaaacagaactggggcaagtatgtcaatgaagccaactggaattggcgattgatgaagacgatactgacgagatgccatgtgtacgacaaggagagatactatgttccgttcgatgagctcgcgcctcaggagtcccaaccaatcaaattccttaggaagttcatgccagattacgcatgatgccatcatcacagctgttgactagttgagattattcagtattgtcggcacaggtggacagtcacattttcagtgattacgcatgtcccaaaattttgactggaatactccatgttacactattattcgtgcagtaggaaagcacgtagcgtaccaaaatatttatacttcaggaaatagacaaagacattggtgatgaaaacggacagaatcgtgtggaaaacatctcttctcttgtcatttctatattttttttccggaaacagaaacacgttcaaaattcccggaattgaaaacagggttgggatatgtggttgttcggaaacaaactaatttactaataaaatacgacttgcacaggcctgctgggccgccgcaacctaagaatggacaccgtcaaatgagcccaccccttaataaaccctagcccgcctccgccgccctataatccgacgccggacgccccatgatttcgctttcttcttcccgtcgagacccaaccataccagcggcgccgcaggctgacgaggaggcggagtagagtggccggactacctcgacacctccactgcaaccatgggtatctcacgtgattcgatgcacaagcgccgtgccaccggtggaaagcagaaggcgtggcgcaagaagcgaaagtatgagcttggccgtcagcctgctaacaccaaactgtctagcaataagacagtgaggagggtccgtgtccgtggaggcaacgtgaagtggagggctctccgattggatacaggtaactactcgtggggaagtgaggctcttacccgcaagacccgcatcctggatgtggtctataatgcatcaaacaatgagcttgtgaggactcagactcttgtgaagagcgccattgtacaagttgatgctgctccattcaagcagtggtacctcactcactatggagtggacatcggtaggaagaagaaggtgcctgttgctaagaaggatgcgactgagggacaagagggtgaggctatagctgaggaaacaaagaagagtaaccatgtgcagaggaagattgagaagcgacagcaggaccgtgcactcgacactcatattgaagagcaatttggcagtgggagattgttggcctgcatttctgcccgtcctgggcagtgtggccgagctgatggctacatccttgagggtaaagagctcgagttctacatgaagaagctccagaggaagaagggcaagggtgttgcatcttagagcattcttttagctagaactgcaaaatatcttctacttgggggttttgttgttagtctttatgcatatcatttgcggacctgatgaacacttcataagtgaatcaactctcgattccaagaattgataattttcacatgcggtggttgtaattgtgatatttaggtttgctatttattgaaacttcttgtctaaagcagttttagtttaccttgaagatgattgttagaaacgagatcctatccaatctatattgctgtttggttttcactttatagctgctaacatttgattgcatagtaagaactgg

SEQ ID NO: 3856 - DNA, 2163 bp, Zea Mays
taccaaaaattaagatgatatttggtaggatgtgccaaaaaacgtgtagaccatcaactctgttttatttaacaaaattattcaattgtgtgttgtccagtccttgtttagagttagtcagaggacaatatttcattgaagtttcagcaacaaatatggaatgctttttttttggatattttgggataaaggattcatgttggcttaagtgtcaatcttctactagcaaatcaatttctagtgaaattaccgtgggaacatgttggcctcttcaattgaattttcaaatgagtaatggatttctattacaggatagagatcctttgccatgacataaatgtgcatgtcccacaccatatttctccaagaattccaagctataaccttcgtgctgcttatgattccatcaaacagaactggggcaagtatgtcaatgaagccaactggaattggcgattgatgaagacgatactgacgagatgccatgtgtacgacaaggagagatactatgttccgttcgatgagctcgcgcctcaggagtcccaaccaatcaaattccttaggaagttcatgccagattacgcatgatgccatcatcacagctgttgactagttgagattattcagtattgtcggcacaggtggacagtcacattttcagtgattacgcatgtcccaaaattttgactggaatactccatgttacactattattcgtgcagtaggaaagcacgtagcgtaccaaaatatttatacttcaggaaatagacaaagacattggtgatgaaaacggacagaatcgtgtggaaaacatctcttctcttgtcatttctatattttttttccggaaacagaaacacgttcaaaattcccggaattgaaaacagggttgggatatgtggttgttcggaaacaaactaatttactaataaaatacgacttgcacaggcctgctgggccgccgcaacctaagaatggacaccgtcaaatgagcccaccccttaataaaccctagcccgcctccgccgccctataatccgacgccggacgccccatgatttcgctttcttcttcccgtcgagacccaaccataccagcggcgccgcaggctgacgaggaggcggagtagagtggccggactacctcgacacctccactgcaaccatgggtatctcacgtgattcgatgcacaagcgccgtgccaccggtggaaagcagaaggcgtggcgcaagaagcgaaagtatgagcttggccgtcagcctgctaacaccaaactgtctagcaataagacagtgaggagggtccgtgtccgtggaggcaacgtgaagtggagggctctccgattggatacaggtaactactcgtggggaagtgaggctcttacccgcaagacccgcatcctggatgtggtctataatgcatcaaacaatgagcttgtgaggactcagactcttgtgaagagcgccattgtacaagttgatgctgctccattcaagcagtggtacctcactcactatggagtggacatcggtaggaagaagaaggtgcctgttgctaagaaggatgcgactgagggacaagagggtgaggctatagctgaggaaacaaagaagagtaaccatgtgcagaggaagattgagaagcgacagcaggaccgtgcactcgacactcatattgaagagcaatttggcagtgggagattgttggcctgcatttctgcccgtcctgggcagtgtggccgagctgatggtggcatttccttttattggccagctacatccttgagggtaaagagctcgagttctacatgaagaagctccagaggaagaagggcaagggtgttgcatcttagagcattcttttagctagaactgcaaaatatcttctacttgggggttttgttgttagtctttatgcatatcatttgcggacctgatgaacacttcataagtgaatcaactctcgattccaagaattgataattttcacatgcggtggttgtaattgtgatatttaggtttgctatttattgaaacttcttgtctaaagcagttttagtttaccttgaagatgattgttagaaacgagatcctatccaatctatattgctgtttggttttcactttatagctgctaacatttgattgcatagtaagaactgg

SEQ ID NO: 3857 - DNA, 987 bp, Zea Mays
catctctcggtgactggttgcggcagtagtaattgatttgagacttgagtccttcgattggttacatttacctccagtgctttatgaggtatgagcttggccgtcagcctgctaacaccaaactgtctagcaataagacagtgaggagggtccgtgtccgtggaggcaacgtgaagtggagggctctccgattggatacaggtaactactcgtggggaagtgaggctcttacccgcaagacccgcatcctggatgtggtctataatgcatcaaacaatgagcttgtgaggactcagactcttgtgaagagcgccattgtacaagttgatgctgctccattcaagcagtggtacctcactcactatggagtggacatcggtaggaagaagaaggtgcctgttgctaagaaggatgcgactgagggacaagagggtgaggctatagctgaggaaacaaagaagagtaaccatgtgcagaggaagattgagaagcgacagcaggaccgtgcactcgacactcatattgaagagcaatttggcagtgggagattgttggcctgcatttctgcccgtcctgggcagtgtggccgagctgatggctacatccttgagggtaaagagctcgagttctacatgaagaagctccagaggaagaagggcaagggtgttgcatcttagagcattcttttagctagaactgcaaaatatcttctacttgggggttttgttgttagtctttatgcatatcatttgcggacctgatgaacacttcataagtgaatcaactctcgattccaagaattgataattttcacatgcggtggttgtaattgtgatatttaggtttgctatttattgaaacttcttgtctaaagcagttttagtttaccttgaagatgattgttagaaacgagatcctatccaatctatattgctgtttggttttcactttatagctgctaacatttgattgcatagtaagaactgg

SEQ ID NO: 3858 - DNA, 619 bp, Zea Mays
aatcattgggccataagcaggggcgtcagtgctcgctgccctatatcaggttagctgttttggtggggatgaattgtcagatactggtgactattggaggctagaaattgaaggaagtggaaaagtatggaaaagagaccaaaaggtacgacttagacatgttgacactggaggttatctgcatagtcacagcaagaagtacaaccgccttggtggtgggcagcaagaggtctgcggtgtccgagagaagcgagctgagaacatttggttggcagcagagggtgtttatctcccggttaacggaagcaagtgaaaaagcactttcagtatttaccagttttaatgttaattagcataggatcagatattttactcgctttcattcgttcttgtttttcttaagataaatgaacatgggacatgacccctagtgatatgaaattggaatgttgggcatcgaaggtgtcgtacatgcttgtaattggatatttgtgatacatgtgtgaccgtgtagagactcagagatgcaagtgacactttgttcacaagtagagatgctgatcatcttctagatgtgacgcagaaaagacagtcgtggcaaatcttgagttttcgccgc

SEQ ID NO: 3859 - DNA, 1403 bp, Zea Mays
atcgcctcgcatgcgtgcgtgcgtgtgacgcccatcctgcgcacggccgttcctagacgccgacgaagaagaaaccgtccagtgccagggaccgccatcgcgccgtccgccggtgccgcgccgcccatctcctccgtccgccgttgccgcagcatcgccatccgagcacaacgagattgtgatctgttcctgagcttcgaggaatcgacgatcaaggtttgttgaaccactggtcctgagatcaagttcttcgagtcctacgaggttgaagaccctgagcatctgtttggtgaaagcaagtgttctctaacccattatgtcctatttactttataattcactgtcccgcgtactatgatgaacctaaggattgactagtttttatttatcttgtccttgattaccttttgggttattgtggttagcttcctgctattgctttactttaatcaacgaacatgatgagaacatttatgatacgatgatgctatctttattatgatgatgaacttgtgatactttaggggactcaggctgtttcctgagttcctctccgtaaggacctgttcattaagtgaccatccgggaaaacagtgcaaccatgagggtggtatggccaagtaattagggaagtcttatgttaggtgctggttttggtcattgggaacggagacatctgttatggctcctatatcctcgctcagggatctaggtacggcgccgtcccatggcttttcctaagggcggaggtataggttttggtacatcagatggtctctatggtaatggtggcatctgttatggctcctataatctcactcagggatctaggcatgggtatcatcccacgactttttcctgagagcggaggtataggttttggtacgtcagatagtcgctatgcaatggtcatttccaacattcgcatagtgaggaccctaggaaaaagccacatagtaaaaccttgcctactcaccttggaagtgtttaagggtctgtacaacccgaggcaaaagggataacgactcatgggtaaagtgtgcaacctctgctaagtgttatgaaactgatatatcagtcgtgctcacggttaagagcggcctcgggatcctctttgattagagatactgatggttcgagatccaatggttctattaatggtttttggttcgatgatgataatgatgttcctcgatgaggaaatgattcacgagttggttttgctaaaacctggcttctactaataataaatacctgacaaactaaaagcaactgcttgaccctaactccacataaagttagtccacctcagccaaacgggacatttgttgagtacgttgatgtgtactcacccttgctttcacaaaacaccaggttgcctttggtgcaatctatgctcatgt

SEQ ID NO: 3860 - DNA, 1594 bp, Zea Mays
ggaccgggaccaggcacaccacgcacgcagaaccctagaggcattcccaagttcgagcaatcgagctcgagccccagaggaacgagtcctgccggacgccgccacaccatctgaaactgacggcggcgggcggccgctgcttcctctcccttctccgtccagatccggcgactggcgtccctcctccgccatcttccctaccctcgacgtggcgatgagctgtgagccgtgagctgttccaacattccgggatgtagtgcagaaaggcaccagaggttggaagaagattgtaaaagcctttgggaatgatattttgctggaaagtggagaaattaacagagctctattgggacaaatcgtattttctgacccatcaaaacgtcaacttctaaaccgtcttctggcaccacatatttcttatagcattgtctgggagatagcaaaactgtggatgaaaggctgcaaggttatcatccttgacatcccgctgctgtttgagacaaagatggatagatggacgaatccaatcattgttctctgggttgatccaaaagtccagattgagaggctcatttcaagagatggatgctctgaaggacaagctcagaataggatcaatgcacagcttgcactagactggaagaaatcagaagcagacatagtgattgacaattctggttccctggatgacaccaaacagcaattccaagaagtgttgatgaaagtctcggagcccttgacatggaaggaacgcttgagatctagagatggtctgatctctgttgtcgtctttactgcagtgggcgtattacttgcccagaagaatctgctatgatcatgaaggcttagggagttaaaaatgttgatacgatgttttaaaggactggcacaactaagtaagaacccttagtaagaaccactatttttagttgtccttactggataatgggtcaagtaatgaaagtctgcatttagggattgctgggcttagccaaaatcttgttgtaccaaattgtgttgatgggctgggaattacaactatattcggactacgggctatccatgttcatgtgattttttgtaccgagtataaagcatggccatgcatgcgaatccgcactgcctaattatggaagccacttgattagaagcttgccctttagtcacagaagtgttcttttcaggcttgtcaacatttcaattttgggtacacattactctttcaatcataagtttgggggtgtttggtttcaagtttgggggtgtttagtttctggggactaatttttagtctctcaaatttattctatgctaatctctaaattaccaaatacggaaactaattagcaatttagaagggactaaaaatctctagaaaccaaacacctctttttgaaagtgatacgagtgtatttgtttttttagaaatagtatgataaatatttgccaaagtttgaaatggctgatttcaggaaacctaatacaccacttatttgtcactggacggaataatcaactctgagggctagtttaagagctaaaataccagtgggaattggaggagctaaaattctcttattttgaaaaaaaaaga

SEQ ID NO: 3861 - DNA, 1513 bp, Zea Mays
agaaacccgagtttctaattgctcaacccgaaatttgggtgaacccgagtgtactcccctagccacacatggccagtcactcgagcgtggttgagccaccgttcacgtgtgccgcgcagaactagcaggagggggaaattttgaaaagctttttcccaacattaacaggtggaacatatgctaaagaaataaggggcaagcgagaagatgaggctggtgggtttgacgggtggcatcgcatctgggaagagcactgtctctaacctctttagggactctggtgtccccgttgtggatgccgatgtcattgctcggtcttctggcaccacatatttcttatagcattgtctgggagatagcaaaactgtggatgaaaggctgcaaggttatcatccttgacatcccgctgctgtttgagacaaagatggatagatggacgaatccaatcattgttctctgggttgatccaaaagtccagattgagaggctcatttcaagagatggatgctctgaaggacaagctcagaataggatcaatgcacagcttgcactagactggaagaaatcagaagcagacatagtgattgacaattctggttccctggatgacaccaaacagcaattccaagaagtgttgatgaaagtctcggagcccttgacatggaaggaacgcttgagatctagagatggtctgatctctgttgtcgtctttactgcagtgggcgtattacttgcccagaagaatctgctatgatcatgaaggcttagggagttaaaaatgttgatacgatgttttaaaggactggcacaactaagtaagaacccttagtaagaaccactatttttagttgtccttactggataatgggtcaagtaatgaaagtctgcatttagggattgctgggcttagccaaaatcttgttgtaccaaattgtgttgatgggctgggaattacaactatattcggactacgggctatccatgttcatgtgattttttgtaccgagtataaagcatggccatgcatgcgaatccgcactgcctaattatggaagccacttgattagaagcttgccctttagtcacagaagtgttcttttcaggcttgtcaacatttcaattttgggtacacattactctttcaatcataagtttgggggtgtttggtttcaagtttgggggtgtttagtttctggggactaatttttagtctctcaaatttattctatgctaatctctaaattaccaaatacggaaactaattagcaatttagaagggactaaaaatctctagaaaccaaacacctctttttgaaagtgatacgagtgtatttgtttttttagaaatagtatgataaatatttgccaaagtttgaaatggctgatttcaggaaacctaatacaccacttatttgtcactggacggaataatcaactctgagggctagtttaagagctaaaataccagtgggaattggaggagctaaaattctcttattttgaaaaaaaaaga

SEQ ID NO: 3862 - DNA, 1609 bp, Zea Mays
gtactcccctagccacacatggccagtcactcgagcgtggttgagccaccgttcacgtgtgccgcgcagaactagcaggagggggaaattttgaaaagctttttcccaacattaacaggtggaacatatgctaaagaaataaggggcaagcgagaagatgaggctggtgggtttgacgggtggcatcgcatctgggaagagcactgtctctaacctctttagggactctggtgtccccgttgtggatgccgatgtcattgctcgggatgtagtgcagaaaggcaccagaggttggaagaagattgtaaaagcctttgggaatgatattttgctggaaagtggagaaattaacagagctctattgggacaaatcgtattttctgacccatcaaaacgtcaacttctaaaccgtcttctggcaccacatatttcttatagcattgtctgggagatagcaaaactgtggatgaaaggctgcaaggttatcatccttgacatcccgctgctgtttgagacaaagatggatagatggacgaatccaatcattgttctctgggttgatccaaaagtccagattgagaggctcatttcaagagatggatgctctgaaggacaagctcagaataggatcaatgcacagcttgcactagactggaagaaatcagaagcagacatagtgattgacaattctggttccctggatgacaccaaacagcaattccaagaagtgttgatgaaagtctcggagcccttgacatggaaggaacgcttgagatctagagatggtctgatctctgttgtcgtctttactgcagtgggcgtattacttgcccagaagaatctgctatgatcatgaaggcttagggagttaaaaatgttgatacgatgttttaaaggactggcacaactaagtaagaacccttagtaagaaccactatttttagttgtccttactggataatgggtcaagtaatgaaagtctgcatttagggattgctgggcttagccaaaatcttgttgtaccaaattgtgttgatgggctgggaattacaactatattcggactacgggctatccatgttcatgtgattttttgtaccgagtataaagcatggccatgcatgcgaatccgcactgcctaattatggaagccacttgattagaagcttgccctttagtcacagaagtgttcttttcaggcttgtcaacatttcaattttgggtacacattactctttcaatcataagtttgggggtgtttggtttcaagtttgggggtgtttagtttctggggactaatttttagtctctcaaatttattctatgctaatctctaaattaccaaatacggaaactaattagcaatttagaagggactaaaaatctctagaaaccaaacacctctttttgaaagtgatacgagtgtatttgtttttttagaaatagtatgataaatatttgccaaagtttgaaatggctgatttcaggaaacctaatacaccacttatttgtcactggacggaataatcaactctgagggctagtttaagagctaaaataccagtgggaattggaggagctaaaattctcttattttgaaaaaaaaaga

SEQ ID NO: 3863 - DNA, 1499 bp, Zea Mays
tgataatcgtccttgatggaagcaagaaataaggggcaagcgagaagatgaggctggtgggtttgacgggtggcatcgcatctgggaagagcactgtctctaacctctttagggactctggtgtccccgttgtggatgccgatgtcattgctcgggatgtagtgcagaaaggcaccagaggttggaagaagattgtaaaagcctttgggaatgatattttgctggaaagtggagaaattaacagagctctattgggacaaatcgtattttctgacccatcaaaacgtcaacttctaaaccgtcttctggcaccacatatttcttatagcattgtctgggagatagcaaaactgtggatgaaaggctgcaaggttatcatccttgacatcccgctgctgtttgagacaaagatggatagatggacgaatccaatcattgttctctgggttgatccaaaagtccagattgagaggctcatttcaagagatggatgctctgaaggacaagctcagaataggatcaatgcacagcttgcactagactggaagaaatcagaagcagacatagtgattgacaattctggttccctggatgacaccaaacagcaattccaagaagtgttgatgaaagtctcggagcccttgacatggaaggaacgcttgagatctagagatggtctgatctctgttgtcgtctttactgcagtgggcgtattacttgcccagaagaatctgctatgatcatgaaggcttagggagttaaaaatgttgatacgatgttttaaaggactggcacaactaagtaagaacccttagtaagaaccactatttttagttgtccttactggataatgggtcaagtaatgaaagtctgcatttagggattgctgggcttagccaaaatcttgttgtaccaaattgtgttgatgggctgggaattacaactatattcggactacgggctatccatgttcatgtgattttttgtaccgagtataaagcatggccatgcatgcgaatccgcactgcctaattatggaagccacttgattagaagcttgccctttagtcacagaagtgttcttttcaggcttgtcaacatttcaattttgggtacacattactctttcaatcataagtttgggggtgtttggtttcaagtttgggggtgtttagtttctggggactaatttttagtctctcaaatttattctatgctaatctctaaattaccaaatacggaaactaattagcaatttagaagggactaaaaatctctagaaaccaaacacctctttttgaaagtgatacgagtgtatttgtttttttagaaatagtatgataaatatttgccaaagtttgaaatggctgatttcaggaaacctaatacaccacttatttgtcactggacggaataatcaactctgagggctagtttaagagctaaaataccagtgggaattggaggagctaaaattctcttattttgaaaaaaaaaga

SEQ ID NO: 3864 - DNA, 530 bp, Zea Mays
tatagaattctcaatatatttgaaattggatatgtacgaaaattatctaccatttacactctagttggaggctttcgacacatgaattacgtcgtcccttaattaggctcattctggtggagagacattcttaaaattcaagaatcttataaagagttagcttgggtggagattggagatagaaaaacaacacttctgtgtcatgacaactgggatggcatgtgcaagtctgcaagattcccagaactttggtctttcgcttccatcaaagacatcactattcaccaagcaagaacggcaacctcgcatgagatgttccacactcctctgtctgttgaagcttttgagcagtttcatgctttacaagacttattggcaaatcttccgcaacatgatcagagaggcaaatggctctgcaatggttcctctagcttgttttcctcacagaaggcctatactcacatgtctggcaaccagtggacccacatgtctggcaaccagtggacccacctcatcttctcctggttgtg

SEQ ID NO: 3865 - DNA, 1891 bp, Zea Mays
ttcccttgccggtacttgggtctccctctttccatccataagttaaacaaacataattttctgactttggttgaaagggttgctgatcggctgccgcattggaaggcggatctaatgactaggtcagggagaagaatcctggttcaacatgtgcttacaggcatgtctatttatgtggcaatggcagttgacatcccccattgggctttggaggcgattgataaaataagaaaaggatttctctggaagggtagaaaagaagttgaaggggggcactgtttggtagcatggggaaaggtttgtagaccccttaatctgggaggcctaggtatttctagtctacaggagctctgctgggctctccgaatgaggtggctgtggctgcaaaaaactgagcctgggcgcccttggtctggcctttctattcaaatcccggccaaggcccgagctttcttttccagggtcctgatttctgaagtgggggtggtgcaaacaccctgttctggactgataggtggttgcatggggaaagaatttctgagctggccctgaggctttttggcataattcctaaaagattggctcagaaacgaactgtgaaagaagctttatccaatgctcgatggattgatgacatccagggggccctcactgttgaagctttatcagactatcttcgtctttgggagatgctttcaggctttgagttgcatcctgacagggaggataagcaaattttcagcattgctccagatggaagatactctgcaaggtctgcctgtaaaggtctttttatgggatcatgctattttgggcactataagcgagtgtggaaaacttgggcgccaccaaaatgccgtttttttcatttggcttgttgctcagaacagatgctggacagcagatagactcgccaagagaggattaaatcacccaaacaaatgccccttatgtgatcagaatgctgaatctataaatcatctgcttgtctcgtgtcgttgccagggttttctggtataaggtgctaagaaagtttggtatgcactccttagctcctcagccaggtgctaccttgttatagactctttctatggtcagcagtaccaaaggcgcagaaaaggctaggagcagcaacagcagcaaaaggaatcaggagaatagaaaggagaggagatatgatttagtttgtttcctatattagcagattgccttaagaataaattaggagagtgtttccctcaattaagagatattatctagtttgtttccctgttagcatatttccttaagtaaggtttccttgaagagaaagaggtgctagctatataaagcaccatagtttgtaataggagatatcgaagaagaatagatctcccagagagggcgatctccttcggtgacctagactggagatcgacctcctttggttcctctttccccatagtccattgagtctctttccctctcgcttcagctcggtgtggtgttgatttcctatttcttcccccattccacatcatacctcctttttggattggtgggaaaatgcctcagaaatagtgaatgggctctccaagaagggtctcaatgcccttatcattttgggagcttggctgatctggcttcatcgcaataggtgtgtttttgacaatgggtctcctagcctgcctttaatcctcaagcagtttgaagatgacaggagtgtgtgggaggctgctggtgccaagggattatcctacctgacagcccctcttcctgctaattgaggaatggaggcatctttgtctctttgggttggtggctgtgttcctatggacctgtttatgtatgcatgtttttggcctccgtaaggagtccttagtttttttattttgtattttttatgttgtat

SEQ ID NO: 3866 - DNA, 2171 bp, Zea Mays
aaaaaaggcttgcaaaaaggagaggatcatctagtagtattctagctctacctgctttccccactcgtgctctcgccattcgctcgaaccccgaagaactggcagtggcaggttactagaggatcactactttgaactcattaaagtgtctaatgatggctgctgttttaaaaacaagtggcagtttttgtagtacacaacagcagcattttcagcaatcaagaagggatcagtttttgcatggttcttattcaaatttcaaacattgcaaaagcaagaagataataaagcctgctccactgtgtgctagagtgacttcctcgaaagtggaactagatgttaaggatccatattggaagcagaagtttcaggaagactgggaaagccggtttgatttgccaagtattactgatatatatgatctgaaaccaaggccaactacattctcactcaagaaaaacagaactcttacaggtgatgaaaatgtggatatgtggaatggttatgttaacaatgatgatcgggcacttttgaaggtgataaagtattcatcgcctacttctgctggagcagagtgtgttgatcttgactgtagctgggtggagcaatgggtgcatcgagcaggaccacgcaaggagatatactatgagccagaggaagtaaaagctgctatagttacctgtggaggtctatgtcctggtttgaatgatgtcatcagacagatagtattcaccctagagacctatggtgttaagaatattgttggaattccatttggttatcgtggatttttcgaaaagggcctcaaagaaatgccgctttcacgtggtctagtggagaatataaatcttaatggtggaagttttcttggtgtttctcgcggtggagctaaaactagtgagattgttgatagtatacaggccagaaggattgacatgctttttgtacttggtggaaatggtacccatgcaggagcaaatgctatccatgaagaggttaaggaatatgtttctattattgttttcatttatcactcagtattatgttttcctgcctatatttgacgtgttaagaagttaagtgtttgtaaatgaattatccttggattttttttggaatccttttgagcctttctcattggaagccaaaataggtgcagacacgtgtgtgcataaaaaacatgttttactcttagtttactttgtcttcttgatatatcatatcgaaggttacatcaatttatattccccacaattacagtgccgtaagagaaagctgaaggtttcagttgtagcagttccaaaaacaatcgacaatgatatacttttgatggataaaacatttggttttgatacagctgttgaagaagcccaacgagccattaattccgcatatatagaggcacgtagtgcttaccatggtattggcttggtcaaattaatgggaagaagcagcgggtttattgcaatgcacgcttccctttcaagtgggcaggtcgatgtctgcttaatacctgaggtcccgttcactctagatggagaatttggtgttttgcggcaacttgagcatttgctaaagagtaagggattttgtgtggtttgtgttgcagaagctgctggacaagatctactccaagaatcaggtgcgactgatgcatcaggaaatgtgatattgagtgacattggtgttcacatgcaacagaagattaagatgcatttcaaggacattggtgttccagctgacgtgaaatacatcgatccaacttacatggttcgtgcatgccgtgccaacgcatctgatgcaattttgtgtaccgtgctcggacaaaatgctgtccatggggcatttgctggtttcagcggcatcacttcttgcatctgcaacacgcactacgtgtaccttcccatcacggaggtcatcacagcaccgaagcgcgtgaacccgaacagcaggatgtggcatcggtgtctcacgtccactggtcagcctgacttccactgatctgccatcgtcactgcataaccaaattcgcatagtttgaggtggtgttgtccattgttccgaagctctggtatttgagaaatttgcatatttaacactataaagatgtgactccacagatttgccattttcaagatgggctacgcaaaattgccacctgtttcattgtc

SEQ ID NO: 3867 - DNA, 1701 bp, Zea Mays
aaaaaaggcttgcaaaaaggagaggatcatctagtagtattctagctctacctgctttccccactcgtgctctcgccattcgctcgaaccccgaagaactggcagtggcaggttactagaggatcactactttgaactcattaaagtgtctaatgatggctgctgttttaaaaacaagtggcagtttttgtagtacacaacagcagcattttcagcaatcaagaagggatcagtttttgcatggttcttattcaaatttcaaacattgcaaaagcaagaagataataaagcctgctccactgtgtgctagagtgacttcctcgaaagtggaactagatgttaaggatccatattggaagcagaagtttcaggaagactgggaaagccggtttgatttgccaagtattactgatatatatgatctgaaaccaaggccaactacattctcactcaagaaaaacagaactcttacaggtgatgaaaatgtggatatgtggaatggttatgttaacaatgatgatcgggcacttttgaaggtgataaagtattcatcgcctacttctgctggagcagagtgtgttgatcttgactgtagctgggtggagcaatgggtgcatcgagcaggaccacgcaaggagatatactatgagccagaggaagtaaaagctgctatagttacctgtggaggtctatgtcctggtttgaatgatgtcatcagacagatagtattcaccctagagacctatggtgttaagaatattgttggaattccatttggttatcgtggatttttcgaaaagggcctcaaagaaatgccgctttcacgtggtctagtggagaatataaatcttaatggtggaagttttcttggtgtttctcgcggtggagctaaaactagtgagattgttgatagtatacaggccagaaggattgacatgctttttgtacttggtggaaatggtacccatgcaggagcaaatgctatccatgaagagctgttgaagaagcccaacgagccattaattccgcatatatagaggcacgtagtgcttaccatggtattggcttggtcaaattaatgggaagaagcagcgggtttattgcaatgcacgcttccctttcaagtgggcaggtcgatgtctgcttaatacctgaggtcccgttcactctagatggagaatttggtgttttgcggcaacttgagcatttgctaaagagtaagggattttgtgtggtttgtgttgcagaagctgctggacaagatctactccaagaatcaggtgcgactgatgcatcaggaaatgtgatattgagtgacattggtgttcacatgcaacagaagattaagatgcatttcaaggacattggtgttccagctgacgtgaaatacatcgatccaacttacatggttcgtgcatgccgtgccaacgcatctgatgcaattttgtgtaccgtgctcggacaaaatgctgtccatggggcatttgctggtttcagcggcatcacttcttgcatctgcaacacgcactacgtgtaccttcccatcacggaggtcatcacagcaccgaagcgcgtgaacccgaacagcaggatgtggcatcggtgtctcacgtccactggtcagcctgacttccactgatctgccatcgtcactgcataaccaaattcgcatagtttgagaaacacgggttatagaggatg

SEQ ID NO: 3868 - DNA, 2196 bp, Zea Mays
gtagtattctagctctacctgctttccccactcgtgctctcgccattcgctcgaaccccgaagaactggcagtggcaggttactagaggatcactactttgaactcattaaagtgtctaatgatggctgctgttttaaaaacaagtggcagtttttgtagtacacaacagcagcattttcagcaatcaagaagggatcagtttttgcatggttcttattcaaatttcaaacattgcaaaagcaagaagataataaagcctgctccactgtgtgctagagtgacttcctcgaaagtggaactagatgttaaggatccatattggaagcagaagtttcaggaagactgggaaagccggtttgatttgccaagtattactgatatatatgatctgaaaccaaggccaactacattctcactcaagaaaaacagaactcttacaggtgatgaaaatgtggatatgtggaatggttatgttaacaatgatgatcgggcacttttgaaggtgataaagtattcatcgcctacttctgctggagcagagtgtgttgatcttgactgtagctgggtggagcaatgggtgcatcgagcaggaccacgcaaggagatatactatgagccagaggaagtaaaagctgctatagttacctgtggaggtctatgtcctggtttgaatgatgtcatcagacagatagtattcaccctagagacctatggtgttaagaatattgttggaattccatttggttatcgtggatttttcgaaaagggcctcaaagaaatgccgctttcacgtggtctagtggagaatataaatcttaatggtggaagttttcttggtgtttctcgcggtggagctaaaactagtgagattgttgatagtatacaggagcaaatgctatccatgaagaggttaaggaatatgtttctattattgttttcatttatcactcagtattatgttttcctgcctatatttgacgtgttaagaagttaagtgtttgtaaatgaattatccttggattttttttggaatccttttgagcctttctcattggaagccaaaataggtgcagacacgtgtgtgcataaaaaacatgttttactcttagtttactttgtcttcttgatatatcatatcgaaggttacatcaatttatattccccacaattacagtgccgtaagagaaagctgaaggtttcagttgtagcagttccaaaaacaatcgacaatgatatacttttgatggataaaacatttggttttgatacagctgttgaagaagcccaacgagccattaattccgcatatatagaggcacgtagtgcttaccatggtattggcttggtcaaattaatgggaagaagcagcgggtttattgcaatgcacgcttccctttcaagtgggcaggtcgatgtctgcttaatacctgaggtcccgttcactctagatggagaatttggtgttttgcggcaacttgagcatttgctaaagagtaagggattttgtgtggtttgtgttgcagaagctgctggacaagatctactccaagaatcaggtgcgactgatgcatcaggaaatgtgatattgagtgacattggtgttcacatgcaacagaagattaagatgcatttcaaggacattggtgttccagctgacgtgaaatacatcgatccaacttacatggttcgtgcatgccgtgccaacgcatctgatgcaattttgtgtaccgtgctcggacaaaatgctgtccatggggcatttgctggtttcagcggcatcacttcttgcatctgcaacacgcactacgtgtaccttcccatcacggaggtcatcacagcaccgaagcgcgtgaacccgaacagcaggatgtggcatcggtgtctcacgtccactggtcagcctgacttccactgatctgccatcgtcactgcataaccaaattcgcatagtttgaggtactagatgatttacaattctttcgctgatgtgctccattcacatcgtgaggttccaagattagttaataatgctaaactgagtggacttgtctggtttgttcacgaaggtggtgttgtccattgttccgaagctctggtatttgagaaatttgcatatttaacactataaagatgtgactccacagatttgccattttcaagatgggctacgcaaaattgccacctgtttcattgtc

SEQ ID NO: 3869 - DNA, 1931 bp, Zea Mays
gtagtattctagctctacctgctttccccactcgtgctctcgccattcgctcgaaccccgaagaactggcagtggcaggttactagaggatcactactttgaactcattaaagtgtctaatgatggctgctgttttaaaaacaagtggcagtttttgtagtacacaacagcagcattttcagcaatcaagaagggatcagtttttgcatggttcttattcaaatttcaaacattgcaaaagcaagaagataataaagcctgctccactgtgtgctagagtgacttcctcgaaagtggaactagatgttaaggatccatattggaagcagaagtttcaggaagactgggaaagccggtttgatttgccaagtattactgatatatatgatctgaaaccaaggccaactacattctcactcaagaaaaacagaactcttacaggtgatgaaaatgtggatatgtggaatggttatgttaacaatgatgatcgggcacttttgaaggtgataaagtattcatcgcctacttctgctggagcagagtgtgttgatcttgactgtagctgggtggagcaatgggtgcatcgagcaggaccacgcaaggagatatactatgagccagaggaagtaaaagctgctatagttacctgtggaggtctatgtcctggtttgaatgatgtcatcagacagatagtattcaccctagagacctatggtgttaagaatattgttggaattccatttggttatcgtggatttttcgaaaagggcctcaaagaaatgccgctttcacgtggtctagtggagaatataaatcttaatggtggaagttttcttggtgtttctcgcggtggagctaaaactagtgagattgttgatagtatacaggagcaaatgctatccatgaagagtgccgtaagagaaagctgaaggtttcagttgtagcagttccaaaaacaatcgacaatgatatacttttgatggataaaacatttggttttgatacagctgttgaagaagcccaacgagccattaattccgcatatatagaggcacgtagtgcttaccatggtattggcttggtcaaattaatgggaagaagcagcgggtttattgcaatgcacgcttccctttcaagtgggcaggtcgatgtctgcttaatacctgaggtcccgttcactctagatggagaatttggtgttttgcggcaacttgagcatttgctaaagagtaagggattttgtgtggtttgtgttgcagaagctgctggacaagatctactccaagaatcaggtgcgactgatgcatcaggaaatgtgatattgagtgacattggtgttcacatgcaacagaagattaagatgcatttcaaggacattggtgttccagctgacgtgaaatacatcgatccaacttacatggttcgtgcatgccgtgccaacgcatctgatgcaattttgtgtaccgtgctcggacaaaatgctgtccatggggcatttgctggtttcagcggcatcacttcttgcatctgcaacacgcactacgtgtaccttcccatcacggaggtcatcacagcaccgaagcgcgtgaacccgaacagcaggatgtggcatcggtgtctcacgtccactggtcagcctgacttccactgatctgccatcgtcactgcataaccaaattcgcatagtttgaggtactagatgatttacaattctttcgctgatgtgctccattcacatcgtgaggttccaagattagttaataatgctaaactgagtggacttgtctggtttgttcacgaaggtggtgttgtccattgttccgaagctctggtatttgagaaatttgcatatttaacactataaagatgtgactccacagatttgccattttcaagatgggctacgcaaaattgccacctgtttcattgtc

SEQ ID NO: 3870 - DNA, 1869 bp, Zea Mays
gtagtattctagctctacctgctttccccactcgtgctctcgccattcgctcgaaccccgaagaactggcagtggcagagtgacttcctcgaaagtggaactagatgttaaggatccatattggaagcagaagtttcaggaagactgggaaagccggtttgatttgccaagtattactgatatatatgatctgaaaccaaggccaactacattctcactcaagaaaaacagaactcttacaggtgatgaaaatgtggatatgtggaatggttatgttaacaatgatgatcgggcacttttgaaggtgataaagtattcatcgcctacttctgctggagcagagtgtgttgatcttgactgtagctgggtggagcaatgggtgcatcgagcaggaccacgcaaggagatatactatgagccagaggaagtaaaagctgctatagttacctgtggaggtctatgtcctggtttgaatgatgtcatcagacaggtccttatcttaagaagtgtccagacatttctgcatttcaaacccaaaattcttgacattcatgtcgaacatcaacatgaataagatagtattcaccctagagacctatggtgttaagaatattgttggaattccatttggttatcgtggatttttcgaaaagggcctcaaagaaatgccgctttcacgtggtctagtggagaatataaatcttaatggtggaagttttcttggtgtttctcgcggtggagctaaaactagtgagattgttgatagtatacaggccagaaggattgacatgctttttgtacttggtggaaatggtacccatgcaggagcaaatgctatccatgaagagtgccgtaagagaaagctgaaggtttcagttgtagcagttccaaaaacaatcgacaatgatatacttttgatggataaaacatttggttttgatacagctgttgaagaagcccaacgagccattaattccgcatatatagaggcacgtagtgcttaccatggtattggcttggtcaaattaatgggaagaagcagcgggtttattgcaatgcacgcttccctttcaagtgggcaggtcgatgtctgcttaatacctgaggtcccgttcactctagatggagaatttggtgttttgcggcaacttgagcatttgctaaagagtaagggattttgtgtggtttgtgttgcagaagctgctggacaagatctactccaagaatcaggtgcgactgatgcatcaggaaatgtgatattgagtgacattggtgttcacatgcaacagaagattaagatgcatttcaaggacattggtgttccagctgacgtgaaatacatcgatccaacttacatggttcgtgcatgccgtgccaacgcatctgatgcaattttgtgtaccgtgctcggacaaaatgctgtccatggggcatttgctggtttcagcggcatcacttcttgcatctgcaacacgcactacgtgtaccttcccatcacggaggtcatcacagcaccgaagcgcgtgaacccgaacagcaggatgtggcatcggtgtctcacgtccactggtcagcctgacttccactgatctgccatcgtcactgcataaccaaattcgcatagtttgaggtactagatgatttacaattctttcgctgatgtgctccattcacatcgtgaggttccaagattagttaataatgctaaactgagtggacttgtctggtttgttcacgaaggtggtgttgtccattgttccgaagctctggtatttgagaaatttgcatatttaacactataaagatgtgactccacagatttgccattttcaagatgggctacgcaaaattgccacctgtttcattgtc

SEQ ID NO: 3871 - DNA, 2273 bp, Zea Mays
gtagtattctagctctacctgctttccccactcgtgctctcgccattcgctcgaaccccgaagaactggcagtggcaggttactagaggatcactactttgaactcattaaagtgtctaatgatggctgctgttttaaaaacaagtggcagtttttgtagtacacaacagcagcattttcagcaatcaagaagggatcagtttttgcatggttcttattcaaatttcaaacattgcaaaagcaagaagataataaagcctgctccactgtgtgctagagtgacttcctcgaaagtggaactagatgttaaggatccatattggaagcagaagtttcaggaagactgggaaagccggtttgatttgccaagtattactgatatatatgatctgaaaccaaggccaactacattctcactcaagaaaaacagaactcttacaggtgatgaaaatgtggatatgtggaatggttatgttaacaatgatgatcgggcacttttgaaggtgataaagtattcatcgcctacttctgctggagcagagtgtgttgatcttgactgtagctgggtggagcaatgggtgcatcgagcaggaccacgcaaggagatatactatgagccagaggaagtaaaagctgctatagttacctgtggaggtctatgtcctggtttgaatgatgtcatcagacagatagtattcaccctagagacctatggtgttaagaatattgttggaattccatttggttatcgtggatttttcgaaaagggcctcaaagaaatgccgctttcacgtggtctagtggagaatataaatcttaatggtggaagttttcttggtgtttctcgcggtggagctaaaactagtgagattgttgatagtatacaggccagaaggattgacatgctttttgtacttggtggaaatggtacccatgcaggagcaaatgctatccatgaagaggttaaggaatatgtttctattattgttttcatttatcactcagtattatgttttcctgcctatatttgacgtgttaagaagttaagtgtttgtaaatgaattatccttggattttttttggaatccttttgagcctttctcattggaagccaaaataggtgcagacacgtgtgtgcataaaaaacatgttttactcttagtttactttgtcttcttgatatatcatatcgaaggttacatcaatttatattccccacaattacagtgccgtaagagaaagctgaaggtttcagttgtagcagttccaaaaacaatcgacaatgatatacttttgatggataaaacatttggttttgatacagctgttgaagaagcccaacgagccattaattccgcatatatagaggcacgtagtgcttaccatggtattggcttggtcaaattaatgggaagaagcagcgggtttattgcaatgcacgcttccctttcaagtgggcaggtcgatgtctgcttaatacctgaggtcccgttcactctagatggagaatttggtgttttgcggcaacttgagcatttgctaaagagtaagggattttgtgtggtttgtgttgcagaagctgctggacaagtatgctaaaattcacagctgtctggatctactccaagaatcaggtgcgactgatgcatcaggaaatgtgatattgagtgacattggtgttcacatgcaacagaagattaagatgcatttcaaggacattggtgttccagctgacgtgaaatacatcgatccaacttacatggttcgtgcatgccgtgccaacgcatctgatgcaattttgtgtaccgtgctcggacaaaatgctgtccatggggcatttgctggtttcagcggcatcacttcttgcatctgcaacacgcactacgtgtaccttcccatcacggaggtcatcacagcaccgaagcgcgtgaacccgaacagcaggatgtggcatcggtgtctcacgtccactggtcagcctgacttccactgatctgccatcgtcactgcataaccaaattcgcatagtttgaggtactagatgatttacaattctttcgctgatgtgctccattcacatcgtgaggttccaagattagttaataatgctaaactgagtggacttgtctggtttgttcacgaaggtggtgttgtccattgttccgaagctctggtatttgagaaatttgcatatttaacactataaagatgtgactccacagatttgccattttcaagatgggctacgcaaaattgccacctgtttcattgtc

SEQ ID NO: 3872 - DNA, 2333 bp, Zea Mays
gtagtattctagctctacctgctttccccactcgtgctctcgccattcgctcgaaccccgaagaactggcagtggcaggttactagaggatcactactttgaactcattaaagtgtctaatgatggctgctgttttaaaaacaagtggcagtttttgtagtacacaacagcagcattttcagcaatcaagaagggatcagtttttgcatggttcttattcaaatttcaaacattgcaaaagcaagaagataataaagcctgctccactgtgtgctagagtgacttcctcgaaagtggaactagatgttaaggatccatattggaagcagaagtttcaggaagactgggaaagccggtttgatttgccaagtattactgatatatatgatctgaaaccaaggccaactacattctcactcaagaaaaacagaactcttacaggtgatgaaaatgtggatatgtggaatggttatgttaacaatgatgatcgggcacttttgaaggtgataaagtattcatcgcctacttctgctggagcagagtgtgttgatcttgactgtagctgggtggagcaatgggtgcatcgagcaggaccacgcaaggagatatactatgagccagaggaagtaaaagctgctatagttacctgtggaggtctatgtcctggtttgaatgatgtcatcagacaggtccttatcttaagaagtgtccagacatttctgcatttcaaacccaaaattcttgacattcatgtcgaacatcaacatgaataagatagtattcaccctagagacctatggtgttaagaatattgttggaattccatttggttatcgtggatttttcgaaaagggcctcaaagaaatgccgctttcacgtggtctagtggagaatataaatcttaatggtggaagttttcttggtgtttctcgcggtggagctaaaactagtgagattgttgatagtatacaggccagaaggattgacatgctttttgtacttggtggaaatggtacccatgcaggagcaaatgctatccatgaagaggttaaggaatatgtttctattattgttttcatttatcactcagtattatgttttcctgcctatatttgacgtgttaagaagttaagtgtttgtaaatgaattatccttggattttttttggaatccttttgagcctttctcattggaagccaaaataggtgcagacacgtgtgtgcataaaaaacatgttttactcttagtttactttgtcttcttgatatatcatatcgaaggttacatcaatttatattccccacaattacagtgccgtaagagaaagctgaaggtttcagttgtagcagttccaaaaacaatcgacaatgatatacttttgatggataaaacatttggttttgatacagctgttgaagaagcccaacgagccattaattccgcatatatagaggcacgtagtgcttaccatggtattggcttggtcaaattaatgggaagaagcagcgggtttattgcaatgcacgcttccctttcaagtgggcaggtcgatgtctgcttaatacctgaggtcccgttcactctagatggagaatttggtgttttgcggcaacttgagcatttgctaaagagtaagggattttgtgtggtttgtgttgcagaagctgctggacaagatctactccaagaatcaggtgcgactgatgcatcaggaaatgtgatattgagtgacattggtgttcacatgcaacagaagattaagatgcatttcaaggacattggtgttccagctgacgtgaaatacatcgatccaacttacatggttcgtgcatgccgtgccaacgcatctgatgcaattttgtgtaccgtgctcggacaaaatgctgtccatggggcatttgctggtttcagcggcatcacttcttgcatctgcaacacgcactacgtgtaccttcccatcacggaggtcatcacagcaccgaagcgcgtgaacccgaacagcaggatgtggcatcggtgtctcacgtccactggtcagcctgacttccactgatctgccatcgtcactgcataaccaaattcgcatagtttgaggtactagatgatttacaattctttcgctgatgtgctccattcacatcgtgaggttccaagattagttaataatgctaaactgagtggacttgtctggtttgttcacgaaggtggtgttgtccattgttccgaagctctggtatttgagaaatttgcatatttaacactataaagatgtgactccacagatttgccattttcaagatgggctacgcaaaattgccacctgtttcattgtc

SEQ ID NO: 3873 - DNA, 2011 bp, Zea Mays
tcgctccttcggccatgtctttcttccttctcactccatccgcgtcatcgctttgagtcgtcgtgctctcattctcttcgttttccatcactttcattcatcttctctgtgacatccttttccgagcactttttccttccgtcccttgtcatcggctccgccgcctcctgtatcgtcgctttcatcgcccgctctgattgttgctcggaaagagtcgccgacgaagacaacacccggcaagcgcaggctcccatctcccgctgtgtgtcggcgtgccgcgccttcttccccgtcgtgagggacctccaccgtgttccatgccctgtcgcccaagaagcggatccgcacgggttgacgggcacttaggttccgagttgcctggtgtacgtgcaggacgacgtgcgggctcagcactcaccggcatgcactcccccacgcgctaaatgtagtagccagtgttgtctcggggctctgggtgttcgcgcagggagaggtgactgtcgcggcggctacatcttcttctcatagtttggttgcaaggccaaggcggtgctgtaaaatttggtaagaaaggggaatgagctcgcgattacaagatctgttcttcgcccgcagccacaacgttctgcttgtatccttcctatgtttgtttcgtattttaatgtgcttcatcgtttttttttctcgtagcatgttcgtgtcttctttaccagatagatgtcgtgacgcctacctttgtcttctccaatttgcagtgtgcccatttgcttacatttaccttctcccatttgctttgttcatttacggttctgcacttttctctcttctcttcttgtttcctcagcctctctggaatccctttgtggatcacgacagctccaaacatccgatttggtgagtttgtgttgtattcggaattttgccaaaaaaaatcttattaccccatttcgtctctagttgatctggttagaggacggtttctgttttttgttttcccatattttctcccattttcccttcttcttttatagttcctttagatcacttcatgcagacaaagcatatggaaagcagcgtgcaaccaattgcttgatacaaatgtatgttttgttagagcctaagctccaacgtacttttcaagaatactgcatcattggtatgtaaaaggaataaaattgtcttttgaatactttgtggttgtatccttctcttcaaatacgtcgaataattcccctgggccttaaagacttcagtagcgaggtaattatcacttacattaacatgtgtttatttcgtgattagtctgttgcatggtatgcattgattaaatttctaattcgtccatggacctccttttgtaaaattggctttatgttttccatgtgcttcaagaattgtttatatagctttgcatatacagagacatatcacttcatatctgatttgggtatagatataaatatgtgtgtatataattcttttcatgtactttatgatttgtttatataactatgtatatataatgagagatcactttatagatcatctaggcaacatataaatatgtgcgcatacacataggtttcctatgtgcttcatgatttgtttgtattatcactttatcactctttcagccatcgatgcgtcatctcaaactgtaatcaccttgaaaattcgaggcgacggaaaagttaggtggcatcaccagtgatggcgttcgatccttgaaatgtacatggtgtgataagaataagcgtcactagagaatgagaattccatggcgcagcaaatgatggtcctctccgtcatgtcaacatgatcatatctgatgaacaagtactctggtgatctatatccactcatatacatttatggtagcaagatgttgtacctaatgtgcttttttatcacctgttaatactgatgtcagttgtacacatggttccgattacttatatcctctgatgtacttctactcagcaccatgttctaacttacacattgcttagtc

SEQ ID NO: 3874 - DNA, 1025 bp, Zea Mays
ggagaaacgtggagaaacgacctccatcgctgaagtcgaagggacgtgttgctctcgtgcgcgcaccatgggtcggttggatcccgggcatggaaccacttcatagtcttgcatcttcatcggcccaagctcatcctctagacgcttattcgtcgcttagtgcagaagatcgacataagcgtgagttggggttcccctcggacctcatcggttctcattctttcccacacttcgtcgtgtttctctctcgcctctggtctctccctgcctcctcccgttccagctatcggggtggctggtattcctcgttgttgcatccacctgtggtggatgaagagtggtcgtgtctgggtcgctgctccatgtcgtcgctgatggaccaaaagaacagaaaccctaattgggatcgttgggggcagaaggatttggctcaagggtcgcaatcgtggggcggaaaaccacaatctcagttggcgattgaagccctctctccggggaaatcagaatccaaagaagatatcatgacatcttcatctggagatggaggtcattcagttggattcctgggctattcgacagaaagagaaggaaaaaagatggtggtccaaggaagcaagcttatcagaaggacgacaagtgaagttttaggctgagcctatggctggagacctagagatcgtcacattactgggtagcgggttccagcggttttgctattctgctcgtcttctagcttacctatatgccgatggctttgctgttgctctgtaaatgttgtgtgtcttgcctcctgtctggagtgcaaatactataataagcaaaatttatggttcctcttggggcatgtggtttgttgcgttaggtcacttttactatattgagttagctcggtattgtagggggtacctgatgtggcgtgtctgaactagttgcctgtcagttgggctggttgcttatggttgtgaatcttgtaatgaactctttgttcttaatgaattagggggctctgccccgttgtaaaaaaa

SEQ ID NO: 3875 - DNA, 791 bp, Zea Mays
cgtgtttctctctcgcctctggtctctccctgcctcctcccgttccagctatcggggtggctggtattcctcgttgttgcatccacctgtggtggatgaagagtggtcgtgtctgggtcgctgctccatgtcgtcgctgatggaccaaaagaacagaaaccctaattgggatcgttgggggcagaaggatttggctcaagggtcgcaatcgtggggcggaaaaccacaatctcagttggcgattgaagccctctctccggggaaatcagaatccaaagaagatatcatgacatcttcatctggagatggaggtcattcaggttggattcctgggctattcgacagaaagagaaggaaaaaagatggtggtccaaggaagcaagcttatcagaaggacgacaagtgaagttttaggctgagcctatggctggagacctagagatcgtcacattactgggtagcgggttccagcggttttgctattctgctcgtcttctagcttacctatatgccgatggctttgctgttgctctgtaaatgttgtgtgtcttgcctcctgtctggagtgcaaatactataataagcaaaatttatggttcctcttggggcatgtggtttgttgcgttaggtcacttttactatattgagttagctcggtattgtagggggtacctgatgtggcgtgtctgaactagttgcctgtcagttgggctggttgcttatggttgtgaatcttgtaatgaactctttgttcttaatgaattagggggctctgccccgttgtaaaaaaa

SEQ ID NO: 3876 - DNA, 1501 bp, Zea Mays
gcaagcgatcactcgcttcttgaattgcacgattaggtttccgtttcctttttcttcgtccccgtgggaatatgcccccgcgcgctactgccattttgttgccatacgcatgcgtgcgcgccaccgtcgccttgccgtggatccacatccaccctagctgcctcccgatcccacgcccaaagcttcctataaattcgcacccccagcgcctcgcaaccttcatctcccacctcgatccctgcgctgcaagcaacaaagttctactctgtccacccgtccatctagctcccaagaaccaacccgtaccagcgctatccggccggccatggcggcggcgcgccggctctccctgcccctcgtcctgctggtcgtcctggccgtcgccgggcgcgcggcggcgcaggactacgacttcttctacctcgtgctgcagtggccgggggcctactgcgacaccaagcagagctgctgctaccccaagtccggcaagccggcggcggacttcgggatccacggcctctggcccaaccgcgacgacggcacgtacccgcagaactgcagccccgacaacgccttcaacccgtcgaaggtgcatgcacacgcgattcttcatcttccccttcccctcttcctctcgcgccgccccgccccgcatgtgtttgatcatgccgcggcggcgtgttcttgggtttcatccgcgcgtgccaagtgccaacacgtacgtcttttgcattgtgtcctcacgacgtacgttacgctttagattgttggcgcttttgctgttcattcggcgaggtctttctgttctctgctattggcaaaaaaaaaaaaaaaaatccgatgctgactgatgctggcatgtactgtacgttccaggtgagcgacctgctgagcagcctccgcgccaagtggccgacgctggcgtgcccgtccaacgacgggctgcgcttctggggccacgagtgggagaagcacggcacctgcgcagccgacgtcttcgacgagcacggctacttccaggccgcgctgcgcctccgcgaccagctgggagtcctcggcgcgctcacctccgccggcgtcaagcccgacggcggctactacacgctgagccagatcaagggcgccatccgccagggcaccggcttcgagccctacgtggagtgcaaccgcgacgaggccggcaacagccagctctaccagctctacttctgcgtcgacgccgccggcgacagcttcgtcgactgccccgtcctccccagcggcaggccctgcggcaaccggatcgagttcccggctttctaagctaactcactcttcacgtcagttgctgcaatatactgctagtccttttgcttgcattctatgcaagaggataatggaatgttcattccccattcttcaaagttttttttttgcaaataaaaggaggcgatcggtgttccatatttattatgttgatcataacataacattcagagaacaattcataagttcagtcaca

SEQ ID NO: 3877 - DNA, 1304 bp, Zea Mays
ttcgttcgttgtctcccgcgccggctcggaaccctctcgtcgtcgcgctcactgtgtagcacatcctctccggtgtacggctccaacgacaagggctcaagatgatgtgtgcggagtcggatggagtggcttcgcatgctggacgttggcggcgttgtgcttgaagttgaagacgttgtggtcaaccacgtcgtcgcttccagaccgaatctggttttgggcacgcagaatgacttcatacaatttgtcttatcaaccatgttatgtatgaactataggcactgatggttctgacttcaatatgtgcatacatgatggttgaaagggaattaggcttacacctttttcctaattgattttggtggttgaattgtccaacacaaataattggactaactagtttgctctagtctataagttttacagatgccaaaggttcacaacaagccaataaaaagaccaaagatgggttcaaataaagagagctaaagacatcccaaagacaccctggtctggcgcaccggactgtccggtgcaccagggcactcgacgctgaacttgctaccttcgggaaaatgggaggtcgctccgctataattcaccggactgtccggtgaagcaccggacagtgtccggtgtgccagcggagcaacaactacttcgtacgcaacggtcgactgcaacgcatttaatgcgcgcctgcgcgcgcagaggacagagcacgcacagaaggcgcaccagacagtctacaggacctgtccggtgcaccaccggacagcccagaggccccaccagtcagagctccaacggtcagaacccaacggccggctgacgtggctggcgcaccggacagtgtccggtggcgcaccgaactgtccggtgcgccatgcgacaacaaccttctaacgaccactttttggtggttggggctataaataccccaaccaccccacattcaatggcatccaagttttccaccttcaacacattacaagagctatagcattcaattctagacacaacaaaggagatcaaatcctctcccaagtccggaatcactccaaatcaaatagtgactcgagagagtgacatttgtgttcatttgagctcttgcgcttggattgcttcttttctttctcattcttcttgtgatcaactcaattgtaaccgaggcaagagacaccaattgtgtggtggtccttgcggggactttgtgtcccatttgattgagaagagaagctcactcggtctaagtgaccgtttgagagagggaaagggttgaaagagacccggtcttggtgacc

SEQ ID NO: 3878 - DNA, 1263 bp, Zea Mays
tgtagcacatcctctccggtgtacggctccaacgacaagctcatgctgtcagggctcaagatgatgtgtgcggagtcggatggagtggcttcgcatgctggacgttggcggcgttgtgcttgaagttgaagacgttgtggtcaaccacgtcgtcgcttccagaccgaatctggttttgggcacgcagaatgacttcatacaatttgtcttatcaaccatgttatgtatgaactataggcactgatggttctgacttcaatatgtgcatacatgatggttgaaagggaattaggcttacacctttttcctaattgattttggtggttgaattgtccaacacaaataattggactaactagtttgctctagtctataagttttacagatgccaaaggttcacaacaagccaataaaaagaccaaagatgggttcaaataaagagagctaaagacatcccaaagacaccctggtctggcgcaccggactgtccggtgcaccagggcactcgacgctgaacttgctaccttcgggaaaatgggaggtcgctccgctataattcaccggactgtccggtgaagcaccggacagtgtccggtgtgccagcggagcaacaactacttcgtacgcaacggtcgactgcaacgcatttaatgcgcgcctgcgcgcgcagaggacagagcacgcacagaaggcgcaccagacagtctacaggacctgtccggtgcaccaccggacagcccagaggccccaccagtcagagctccaacggtcagaacccaacggccggctgacgtggctggcgcaccggacagtgtccggtggcgcaccgaactgtccggtgcgccatgcgacaacaaccttctaacgaccactttttggtggttggggctataaataccccaaccaccccacattcaatggcatccaagttttccaccttcaacacattacaagagctatagcattcaattctagacacaacaaaggagatcaaatcctctcccaagtccggaatcactccaaatcaaatagtgactcgagagagtgacatttgtgttcatttgagctcttgcgcttggattgcttcttttctttctcattcttcttgtgatcaactcaattgtaaccgaggcaagagacaccaattgtgtggtggtccttgcggggactttgtgtcccatttgattgagaagagaagctcactcggtctaagtgaccgtttgagagagggaaagggttgaaagagacccggtcttggtgacc

SEQ ID NO: 3879 - DNA, 3983 bp, Zea Mays
aataaaatatgtcactaagttattaccatattttgatagggacacatttttgtaatagatgtcacatgaacatagttattagtgacccatttttaaaaaagatgtcactgcgaaaaaatagtgacgtgtttttaaccagtgtcacagatggccacgtcccctttgagtttgagccttttttacgtagtggtccttgggctggtgcgtgtcccaagtgtcagtcaccacggttagtcttctagcttcttcaattcctcgatcaagacccagtgctcgtccttcgacgctcctggcccatcggcacgaactcacatgatcttcgcattcgacgtcgaccaccgtttctatactgcacaccacaagccgagagacatggatacatatacacataatctcgtactatggttagtccatgacttacatcaaagcaatactcatgttaacaattacttatcatcaacccgaaccacaaaggtcaaattaaccttgtgttcgtaacaatgattttgttggcgttcccgcgcttgcctctggtgccgtagactgacatggaatggaatggcggacaaagtcctccttggtcatcagtagggctggacgaaatgctcgtggctcgctggctcgctcggttcatggccagctcggctcggctcggatcgactcgtttgaattttttcacgagctgagctaacatcctagctaggttcgttaacgagccagctcgcgagctaaacgagctaccatattccagcaaaacgaaactatatagatcatttacagaataattgattaacatgttatatatatgtgaggtgtctatggtttatgaattaaactaatgattaatgaactatgtctatgtgttaatttggtctatgcaaatataattatggattaaactgattaacatgtatgcgaattgtggattaacgagtgatgaattatgctaatttggcgttgttttgacgtggtttgtgaaactgagtataattactattttctattgttaaattagtttaaaattaactaaaaataattattatgtatattttatttttttctgctctggctcgcgagctaaacgagccagctcgagctcgtaaacgagccgagccaagctgactctgtggctcgttaccttaacgagccgagccgagctggctcgctatccacccctagtcatcaggatgatataaaatatgctcaacactctgttccaatttataattcgtttaacctttttaccttaagtttgactggctcgtcttattcaaaaatttcataattatttatattttttgcagtgatattgtttagcatataatatactttaaatgtggcttcgaatttttcattttttcgcaaaaaaatcgaatagaacgagccggccaaacgtgacaggaaaaagtcaaatgaattataatttggaacggagataattttttacatggcaatatttttttatctttgtcgtcttgctaaaaaatcaaagatgtactttaggtattgacaataaaaatgagttgaaactctcaggtctcagctgttgaaattttttgaaacaagatgagccgagccgatcaagatagtgggctgcgattattttgtgtggtcagatttctttaattagtgtggatatttggtcactgaggataggcacaaccatccatagcaactagccagggaatccagcctaggccgtctctacatgatccgttcatattctcattccttttcccatcagcggcacgcaaatatgaacaatgtgcattgaatgctatagatggttctggaatccagtgtccgatcttgtaggattatttggctagagaatgcgggcaggtgaagttgcaacaagacagaaatattctctgaaaaatttaggatgcggagttgtagagaaaaaaccatgcatggattagggttctgtcatttgtcttgctagctgtgcaagattctttggtttgtcggttttcttttgttgttaggtaaatgaaataccatcaaatctcccagttgccatttttcaacacaaatattccttgcgtaccatttcaatttttagtcttcatcgcgtatgcatatcatgccaaattttcacacctttttttcactataagaaaaactgcactgatgccttttttctttttcttttggctgttgctcccgatgtgatagcttggtttatcccagggttaacctttccttttttttggaggtcatcgaaaacaggattttttggcgaatttcaccaaattttgtatttttcaaccgggatggggttttgaaactaaccgcttgattggttgtccgcgctgtcttatcgtggctggcgtgctgatgaataattatgcaaatgacacatctatgcactaacacaaaccctaaaccatatgcaggaacagttaaaagaaattcatcagtacatgaatagacgctataaattctctacacattacatccgcttgcgaaatcaacaaaaaaaaacatcaaatcagtaacaaatctcacctcaggcgttcgggatgcggcgaaatccactcggaatgcgcggtttcttaacgggtcaagtgtttttaatttttttacctatgaaatatgtttaaatttttaacgacgccaacttcagaatgctcggaaaaacgtagtttttatcatattttccactgttttttcattttttaaaattaccaacgaattttaccgagttttcctgatttttttcccgtactgagataacgaaaattttaccggatttcgccggggaagtttaaccctggtttatccccgaaatgctgtaacagaacttgctgctcagtgcccataccaggtttgtaattataatgatcttaagttacattctaaaccttttttccagttctcacggcattgcctcgctgatggcatataatctcactaacaatagctactacacagtggcggatccaggattgatccaagacgggggctaataagctaaggctataaaattttttaaatcaaacaaaaaaatataattaatatttaatatgacaccagaaacaagatataatttaaatatttaagaaatatatagcctaaaaataagtcgatacgaattttagaaatacaataatcaatacatactattcatgagttgatgttgcgagataaatttattttccgagttcttaagccttaaaaatgcttcaaaatattttcatcttaaatatctacaaacatatttttagctagtgaattgtattattacagtgactgatctcgagtgaaatataatatattcctacctttatagagcgaacaggaacatcttgagtctgtcggtcggccagatccaaaaccctgggctgcgaagtgcgaaccatagcgggtttaactgaagagggggaaaataaaataattctagatttttttggcatgaattgtgggctcaattggatctaatccagattaaaccatggtctaatataaccgaacgaggcttacctggtggccggtgcttggcttcctggagaccaggacgaagcgaaatccagatctgccactggacgcagcgctgctccgcttgtctccgtgctgttcagcttgggcgcttcctgctcatctcctcggcgttgctgagctgctccgctggcgggctggcggctggatgcgattacacgacgcgctgacacaggtacgcggctggcggctggaagctggaggcggagacgcgacttgtactgggcctatttgcttgtattgggccgcgaccggggctgcagcccaggcagccccggtcgtagatccgcctctgctactacagttctgtactatgcatacatccttgcattgcattgcacctcaagcatacggcatgcatcatctgcagctgggcctgcctctagttcaagccatgatttttcacaggggtacatacatgaagcagaagaaccatttgcataaattggaatattatgtatatcatatattatggaatgaag

SEQ ID NO: 3880 - DNA, 2865 bp, Zea Mays
ctcgtctcaggcgccgccgccgccgccgagtcgcccggctcccgagctcgccctcctccacgcgcctcctgtcctgttctgtcctatcctatcctatgtccctgtaatgccccttggccacgtcgaactccgccgcgacgttgaggtcgccaaggcttcatctccgacgagacaccagacacgggttgttgttcaaggggcagggcctggtcctcgctatggtcactgcatggatttggcagctcaacggtatcttgttactgtatcaggaaatgacggacagacaaacctaatattaatgaatgaatgtaatggactacatgacttctgccatgcagatcaagaggtagcatcagctgccacatctgatccatctactttttttcatttgaccaaaattaatttatatttggagatggtattaatttatgttttatcgccttatagcatagcctaatattttcttgccagatgtacttatccttttcagtgtacgtgcaaaaccttttggaagtgtaagtctatgcaatgtctaactccttaacatccaaaattggtggtactaataaagaagataaacaatctacagtgagttatctcgacttcttgacatgcaactgctagagacctatatcttgcactaatatgcttgtatataggactgatggcaaactattatccaacaatttttggatgaacacaatggaatgatctacaacagttaaattgattgactactatgtacaacagaatattctgtattttttatgttaacgtacacaaaactactgtgtacgcattcatgttcattttagtccaccggtgagagactgcgttgtcggcccatcaagcaccgtggagacatcgtcccatcggcgagggcgcaggaaccctgaaaggcaaattgttcaaattcacaatatccggtgctgtcattctttcttttaactcgtcttctgctggtgatgttaccaaactgctaaaaaacgctttggctgcatttgcggatctagagggtggacaggatgggcccaccctctgatttcgatcctgctaaaagtatatagatgattttgatgggcccaccctctgattcatttttgtcactaatgaatctttgtacaaattatattttgaatgctcaagaaaagagttctggaactaaacaatggtacaggatattcatccttattgcacttgtatagtgtgtgcaggctgcttctcagtgataaaacgaatctttcagttgcatacttctcataaacgaaagattatgttcagtagataaacatttgttccctttttaccttttaaagctatatttattgttgcttggcatatgtttcctttttaccttttaaagctatattgattgtttcttggcatttgctttactaaccatcatgaattgaacatatagctcatgatgttccagttagggttaagaattcatacaaccctaaagctccaggcacccttattaccagacaaagggacatggataaggttgtactaactagcatagtgctcaagtcaaatgtcaatatgttggacattttgagcactcggatgcttggtcagtatggttttcctggcaagggactgatggaattcttggagcaaaggagcagcgcacgatcacctccaaagaaagacccatgctgcttctacaaggagctgtacaaagattttggatgagatgatggataatggttttccactcacaactgagccaaacatcttgaaagagatgatcaccccacctaatattgtgaacaaaatgttgaatgttgttactagcaagagttctacccttggcagcaaacttccagatgcagctgcttcttttgtaccttggcgaagaacaacggtcaaggatgcaagcaatgaagtctatgttaacatagtcgaggaacttgatgcatgtgtgaacagagagggggttcttgtgaaatgcgaagcatacggtgaagtccaagtaaattacagcctcccaggccttgggaatcaaatcagatcctatcatttgttcctgccgacgggcagttcaagctcatgagttatagtgttcagaaactgaagaagacaccgatctatgtgaaaccacaattaacatcagattccgggaactgccgcgttagtgtgatggtcgggattcgaaatgatcgtgggaaacctattgattcgataacagtgcagttccagttgccccctcttattgtttctgttgatctgactgcaaactatggcacggttgacatccttgccgacaagacctgtttgtggacaattgggcagataccaaaagacaaagcaccaacactctctagaaatttacgactggaggaagggctcgcacaactgcatgcattgccgacatttcaggcgaaattcaggattatgagagttgccctatctggccttcaaatcgataagctagacgtgaagaaacaccccgaacgctccgtacaaaggttttagagcccagactcaagctgggaagtatgaggtcagatcgtaggtgcttgcaggggggcagttgttagttcattcttgtagaaaacaaatgatgttgcggacctagctcatggcctgttaacacattgttatggtcatcagttgagggttcacgaccagctgcatttgggtcgttgcatttgatgggaggtgccattgttctttgttcaggtcaataggtgtcttgtacctgaatcagattatcctctgtggtgtgaaagcaacagaatactgcgaccctaggcctatctagatcaaggttttggattctggcaccttgtgttataaaattcacttgagtatagaatctctattttttgttgtaagaaaaaaatctctttttgttag

SEQ ID NO: 3881 - DNA, 1907 bp, Zea Mays
gttctgtcctatcctatcctatgtccctgtaatgccccttggccacgtcgaactccgccgcgacgttgaggtcgccaaggcttcatctccgacgagacaccagacacggttacatcctgctggagacctccgtctccgagggctgcgcatgctgcagctgcagtgggcaccatggttgttttccatgtactagggacttgggatcttcaaattccatttccgcgccaacttttttcagttgcgatttataaaatggcgacgcagggtggaattggaccagcagggcactccatagacgatctctatgtccttgacctcacaaacgacaagtttaaatggcacatgttagggttgttgttcaaggggcagggcctggtcctcgctatggtcactgcatggatttggcagctcaacggtatcttgttactgtatcaggaaatgacggacaatccagttgagaattacagccaggttaacaagatttttaatgtggattctcaaccatgtacgtgcaaaaccttttggaagtctcatgatgttccagttagggttaagaattcatacaaccctaaagctccaggcacccttattaccagacaaagggacatggataaggttgtactaactagcatagtgctcaagtcaaatgtcaatatgttggacattttgagcactcggatgcttggtcagtatggttttcctggcaagggactgatggaattcttggagcaaaggagcagcgcacgatcacctccaaagaaagacccatgctgcttctacaaggagctgtacaaagattttggatgagatgatggataatggttttccactcacaactgagccaaacatcttgaaagagatgatcaccccacctaatattgtgaacaaaatgttgaatgttgttactagcaagagttctacccttggcagcaaacttccagatgcagctgcttcttttgtaccttggcgaagaacaacggtcaaggatgcaagcaatgaagtctatgttaacatagtcgaggaacttgatgcatgtgtgaacagagagggggttcttgtgaaatgcgaagcatacggtgaagtccaagtaaattacagcctcccaggtgtgccagagctgaccatgtcctttgctaacactgcaattatcaatgatgttaccttccacccctgcgtctgattcaggccttgggaatcaaatcagatcctatcatttgttcctgccgacgggcagttcaagctcatgagttataggtactcatttgtgcgctagcttttcttctgtacacactcagcacgctcacgtttgatcaaacaagcaatgttcagaaactgaagaagacaccgatctatgtgaaaccacaattaacatcagattccgggaactgccgcgttagtgtgatggtcgggattcgaaatgatcgtgggaaacctattgattcgataacagtgcagttccagttgccccctcttattgtttctgttgatctgactgcaaactatggcacggttgacatccttgccgacaagacctgtttgtggacaattgggcagataccaaaagacaaagcaccaacactctctagaaatttacgactggaggaagggctcgcacaactgcatgcattgccgacatttcaggcgaaattcaggattatgagagttgccctatctggccttcaaatcgataagctagacgtgaagaaacaccccgaacgctccgtacaaaggtcaataggtgtcttgtacctgaatcagattatcctctgtggtgtgaaagcaacagaatactgcgaccctaggcctatctagatcaaggttttggattctggcaccttgtgttataaaattcacttgagtatagaatctctattttttgttgtaagaaaaaaatctctttttgttag
